United States Patent Application Publication US 2021/0189491 A1 - sequence listing, part 2

SEQ ID NO: 1940 - DNA, 22743 bp, Homo sapiens
ggagttagcgacagggagggatgcgcgcctgggtgtagttgtgggggaggaagtggctagctcagggcttcaggggacagacagggagagatgactgagttagatgagacgagggggcgggctgggggtgcgagaaggaagcttggcaaggagactaggtctagggggaccacagtggggcaggctgcatggaaaatatccgcagggtcccccaggcagaacagccacgctccaggccaggctgtccctactgcctggtggagggggaacttgacctctgggagggcgccgctcttgcatagctgagcgagcccgggtgcgctggtctgtgtggaaggaggaaggcagggagaggtagaaggggtggaggagtcaggaggaataggccgcagcagccctggaaatgatcaggaaggcaggcagtgggtgcagggctgcaggagggccgggagggctaatcttcaacttgtccatgccagcagcccctttttttccagaccaagggctgtgaacccgcctggggatgaggcctggtcttgtggaactgaacttagctcgacggggctgaccgctctggcccagggtggtatgtaattttcgctcggcctgggacggggcccaggccgggcccagcctggtggagcgtccaggtctgggtgcgaagccaggcccctgggcggaggtgaggggtggtctgaggagtgatgtggagttaaggcgccatcctcaccggtgactggtgcggcacctagcatgtttgacaggcggggactgcgaggcacgctgctcgggtgttggggacaacattgaccaacgctttattttccaggtggcagtgctccttttggacttttctctaggtttggcgctaaactcttcttgtgagctcactccaccccttcttcctccctttaacttatccattcacttaaaacattacctggtcatctggtaagcccgggacagtaagccgagtggctgttggagtcggtattgttggtaatggtggaggaagagaggccttcccgctgaggctggggtggggcggatcggtgttgcttgcctgcagagagggtggggagtgaatgtgcacccttgggtgggcctgcagccatccagctgaaagttacaaaaatgcttcatggaccgtggtttgttactatagtgttcctcatggcgagcagatggaaccgggagacatggagtccctggccagtgtgagtcctagcattgcaggaggggagaccctggaggagagagcccgcctcaattgatgcctgcagattgaatttccagaggcttaggaggaggaagttctccaatgttctgtttccaggccttgctcaggaagccctgtattcaggaggctaccatttaaagtttgcagatgagcttatggggggcaatcttaaaaagtccacagcagatgcatccggctcgaggggccatcagctttgaataaatgcttgttccagagcccatgaatgccagcaggcacccctcctttcctggggtaaaggttttcagatgctgcatcttctaaattgagcctccggtcatactagttttgtgcttggaaccttgcttcaagaagatccctaagctgtagaacattttaacgttgatgccacaacgcagattgatgccttgtagatggagcttgcagatggagccccgtgacctctcacctacccacctgtttgcctgccttcttgtgcgtttctcggagaagttcttagcctgatgaaataacttggggcgttgaagagctgtttaattttaaatgccttagactggggatatattagaggaagcagattgtcaaattaagggtgtcattgtgttgtgctaaacgctgggagggtacaagttggtcattcctaaatctgtgtgtgagaaatggcaggtctagtttgggcattgtgattgcattgcagattactaggagaagggaatggtgggtacaccggtagtgctcttttgttcttgcttcgtttttttaaacttgaactttacttcgttagatttcataatactttcttggcattctagtaagaggaccctgaggtgggagttgtgggggacggggagaaggggacagcttggcaccggtcccgtgggcgttgcagtgtgggggatgggggtatgcagcttggcactggtactgggagggatgagggtgaagaaggggagagggttggttagagatacagtgtgggtggtgggggtggtaggaaatgcaggttgaagggaattctctggggctttggggaatttagtgcgtgggtgagccaagaaaatactaattaataatagtaagttgttagtgttggttaagttgttgcttggaagtgagaagttgcttagaaactttccaaagtgcttagaactttaagtgcaaacagacaaactaacaaacaaaaattgttttgctttgctacaaggtggggaagactgaagaagtgttaactgaaaacaggtgacacagagtcaccagttttccgagaaccaaagggaggggtgtgtgatgccatctcacaggcaggggaaatgtctttaccagcttcctcctggtggccaagacagcctgtttcagagggttgttttgtttggggtgtgggtgttatcaagtgaattagtcacttgaaagatgggcgtcagacttgcatacgcagcagatcagcatccttcgctgccccttagcaacttaggtggttgatttgaaactgtgaaggtgtgattttttcaggagctggaagtcttagaaaagccttgtaaatgcctatattgtgggcttttaacgtatttaagggaccacttaagacgagattagatgggctcttctggatttgttcctcatttgtcacaggtgtcttgtgattgaaaatcatgagcgaagtgaaattgcattgaatttcaagggaatttagtatgtaaatcgtgccttagaaacacatctgttgtcttttctgtgtttggtcgatattaataatggcaaaatttttgcctatctagtatcttcaaattgtagtctttgtaacaaccaaataaccttttgtggtcactgtaaaattaatatttggtagacagaatccatgtacctttgctaaggttagaatgaataatttattgtatttttaatttgaatgtttgtgctttttaaatgagccaagactagaggggaaactatcacctaaaatcagtttggaaaacaagacctaaaaagggaaggggatggggattgtggggagagagtgggcgaggtgcctttactacatgtgtgatctgaaaaccctgcttggttctgagctgcgtctattgaattggtaaagtaataccaatggctttttatcatttccttcttccctttaagtttcacttgaaattttaaaaatcatggttatttttatcgttgggatctttctgtcttctgggttccattttttaaatgtttaaaaatatgttgacatggtagttcagttcttaaccaatgacttggggatgatgcaaacaattactgtcgttgggatttagagtgtattagtcacgcatgtatggggaagtagtctcgggtatgctgttgtgaaattgaaactgtaaaagtagatggttgaaagtactggtatgttgctctgtatggtaagaactaattctgttacgtcatgtacataattactaatcacttttcttcccctttacagcacaaataaagtttgagttctaaactcattagaattgttgtattgctatgttacatttctcgacccctatcacattgccttcataacgactttggatgtatcttcatattgtagatttaggtctagatttgctagctccaagtaattaaggccatgtaggagagcatggtaaccacagatagaactggtattatcccaagtggtctgcagactgctgagtggggatgggatctgctctctgttgagagttggtaatcattggtttgaaatgtgatgaaaccactcaagccaatgaaggtgggtgtgtaggtggggagtactttgccataatattttaaaacattacctggttagagttctaagtggtacttatttttgtttggttaggggaaagcctgaataaaaacagaaatggacacataatatgcatattccatagtctttgggaggctggaatgtgcctgggatttgggtctaagtgtatgcgtaattcttacctcactaaagaatttgccttgtttttttccttttggtgagtgactaaaacgtctgggcttccctgtgtgcgtgctacagtaagcaagcagaggctgtgcaaaggtgtgagcaggatcacgtggaatctggaggatacatcttggcttgcaaactgcctctgtctcctgggtgggactgttctgtccttgcactgctgttctgtgttacctcttggggtgtaaggttttgcttacaggagacaaactttgggcgtagaatggaagccactgccagcctctgtgctgagaaggaaggtgcttgtttcaaagggagcagcaagggaggcttgttctactcacctgggcctgtttgcctgagaaggggagataagggctgaactgggactagccagggggaccaacacaaatggtgggggatcatgacctgaaggattctttccttcccatgagctgcagggctggttgccgtccttgcaactgtgtcttatttgcctgtgccgttatatcttggtgacccctccacgtgtacactactgacaaacgggtggagtgctggggagaagtcactgtgccgcccacctagtaaaccttctgtctgtgctcatggcatctccaagatggggcactgctgtgtgcagaatccagggtcctctttctgcttgcaactcctttccctggatgccccagaaacaatccaggcctcctttcctatcttacccctttgctttgctttttaccccagcacctctataaccgccttctcttcttttcagaactccttgtttctcgtcctgttttttatgattacaaaactcttgcttccaccctggaagataactgctatagatgcctgtatgtaaatggtgctgtctccagcaactggcatgctgaagaagaattgattcacggggtataaatgttggggattggaagtggggatgaaatggcacttgttgatacaggagcagagaggtgaggccgactgctgaagacagctcgccaccctccttgcctccactccaatccaggggctggggccacattctttgccttcatttatcctcagatcaggtgagatcgacaggaggtgttgatggcagtgccagcaattattgctaatccgtttgcatccttatgcatagatctgaattcagactttgtgaatttccagaggtgtgggtaatataatagaattcagtgagtgggcatggctgatcttgtgcaaattaaaagttatggggcataagaatagcaaaagttgaacttcttttaaaaaggaaagtaccctgagagccagtattggttgaggctcttcagtatgcccaggttggcagcactgagaaccgcaggaacggcctgttgttacaaaaaggagattgactcagctgcccttggtgcatctgactgactatgactgctgagagattccaaggacccttaatgccagggctaacctctccatgtgcagtgagacctctggaggaagtgtcatcctctggctttgtgtggtactcattatggtgcagtgcgggcatgaaatgaagacacccaaataggcttacagatacgatatgttttaaatgttcgtatttaacaaaaacatactgacactgtttggaaatggcaacaggaagatagcaaaatgaatactaacattacgaaaagatgaacaggtacatgttccaaggcaggtggctgtgaacttcctctgagtgaaggcatcccctccagcacctttcagcctgctagttaggacgacccgccgccaccctccaggacctccagccctgcactgcctttcctctcttttaaataattcttcattgagttctaatatgtaaaaaaaaaaagtttactgtaaagtttgcaaataaggaaattttttttaaaagtcctcagtaatcttaccagtaacaattgttatgggcacatttgcttttggaagatttcttttgtatgcatgggataagtacatttttaaacaaaaatgggattatgccataaattctattttgtgactttaatatatagtgaacaccttttttaatgatgacaggatgttcccttgcatggctgtatcaatttaaacaatcttgtttcaatgggcatacagggtattttctagtttttttttcctcttagaaaataatacttgcgatgactttccttgtagctcagactttttcacgtctgttgttatctctttgggaatgctgaatacatacatttcgagaaggaaatgactgttaaactcttaagacttcaggttcatattgctaaactgcccagcagggagggattttttcaattagtgttctcactggtgaggcaaacctgatgccttcccctcttcctcagaaccggctttatcacattgaaaacctttgctcctccgacggatcgagtctgctttccctctggatgtgagcattgctttgtctgctggtgactgaacatctctaccttgtgtcaattggccatttgtggtgtgtgtgtgtgtgcgtgtgtgtgtgtgtgtgtgtgtatgattttctaattcctagtcatttttctattgattgttttgcaaaagccatttacatcttaaggatattgataatcttttgttatatttgatgcaaatatttttttccagtttataggttgccttttaattttgtgtttcaggtagataaaagttaaacgattttcttaggttagtttatcactgtggtttctgaacttgttatgtgtagatcttttccaccccaagagtacataaatattaatccatactttcttatggaacttgtatggtttcgttttttacatttaaaccttcttccccgtggtgtgtgttgtggaatctgtgtttgtgtgaggaggggcatggtgctctcagaacccacctcctgtggccagagagccctgtcctgtgagggtggttgtcacagtggcagggttcaattcagaagaccttgagggcaggctgatgtttcctgaatgggcccctggttgttgcttgtccctgactctccatttccccatctgagtggatttggacctaatagggcactggagctggttcgaatcctgactggactacttggcaactttatgtctgggagcaagttacttaacctccccaagcctgtgtctgtgaaatgcgggtaaatgaatgtagatgtttggcagcagctactccttgttgagctctcacagtgaactctcctgcctctgccctccttccccgcctcccctggtgcctagcgtcaggtctagccacttcctcctgggcccctctcccttttctgtggctggctgcctgcccgcctggcgctggacctttcatgtaacgggaatcagcatgtatattctggtctggtctgtttctacacttaattttgtttccagtagtatttccctgtaccggcagagttcacaaacacatttgaagaggctttttctcaggattcttaaccttcccaaaggaagtcccatggatgggtttctagaagtctataaatgctctgaaattgtatttttctgtggaaagcataactttcatctgcttgttcgtgctcaaaaaagatcatgaatgaatgattgcatgattttatgccattgtgcttatactaaaggatatgtagcccatctcttgagctgttaaactgttttgactactttaaatcgtgcagctgtgagcatctctgtaaatttagtgtacacatgtatcccctggagtggcattgcctcggcagtgagcacttatggttttataactctcttcacagactcaaatgactccagaaagctacacttcctgttgtgagtatatgatatccatttccctacatagccactaacatcaggtttttacaattttatttatttcttgctactttaagaaatttttgtggtgaaatacatataatagaagttgactatctgaatcatttttaagtatacattcagtagtgttaagtatgtcgccattgttgtacaaccaatctccagaactttttcatcttgcaaaacaaactctgtacccattaaataacattaaacattccattccctccagcctcagcaaccccattctactttctgtttctgtgagtttgactattccaagcacttcatatcagttaaatcatgaagtatttgtctgtctgtgactggcttatttctctgagcacagtgtcctcgagatgcgtctatgttgtagcatatgtcagaatttccttcctttttaaaagatccaaataatattcttattttatatcttttttttatccattcatccattagtggacacttgggttgcttttggctattgtaaataatggtgctatgtacaaatatctatattattgtatttacaagtataatgctgtaatgtacacacatctttttgagatcctaccttcagttcttttgagtatatagccagaagtggtattactaaatcttacgatatttctatttttaatttattgaggaaccactgtagtttttcatagcaactgcaccattttacgttctcaccaagagtgcacaagggttccgaggttcccacatcctccccaacacttgttattttctgctttttttagattgcagccatcatagtgggtgtgaggtgacatttcattgtggttttgatttgcatttccctaatgaggagtgatgctgagcatcttttcatatgcttactggtcatttgtatgttgtctttggaaaaatgtctattcaagtcctttgactattttaaaaattgggttattagagttatcgttgttgttgacttgtaggagtttctttctatattctggatattaatcccctatcagatatatgatttgcaaatatcttctcttattccataaggttactttttcactttgttgattgtgttctttgatgtatagaagtttttagttttgaaatagtctaatttatctgtttttacttttgtggtctgtgcttttggtgtcatatccaagaaatccttgccaaatccaacgttataaggtacttttaaggtattttagttgtcttagtctatatttctgtactcacctttctttatccactcatcagttgatgggcatgtaggttggttccatatctttgcaattctgaattgtgctatgatcaggtgtctttttagtataatgatttactctcctttgggtagatacccagtagtgggattgctggatcgaatggtttttataattttctattttaccacagtttctctctgcatttttcctctttgaccactaaccatgtgaaattctcatattgacctttataatgatcatgaactcttagtatcattgggaaggccacatttgccacttatgattgtaaaccttatcctccatttttcctgttattgttggtgcaaaaagcacctattataccaggactttaaaaatcagtctgataagtctttgataagtctaataataataactgataagtccattgaatttgcttctgattactttttctttagtagctaaacatgtatgtactcctatgattacaatgaacactcctctccatttaaattaattatttacattgatgaaatagcaaaatgttaatgactaaatactgtcttggttttttcgttccaggtcagtcaatattaacttcttataattttcttttttttctttatgtgtgtgtgtgtgtgtatttttttttttttaatttcaatggcttttggggtacaaatggcttttggtcatatagatgaattctacagtagtgaagtctgagattttactgcaccggtcacctgagtagtgtacattgtacccaatatgtggttttttataccttgcccccctcttaccctccccactttgagtctctagtgtccattatgtcactctgtatacctttttgtacccataagttagctctcacttataagtgagaacacacagtatttggttttccattcctgagttgcttcacttagaataatatcctccagctccatccaaaattgctgcaaaaaaaaaaaaaaccacaaacattattttgttcttttttattgctaagtcatattccatggtgtagagataccacattttatttatccactcactggttgatgggttggttccacatctttgcaattgtgacttgtactgccatcaagtgtctttctggtataatgacttcttttcctttgggtagatacccaggagtgggattgctagatcaaatggttcttaacattttctctctggatctatttctggaaattttaggctccagtttttgttgttgttgttaataaaatgcaatggaatgtaatgatcatcacttttcattatgctttaaaatctggtaaatggaggctagaacactcctgtaaggcaagaatattctctctgttggaactcaaatacacagaactgggtaaatctcaatcttaatctttgattcaggacacaacatggctctcttttacttgctttctttaattgttttttaataatgtggtaagcatttctgaatctcctatccaatacaaaaactaggacaatacagacagtaactcctatggttacaatgaacactcctctccacttaaattaattatttacactgatgaaattgaaatagcaaaattttaatgactaaatactgtctttgattttttgttccaggtctgtcaatattaacttcttataattttctttttttttctttatgtgtgtgtgtgtgtgtgtatatatatatatttaatttcaatggcttttggggtacaaatggcttttggtcatatatatgagttctacagtagtgaagtctgagattttactacaccttccacttatgtggtcccacaccacccgcctcccctgccgcctcctgccaccccctaggccaaggtaataatcatcctgaatcctgggtttatctctcacttgctttcttttcatataattttgcaaaagaatctgatctaaatgtgtttttcagagtatatatttatattttagctgttcttagagaaaatttattattttgcatgtaatcttatggaacattctcatttaataccatggtaagattcagcccttgcccaggggatagttcatttagtttgtttactggatagagctcatcatgtgactatacctcagttagtttatcagttctcccatccatggtgactaggttgcctctcagcctctcaacaacactgtttctcagtgtccttgtagaagtgatatgtgggtgttttctccttacacagagttgaaaggtgacgacaacaacgttggcactaccaatcccccaccctccagaggggtaaccagtgttaccagtttgctgtgtttcctgctacacctcgccttattcacttccatttgtatctgaaaaacgtgttgcatggtttcttttctatagaagtggtaaaatgctattgtgtcctgtacattattgattactttttttcatttaacagtagggagatgcctgggagtacacagagaactgccctcattgttttcaacttctgcactgtatgtctgtgagtttagccattctgctgttaatggaaatttacagtattctaatcttttgatattacaaacagttctgtgcgatcatcgtcatacacaaccccttgtgcacaatgcatgagtgtttctcagggtaggtaccaagaagtgaaattcctgggtcatagggcgtgagtccgacatttttctccattctgccctgttgccctccagagtgggtgtccagctttgcatacctaagtatgagagtatctgttgttcatatcctctacgacgctccatatatgaaacttaagtttctgctagttgccatctttgatctatcatgtatgcagtgacctactaagactgtaattggtacagtagattcttgtcatctgtgtgtgaatttagcattcatgggcttaatgctgacaaggcccccagggtccaagacatataatcatgtataattttgtcaaggtataattttttaaattgcttttgtcatgtgtctgctggtgatgcccaacccagtgctctgcacccaggtcacactgtggctttgtcctctgcttatgcctgcattgcagcaactgtcctgaagagaccaaaattatgcagatttaggtaagtccatggctaatgttattatattatgtgctattgtaatggatggggctgtggagtgtatgaatttataaatcactggtcttgtaattaaaattcaaacactatagaaaaaggccatgtagaagataaaagttcctctataatcccggacccctaagataactactaatgacaacttcatttatattccttcagacattttctggctgtggatgtactaaaatgtatcctattattctctgccctaaaatggaatcatacaaggtgtactgttatttttatggctctataacatgtcatattgtacgtgttggtatggtcattttaaccatttttctagtgatggctttgaggttatttgcagtttcctagccatctcaaagtgtgctgcggggatctcttttgcatccctctgggtgcagagctgaggcacccagaggcagtgtccagaggaggcagcatctgtaggtgtcttcacctgctctggctcttggcacatctggttggtgacactgttttgtgagatgggttgaaagcacgtgctgccaaaatagaataatgttggtcctctcctcatgtgccgtggaactggggtaaaactgcgtagtggctgcagctgcctgtccataccggaatcgagtataacacggtgcctggcttagcacaaaacagtagtgggtcctgcaggccccagagtctaattcctggtattctttcccctacacagattaaataaaccaaaaacaaactattctaggaaagcgtctgtgacatttgtaaaaagtggtatttaatgatcttttattcacttgtctgtttagtttgttgaaatcttaagtggcatcctggtctgggaaggagtgctgtctgcgcctgccctccgctgggcacagcgtggctgcttcaggggctaagcacacactttctgtcttctaaagggccgccacatgccaggagctcaggtgtgagcccggctctggctcttacctcatagggtcactcataggggcacagggagcagaacattgtacacagcgaggcaccacccggcttggcatctgcctcggtggacttactacctctagaaggaaatacctgagttcctctggcctcagctcctagagtgactggtgtgctgtccctgttactcttctgtcaaggtgacaactgtgtgacccatcatctgtgtgtcaaagcaaggccctgcctgggcctctgctcctgtgctgaccccaaaggcaaatgctttgctagtttccttccagttaatttcacctatgaatagatgtgtgaaaactgttcaaagccatacctgcacatgtttgaacttcaaaccctgtgggtgattcagtggcatctttctctaacccccagcctcccttcccacagaggccaccgtcatggccagttgctgcagtttctttccagagaacctgtgtatgtgtaaagctgtacaggcgtgggtacaccacacagcctgtcttgcactgtggactgttgagttactagtacatctaggtaagcaccgcatatctgtattcatgtctgccttggtcttttcaacatctgtgtggtagccgtgtttgaattacccattccctttttggggaaccattaagttgtttcagcaatttttactgtagataaggctataccgcatatctgtgtacatgggtttttatgtacatgggcaagtatatctgtgagagaaaagtttcctcaggaggaattctgggcacagcatgtgtaaatttctaaatatgatggacacccccagcttccacctcaaggaggttggtcccattgacatttccccacaccttcacccaggctgtgcccttaaacttggttatttgtcaatgtgagaagtggaaaatagtatttaattgtagtttggatttgtatttctattgggttgtatacttactgattaataataagagctctttacatattaaggaaattaacccttttcaaatacattcctatttctcactaatctttaagttttattgtaatattttgctctttagtttatatatatatgtatatatatatatatgtatatatatatatatacatatatatatacatatatatatactaattttcttttatggttcctggattttgtgagtagtttgaaaaggctaatccagctgaagattttgttgttgttgttaaaccccatgttttctcctaactctttttatttttattttggaggactctatctagacttaattttagcataacaagtgacagggttagttagcctgttgtccttacaccattttctggctaatacagctattaactattgatctgtctattcacgtgccagttcctaatggttttacatagtgtaatctgcacttcaaaatagcgaagggaagccctacctcattattctacttttccagaattctcctggctattccaggctgcatgtttaccttaaccttccctgtgatgtcttcatgccgttgtcttcttatgcaagaataaggtacgtctttccatccactcacgtctatttaatttgactttgcattacacagaaagctggtcttggtctgtctacctcggcatctagttgtcctcactgccccctagccgaccccaccccatctgactgactaccccatcacagagtacttttatttacgttttgctctgcctaatggttacttgatactgtcacgccgacagtgtccagttcagtggtctttgcagttgaaatgctcccgtacacactgtcttgttaaaaatgccagtaagttcatacaaacccagcttgcacccaaggtcacattcagagagcgtagggctgggatgggttgttttccaagcttctgccactgtgtggctagctcttcccactgggaagttctgtgtacccggaatgtcggagtggagtcctgttctagtgtccagcacctgaccctgtgcccaacccctcaacagcctattcctgctgtccacagcctgctggaactttttacaaaatatgttgccatgctggaccctgggcactggacataagccccctggcagcctttttcatgtcacccaaaggggtaattgtcctactggtggtctgtaagatgagttagggtgacttgctaatagacattgtaaatcttaatatttatgtatgtattttattattaccggttttccatttatgatggtaatattgtttcttctaagaatatttatttttccttctaaatattgagataaaattcatgcttttgaaatgttctattcagtggcttttagtatatttgctatgttgtgcaaccatcgacactatccatttctagaactttttcgtcatcccaaacagacgctctgtattcataaaaaaataacttcctacctgtctctccccctagtctttggtaacctttgttatactggtaaactttgttgtgctctctgtctgtgtgaatttgcctattctaggggcctcatataagtgtaatcatacagtatttgtctttttgggtctgtctgatttcacttagcgggttttcagggttcattcatgttgcagcatataacagtactgcgttcctttttctggctgaataatattccactgtatggatagaccccattttgtttattcacacatcatttggacatttggattatttctggtttttggctattatgaacaatggtgctatgaacagttgcgtacaagtttttgtgtgaacatatgttttcaattctctcattatatacctaggagtagaattactgggtcatatggtaactgtatatttttgaggaactgccaaactattttcccacgtccatgcaccatttcacattcccaccagtaagtaagagggttccaatttctgcgcattcttgccaacactagttattatctgactttctggttataatcattctaatgagtgtgaagtagcctctggtgtcatttggatttgcatttctctgatgagtgatgctatcaagcacctttgctggtgctgttggccatatgtgtatgttccctggagaagtgtctgtgctgagccttggcccactttttaattaggcgtttgtctttttattactgagttgtaagagttctttatatattctggattctagacccttatcagatacatggtttgcaaatattttctcccattctgtgggttgtgttttcactttatcgataatgtccttagacatataataaatttgtattttaaaagtgacttgatttggctgtgcaaggtggctcacgcttgtaatcccagcactttgggagactgaggtgggtggatcatatgaggaggctaggagttcgaggtcagcctggccagcatagcgaaaacttgtctctactaaaaatacaaaaattagtcaggcatggtggtgcacgtctgtaataccagcttctcaggaggctgaggcacgaggatcacttgaacccaggaggaggaggttgcagtgagctgagatcatgccagggcaacagaatgagactttgtttaaaaaaaaaaaaaagtgacttgatttaagggaaaaaatgactggctatattcagtcagatatggcaaaaagtctcaaggtgttaatgtgaatgattaaggtcttggggggggtgtcccctatcagactacaggtgtttagaggcacagaaaaaggtgcagttgggttcttaatgtgaaatgatgagaagcacaactccagtgtgtctctttgtgtagaatgtcagcagacaccccctgctagatgtgctggatcatgggaaagcatttccatttgttactagattgttcagaagttttaatttatgatgggtgtggtggctcatgcctgtagtcccagcactgtgggaggctgaggcaggaggatcatctgaggccaagagttcaagatcagcctgggcaacatagtgataccctatctcttaaaaaagaagaagtttttaaatttgaaataataataggtactggatttatgcaaatgtcttttctgcgtcttttgagatgagtatcaggtttttttttttccttttatcatctgatgatgaacttaatgtttccatttgtattaatggaatactaagtccctctgtgatttctgaaccaagctattcctaggcctgagttttattttgttgacacagaaataaattagaaggccaagcgtggtggcatgtgcctgtagtcctagttgctgaggtaagaggattgcttgagcccaggagttcaaggctgcagcaagctttgattgcgccactgcactccagccttggcgacagactaagacgctgtctcaaaaaaaaacaaaaacgacaaaaaaaaaacaaaacagaaaaaataaactaaggcaatgacagtccctggcaaatgctgggagggaggcagcagtggtcagggaaggtaaccctgaagcaggacttgtaaagcaaataagattgggaggccaaggtgggtggatcacgaggtcaggagttcgagaccagcctggccaacatagtgaaaccccgtctttactaaaaatacaaaaaaattagccaggtgtggtggtgggtgcctgtagtcccagctacttgggaggctgaggcaggagaatctcgaacccaggaggcggaggttacagtcagctgagaccgcaccattgcactccagcctgggtgacagagcaagattccgtctcaaaaaaaaaaaaaaaaaaaaaaccaagaagaaaaggaatgaattagaacttcttctgcttggacttaagggcatcatcaggcaggttttgggtaggatagcaggggaggcagagacatagtcggggtcagtggtcatgagtgtggctttgagcccaaaaacttggtttctgttccctactttgccactcagtagtgcatgactttggccaaatttcttaaattcatgaagcaagtttccgggtgaatgaaatggggataaaaatagtgttcaaacctatccgttggtttgtgtgaaactgaaatgaatagtatcgtgcaggtacttgtgagcaaggggagctgctgtttcctgtccctttatgatgggaaatatctagacaagttcccaaccctctgcactgcaggctgcatggcacggagggtcttgtaacaccagctggggctggccttcttttaggagcttcagtggttctgaaaacttttatttgtttgtttgttttagtagatgtggggtctttctgtgttgcccggactggtctcaaacttctggactcaagtgatcctcccccgctcaacctcccaaagtgttgggattacaggtgtgagccactgtgcccagccttgaaaactttttcaggttcttccagggttactgggctattaaatatttctatttcattataagtcagtttttcaaagttatattatcttaattaccttttttatatgtattagtgtagagtagcattttatattttgatatcctccttatgcatagtttttcactttttattcctagtttttcgtttttaataagactttcaagaaatttattttattggccttttgaaaaaagcagctttagataaagtaagcagttctgctttcattttataatttatttctacttttgtttcattaatcttttcctccggcatgccttggattttgttgtgttactctttttctagaggctcgcattgtgtgtctggttcacttatgatcacgcttgcctacttttaagaatggaagaggggaggtggagggtggctgcacagtcgagggtgtgaggcagtcttgctctagccccaccatgccctcagcccgctgtggccacgctggttcctcaattgctggggcgtgcagtgtctgtaagggaggctactgatgccatccgaggaagatgtaaggtttcgtgtgggcagcgagagcctagcaggcatgtggggtgcccagcaaagggtaacagtggacagttgttgcctcattccacagagttttgattttttttttttttttaatggtcactccatcaacatcccccatggccagagcctgagctggtccccagagacacaggcattcagctgacagcctcgccttcacgctgctgctgttctcatgggggacaggcctcaggtggcaatgcacaaatcattagttaagggcagttgtgacagttaccaaggagtgtagtcccccgccccccgcccagtgaaaacagccctaaccaggggtggggacctttgggctctgacccgaagggtaggagaagctggaaggacagcattcctgtctgcgaaggcaggagcaaagctgccaggctatgaaggaaatggctggagcctgaagtcatgcaagctggggctggcagggacagggccaacttccaggcctgggggccaccatgaggattcaggacgtgacccccagggcacatgaaggccttccatctgtatttaagaaaagactttatcagacgagtatggtggctcacgcctgaatcttagcactttgggaggctgaggcaggtggatcacgaggtcaggagttcaataccagcctggccaatatggtaaaaccccatctctactaaaactacaaaaattagccaggcatggtggcgcacgcctgtagtcccagctactcgggaggctgaggcagaagaatcacttgaacccgggaggtggaggttacagtgagccaagatcgcgccactacactccagcctgggtgacagagtgagactccgtctcaaaaaaaccaaaagactttatcttatttcctatatgtttgtggtttcagtcctgatgtataatttgaccctagttagaatggttatctgaggaagtggcctgtacgatttctgcttttttaaatgtgtggctccctttcttcattgattaacgtatgattatttttataaatgttccatggcagtgggaagggattctctgtcacattccacatctggatcagttcctccccattttgttggtcaaatccgatctgccatatcctgtgtaatgacaagtgagttgcattctcaccgtcactcctggggtctctccgcttcccctgagctggctcagcagtctgctccatgtgttttgatgcagggtgacccattggtattcccgacactaacgcccccgtctgtggactgcttgctgcttgggcttcactgtgtctggtgttgacagtgcagacctaaaggtgtgcacacatgtgcacacacactccgctgtcttcttgtttgcactggacttaaatatctatgagggttattttcaactgctgaatttggaatgatttttatatcttttctgctttctgcccatgtacatgtgtttattttacactgttgtgattggtagttactatgtggggacacaattacttgggctgaaataatccacctgttgtggttggggtcctctggggcattccagggtgagaggttgtcactgccacctgggccatgtgggccggcaccagcattttgtggttacgaattctacagtcacaaatatctttgggcaaatccccttctatacctcaaggcagcttttggtttgcaaccccactggccagagggaagggccagtcacttggctctctcactgccctgcgccccagatggttctagggctgctgttttcccttggccctgccaacaccactgtttttacttctgctcattggctgagtgcagtggttcctggaagccagtggcacgtttccccgcgtagctcgcttatcccacagcacacacccaagggttctgttgctaacacgctgaattaattctttgctcatcttacagagtgtgttttgactgcccccatttctgaggccttgtaaggccagagctttgttgcttcatcggcaggttgggacttagatggccgtgaatgtttcctctctgctgctgcagtaagtaagtgcccgcaccatagtgtgtttggaggctgaagttgaagcgaggctgtgaggggagatggacgtgtgaggagggatgatggggcttgagcaaagtgggggagggggcaaaggcagttggcccaacacattccccacccctttgagaggtctgaggcctgcagacctggctcggagcccacctggtagtcctcagactgtgtgtgtgtgtgtgtgtgtgtgtgtgtgtgtgtgtgtgtgtgtgtgtgtgtgtgtgtaaaagagagaagttgtggagaaatggggggctgattctgctcagattcatcaggatgagtagaaggcacccagctctcaccctggcctgacatgtgtgtccctgagcaggttacagtcctctctgagcctctgcttcccatctggaccctgctgggcagggcttctgagctccttagcactagcaggaggggctccaggggccctccctccatggcagccaggacaggactctcaaatgaggacagcagagctcgtggggggctcccacggacccgccgtgggcccaggggaggcagagcctgagccaacagcagtggtgctgtggaccgtggatcctgagggtggcctggggcaagtaccggctgagggtccaggtgggctttgtgtacctttgggtcctggggccctggtgacttggactccaggttagagtcaagtgacaggagaaaggctggtggggccctgtgcttccgacttcatttcgagtgatggcagttcccaggaaggaatccacagctgacggtggctgacagatcagagaatggaaggcgaggcaggcgggcgtctgcgtgacctcaggtgcttggggcccagcagacccagagaaccatttccactaggccagggtgccggaagtgtccacaggtcttagattccctgttcagatgaaaagatttgtgcctttaatgataaaagtgatctgcatagagtcaaaaattcaagccatgggtataaaatgcaagtaaaatccctgccctcacctatcccaccctactacacagagatgtcctctcgagtttcctagactcactctggaaatttctgtatacacacagaagcttgtgcctctgctcgtgaaggcagagggagggagagctgaagggccagcaccttctcacctgtgggccccctcagtgctcggtcccagagcatgcaggactgtgcctcgtgttcagtttgctggtctgacttcatgctccttgggcaggatatgcatgtgccatgctaggagacatgtggatgtgaagctgggggacaatgtcccctggctatgcctttacaagggaagtaaggaaggtaggaggtgagcctgggagggagggagggaggcgcggagccgccgcaggtgtttcttttactgagtgcagcccatggccgcactcaggttttgcttttcaccttcccatctgtgaaagagtgagcaggaaaaagcaaaa

SEQ ID NO: 1941 - DNA, 477 bp, Homo sapiens
agagacaaaggaaacacagagacatagacatggatctgggaaatacaccttttgctactcgttcagttttagcaaggaggtttcttgcatggctaagcaaaacttaaacttcctctgagaattacaggaattacaggacctgacaaagctatgaagattaaaacctataggaagaaaatctgaaccagaaacagtatggcagaattgggatctgactcacagagggaagaacttataattcttcacaggtcacatagaagcatgagaatttgggttcaagcaagtaaattctaaatcagaatccatacataaagtgtttgcaatgtccagttatatctccatgatattttctttgtggaagttgattgttcttccttacaataaattgcttgaattgtctgtctattcatttagctatttcttttcttgtctttgcgatatttttttttgtaagtaaaaaattttcagactaaataa

SEQ ID NO: 1942 - DNA, 917 bp, Homo sapiens
ccctccgtctccttgactctgggtgggctgtgtgacttttccttgctcaatagaatgagaaggaggtggcgcaccggctacaaggctagaccgggggctcgcatatctccacttgcagctgccactgccattagaagaacttgctcagccagctcctgggccccaggaaaaggacaagtgtcacccagaacagagccacctccagctgcactcagctccagaagctggcccagccggtccagtacaccttttaaataatgtcctctacgtgccggtgtggaagtagcccggatgcaattgaatgaacaacagacggtgctttccaggacggcgctgtgctttccaggatggtgctgtgctttcattcatttgggtagctcctctgtgagcctcccagcgccgactgcagagcccccactctccagcctgcaagaccccgaaattcaagccacacaaagaaaggaggagggggccgttggcatttactgaaccttataaaactgtcagcaaaacagcccttaggcttggactccctgctagccgggttttacggtgctgaagtcagcatcttgattcagctgcataaataatctcctgcagtcctgcaaggcctggggtaggagagggtatggggaccagggcactctgtaagggctgggataggaaccccagggaataagacagaccaactgcgggacttcagactccactgcagccgggatcgggttgttgttaatttcttaagcaatttctaaattctgtattgactctctcatgcatgtaactgatccttagatattgtcagccaaatgactaaaggatttagaaatctgattgacttttggaaatctgattgactggcacactctctctgcctctttctttctcaacattttatttctaactatagtttcttc

SEQ ID NO: 1943 - DNA, 2117 bp, Homo sapiens
ggaggcagagaaccgcgggcccgggggccacccgtcactttcaagtcgccccgccagaagcccagggcgaggaaaaggagagagacaaaagagcgctgcggggggagtccccacaccccccgcggccccgcacacggcccggctcttactcgtagtggcggaagatctcgttggtgactttacagtagaaaacttcctcgtcgggccgcaggtccgcgggcggcttctgtctcacaaacggctttcggtgtagcagcggcatctcccgtccgcccgcgggctcgcctggaccctcggccgcccgcgccggccccgcttccctatcaaaattggagggaaaggaaagccggtaaggtggggagccctcggcggcagcgtgggccggtccgcgcgctgggagaagctcggctgccttttgtgtgactgacgcgccgcggccgctaccggagccgagttcgttcctgccgctgcccgggtgtcgagcgagcggagccgccgccgcccctgccccccgagcgcgccctacctcctctcgtcctgccgccgcctcacaatggggcaggacgccccgccgcggggggcagtgcgggagcggcggcggccccctcccccagcgccggctcctcgcccgccgccgccgccaggctcacaacgtgctcggcgcgcagctggccggccggccagcccaacgccgccagagcgctcgccgcgggcggaccccggagctgctccgctttgttcccggctcgcctccacttccccgccggcgccggccggctcccgagcgaccctcacctgcgatcacgccgactgccacttgtccaccttctccactacaaaggcaacgaggggagaccccgtcctcccaggggaccgcctctctccggccccgccgcgcccctggctgccgcttctcccgctgccactgcccgactccgcgcggggaattgcgtcccaccgccacttccccgcctctcggagctcctgggaagtttctgatctactttcggctctgaaggaggaagagctgttgggaggagcttttcactcctcgcttctacctttttattggctactcgatgacttttacagcctgtcactgatacaggaagagacagcggagagcctgggagaactacattattaattaatggagcaacccctcgtgaagattcagaagcatcctccatgtttgagattatcagccaaaagatctagggaaagcgctgggggttcataaacacatggctaacaaagtaaagccttcaagtctggcacagactcttgactacacgatgggaaaagggattccaattacgatttaacttgtattttaaagatgagaaaagaaatgaataagaaaatttgttgctatttttcttcttccaaattagaatctatatctctaaaaatactttgcatgtttagtaaacatccatcttgaacagaagataccttgacatcagttctatttaatacttatggcaattaagagatttagaaagcagaggaaaagaccaaaaaaaaagtatgtgttacaaagtgtcatcatgcttgtaggaccccagcattcttgaaactaacgcacctttaaaaagtaatatttacactgctgtaaatatttgcaaagtatcaatgtttaattcacttagaattttaaggattatggatttactagcgaaaattcccctaaagcaactttcccatatcagtaacttttatttagggaaacaagtttaatgtacataatacatgtgaccttggaattcaatagaattttcgaaactagaagtaactcagaacgttcactagatgtgttttaaagtcttttttgatactgtccttaacatttgcttatttgcaaattaatatgtaagaatgagtctaaaagtaagttttaggaatggttattcgacaaagatgttattcctattaccaatactgcgaaatgataattacagaaacaatgtgggatccgttttataacttcaaatttaagttcctttgtactttggagcagaaaatgtaagaaatcgaaatcaagagttagtattttttatctttcaggctggctttaactgttcatacacctagcaaaataaacatttgtgaaaggc

SEQ ID NO: 1944 - DNA, 732 bp, Homo sapiens
caaccttcacaccatgggggcctgtgagacaccccacgtggatgggttggggccatggcacaggtctcgagggtcctgggtgctaaagactgtgcagaaggacggggtctgaccagtgaagcagccggcaacatctgcagacagtcactggctccaacttttgtttttgtcactgtgtcacccaggctggagtgcagtggtgcgacctcagctcattgcaacctccgcctcctgggttcaagtgattctcctgcctcagcctcccgagtagctgggattacaggcaggcaccaccacgcctggctaattttttgtatttttagtagcgatggggtttcatcatgttggccaggctggtctcaaacaactgacctcaggtgatccacctgcctcggcctcccaaagggctgggattacaggcgtgagccaccgcgcctggcctccatttatttgtaaatagataattctcaacagtatgtttactctggataaacatcagtcagtgcgtagaactggtaaatgtcagagaaatgtatcacttatcagagcgtctcacagtctagtcctgtatttcttctgaactcacgctctgcaaagccagggctgaatgtatctaccatacctgcttgtttacctccaaaccttgcaatacatttatacaaaatatttatttcacagcttatcttaaaacaaatgtaaaaggtatcttcaaataaatcagactgaatctct

SEQ ID NO: 1945 - DNA, 2181 bp, Homo sapiens
tggcagcataagaaaaagaagaaaaaaagtgcatagaattctgccttgaacatcactgtccacgggctgccttcaaaagacagaagggctctaccacggaatgcctgtttcagatttaaaaaataacctgctgagatatgctggcagggcttccttcagcagccacaagaagcttctcaggtgagaagaaacccactgctgttagcactatagatttctttaaggtcacaggcctcttccaattaggggtatcatccatctctggtggcctttccctcctgaagctggggaaatatttcctccccctccaacccatttaccacccgctccatataaccgccttgaagacctctttgggcttgaagaataacttaagacagttttcctattgagtgctgaacatttgcctccccctccccctccagcctgtcactctttccgggcttgtgactgcttcagaattgtgaacttcaaatttccccactgttttgttgatcctgggcttttgattcaagggcctgtctggcaggagatggcctaagcacatcagcaatagcagatgacaaatgccaaaacagaaagaaaataggatacaaatgatttcctcctacatatttacatttacctgctccagagattgtgcatttggggttctacccgttattaagtaggagcctacgttatgcctataatgacctcatcatgctgcgtgattatgggctgcagccgccaaacactttcagacgacactgtgaactttaaattggcactccaatctcccagtggcctgtcagtcatgagaatcgcgtctttatgccagcaagccccttggatggagtctgacattgcaatcttcagtaaattaccctgtcactgacaatcttgcagttatctcgcaaacaatcaagcaggcaatcaaactgttctgaattgccagttcaggacctgagaggtggccgatgtctccattcaacagcagagggaaagcggcctggccctcctatgacaatggacgatttctttatttatttatctacctacttatttgttagtctggttggctttttcctggggaagggggtgaggatggtaggagaggtttgcagagtcctcaaaaagggcccaatactgactcagcggttatgggaaagcgacttaggccttctgaatcagcccacactgcggtggctcatgtctgcttaatcttacttcactcagtgaaacggggccaaaaagaattatctaggtgttttctgtcagaacggacgctaaatcacagctctggttctagtctactcatacacgtcataagctaattgtaatgacaatttcagagaaatgtgatcatggagaaactttctgggaatgataccaaggcattctatttattgcttttgataaagcaaatcagagagattcttccataacagttctggcaacgtgaaacaggttcattaatgctgaattgaaacctttggattagaagtcccaaggtaaaaagccaaaaattctacacagcatcagaggtgacagcctggcctctggaatcagatggatttgggtttgaagctcgtctctgctagttccctggctgtgtgagcttggaaaggaggggtgacgcttccttccccaaggaagtctgaagacaaggcagtggacacccatcaacaggggaaagagaaaatgaatgaatgggagctctgtaaaccacatcagcaacctcgaaaatgtccaactgcaaagacccatgtctacaaattgctgtcagccagaggaatggctgtaacttccttggtgccgagagatgggatttcactatgttggccagactggtctcgaactcctgacctcgtgatccgcccgccttggcctcctgaagtgctggaactataggcgtgagccaccgtgcccggtcaagataatttcttataggacaacaggacaggatcacccaggaaaagatggactccctgctcagttcctacttacagtatctgagtcacttaactaaatgcaatcggcccagctgcaggcaccactgctcgggccactataagaaccagcccctgagcttccggacaggaaacagcatctgcatttccagactgtagcagctcatcatgccaggctccacaggcaagaatcaagcagatggaagctacagaggaaacaaacagggtt

SEQ ID NO: 1946 - DNA, 494 bp, Homo sapiens
agaggcctctcttctgatatccttcttaacttaatctacactggctgtgggttccctttatttttttttctggaatcctagaggatgcacggatacaattcacccaatgtgtccatctctcctctcctaagtgtcagtctataggtttctgacctctagagggtaagcaacttgcccgagatcccctagctggtctgagcagcaaagcctttgaacgcagttttgactctggagctgcattcttcattcttatcctacacttgcttgtgaattctttttcgtccttccagaatccctgaagctgtacagctatactttaccggttacgtctagactataaaggaccacagtgttccacctcaggcaggttcagcgacctgcaagtagtgatacagctgggaaagttacagagcctgcgggaagctccggctgcaacttcagttctgaccagaggttctgtgaaccttcaggatttagcaggtttccaggaccgg

SEQ ID NO: 1947 - DNA, 548 bp, Homo sapiens
gcactaaatcatgaaggctggattcttgaagcctggcagaggcaaatgtctcattaatgctgatctgagagacatctgtgatgagcctgaacatcaggccaatctgcagagctgatcaggggctgctgagtggttctgaagtgagtcaggctgtgaatgaagactccaccagaatgaggagaattccatgcatggagattcaaataaagacaaaagggagatgcaactatggaggctgagaagtcccaccatcggagcgcctctgccccgccgccccatctgggatgtgaggagcgcctctgcccggccgagaccccgtctgggaggtgaggagcgtctctgcccggccgccccgtctgagaagtgaggagaccctctgcctggcaaccaccccgtctgagaagtgaggagcccctccgcccggcagctgccccgtctgagaagtgaggagcctctccgcccggcagccaccccatctgggaagtgaggagcgtctccgcccggcagccaccccgtccgggagggaggtgggggggggtcagcccccc

SEQ ID NO: 1948 - DNA, 2932 bp, Homo sapiens
caggtatctttttaaaaaaattctatgctttgcacaactggtttctgaaaatggattttatggaaactaaagaaaagtgcttttatggaaaaaaacaaaaggccagcatacagagaattaagaagccagtccatgagctgaaccaagcaatgataccatacaacatactttcatcccaaacactggcaccctaaaagcagtgattttccaaaagaacaagtacctcttcactcaccctcagctcccatggaggaggactcagccatagaagtaattatatacagatggccaactctgcatcaataggctttgcatagaattagaagacaaagtgcttttgggtcccaaaagacagtgaagctttatttggtgactttcatactgacttcactctacttactggtgatgatggtaggtgaaacgttatttcttcaaaaatatcaccttgtggtggaagagagaaagaatatccatgcttcttttatctacagtgaaggtgaagagcaacataaacttcagaggttgcagtaagtctggatgccacatcaaactgtttgtggtacttctaaacttcgtggaagagccctgtttcataaatctgagacagccttggtctgagggagcaaagacagagaattcacgtgctgcccaggcatagccacatagcaggtggacatccctggacacttttctgaccctcattggattttcctggaagtacggagagttacatccagagaactctgaacattttggaaggaccccaatcctgcaaacaatgaatggcaataaatcctgggactggaaaggggcttctcaaccccaaggcaaccataaagtcctatacaaagaaagatacagcagtgtgaaagaggcctggatgaaaaaacaaagacagagccagtgagccagagccagagccagaggacaagagagaaaggcagagaatggaaaacacagacagagaaggcagatgcgtagagagacagagattcaatgagaaaataaggaaggaagaaagaaagaaaacaaaaacgttctcagcactacaacttctgccttgttctgttccagaacagtatgagctcagtactttttcagactctcaattttctacaactaataatttgctctttcagttagtggcaaaggcttaacgacaaaggttcatctttaatattagagaggcacttttaaaatttatgatgctaagccttttgttctggatatggtatgttgcacaggtctagggactgggatttcagatgtctattccgtacccttattcttttatttattaaatcttttagtgtgtatttttttctattttctcttcttttattagtatgtatttcttgagtcattaacatacaacatatataggacttcctctgaggatacaataatgtatatgatggacaagatacgtaaaagtgccttgaagagacttggtcttgtgaggggacagacaggaaacaggcaattatcacctaacttaggtctgttgtttcaaggtaaaataagaataataacatctgtgttggctgggatgttgtgagtgtttgtggagataatagtacaaatgaaattactgagggacaatggtgaagatagggccatatcatggagcttacactagtgatggaaggagatgggagatacaaaagcaagtcaatatttcagatttcgtaaatgaatggcaagcatagagcagtgaggcagagaatgactggagaaagagactatgttaaactggatagtaaaggaagagcaggaccccactaaactatatggagttttgtgcaaatcacatgaacacacgtagaacattttaggctgctcatgtgactttggatttgtcctaagggcaatagtaagcctttgaactgctttagcatgataggattttaaaagatcactggctgctgtgtgaacaaaaataatgttgtaaagaaaaggatattagctgtatcagatcagctggagactactgaaataacccaagctggcttggactacataggagtagtgtaaactcattcattcatgcaagaaatacttactgagtgcctactcagtaccagacccttttctaggacatggagttatagcagtgaacaatatagaaaaaaatccccgaattcatggagactccagtgagcagagacaaaaaaatagcaactaaataagttaaaaggaattgagtaccctataaaagtttatcagggaaatgttataaggaatgactttcggagtaatgggtagtgatcttaaatgtatggtcaatgaaaatcagaagttgtagagaagtggataaattcacagtacgttttaaagtagacctaataagacttaatgaatttgatgtggcaagtgagaaaaatacatcaaggatgatgacttttataatttgacttgagtatctgggaacaaacaagtacagtgccataataagggcagaaaattttccattcactcagcaacttatgaactcatttgcttagtctttattgcctcttgcattatgtagttttcactttgctggagtacttgtatagaagatcaccagtgaagaagccagagatggtttatttggtcatcccaataatacatcttattgttaattaactctcaagggttttttttcacaattttagaaaaggtttaagcaaatgaattatttaacatgaattggctatgtgaccctactataaggtgtttaaaacaccaacagcttaaacttcttagatcaaaggacatcctccaggccaaaatgtttccactggaacggtttctttgcttcctgattaaaagcttccctaatatatttccacgtgttattacatattttcgtattcactttgatggaaagcaagaatagcagccaaatacatatttcatgcattcttttgattaaaaatgataaaggtaa

SEQ ID NO: 1949 - DNA, 396 bp, Homo sapiens
cttaataaatatttgttgccttaatgaaacatactattttattcaggctgaggaatcattcataatttctccccatgtccctatgcttcagtaatacggttttttttaatcaaaataattttttaaagaggaaaaggagaaagaatatcctatcttcagttcccctcactgtgggactttggatcagtcacttgatctctctgggcttcaattttcttatctgaaaaattgagagaacagcatgtaccttacacagtttgtaaggttaggtaatatacataaagcacagagaaaatcctccccaaatgttagtgaataacacaagtatttactatttaccattttaaagtacttaccatataatattaaacaataaatgtatgggactcaaaacca

SEQ ID NO: 1950 - DNA, 515 bp, Homo sapiens
actcagaagctgccttgaagaaagggtctacccagcatgggttgcttagactcagtggtgtgctggagcaggctcctaccagctagaaagaaccagttcaatacgtctcttctcaactccatgttcagagttgtcagagaaccaattgttaaatatttactggcactccactgcttagattttaccagtgcttgcagtgctaaccaggagctcatccctggaggagaggcagagaatgtgtactcccagatgcagccagcttccagaagaagaggtaggagccaagcagagcatgcccacatcaatcttccagcatttaatggccatagaagttactgaacctcccttggatggatagaagatggcattatctttcttaaatatgatacctcttatctttttgttcccttgacacttgaggagggaggccaagggttgatcatgcaagcaagtttgtgcattttgcacatttattaagttatgcttttgaggaaattaaaagatcacaagggctt

SEQ ID NO: 1951 - DNA, 1213 bp, Homo sapiens
gcgatggagactgcggcccaagttaggattaggacagcggtttttcagtccggagattccggccacaactatttttgtctgtttttatcgtaagccagagtctttgggtgcagctctgggacacctaaagggcctggagaaattcaggcggggccagtgctgtgggggtagatgttagacgtggaagggaccctagagagccttgactgtgaggactgagacagggcctcctttgttgcccaggccggagtgcagtggctattcacaggtcgataatgcaatcatggtgcacactacagccttgaacttctgggctcatgtgatccttctgcctcagcctcccagcgctatcctcatcatacatatactgtgaagataaaatatctgttgaagattctttgagcaccttgggccagaagagctacagaaagccaaggtgtggctgtgatgacactgaattcagctcaagacccaggagaaccttacatctattcttatttccacaaggaagtgcacacatggctaatgcaaattcttccataataatgatataaacttgagttgtccaggtttgatgagacccacatcttgtatatacagtgtcatctactgcctctgttaggggctctaggggataaaggaaactatattaagaaatgcagcatctgtttctccctgtgtgaccaccctacttccaagaagtttctgtatccttggctgaagtgcactgtgtgtatgtgtatgtgtgtacactcttctacatcaatctgtaagtcactgaaatgctgcagatgttttaaaaaaattccaccatacttgcttactttaaactttgaaacaggcaaatagctaaggccaataacactagatagaattaagtaattaataatttaacagcacaatttaacattgtgcttcttaggatgggcagggattggttaatggatacaaaattatagctagataggaggaatgagttctggtgttctggagcactgtaggatgaatatggctaactataatttattgtatactgtcaaaagtctagaagaaaggattttaaatgttcacaacacaaataataaatttttgagataatgcatatctggtttgattgttatacattgtatacagtattaaaatatcactatgtatcccatgaatatgtaaaattattatttattattttaaaaataaaaggggaggaaagaga

SEQ ID NO: 1952 - DNA, 571 bp, Homo sapiens
aaacagcctctgtctcaggttgggagttgctgccatggagaccacaagagtggagattttctgacacacagaaaggaatggattacagctccttcttatgtaaatttccatggaggggaaaaaagattaaaaggaaaataattctgctttagtcgttttcctttaaggtgataagatcctttgattccatcgtggagaagaaggcaacagctgtttgtcacaaatgctatttgatgcacctgctattattactcttattaccattttccagtgggaagctgcttcttgggcagggtggatttccatctgcgtctccttttcggtgttgaaagctgatgggaaatgtgccaacgtcacaacaaggtttgagggaggcacatctcatgctcggacatgaacacccgatcatcatgcttatgaactacaaaaggatctccagtatgggctcacggcagttggcccttgaataacatgaatttgaactgcctgagtctgctaatatgtggattatcttctgcttctgcaccctgagacagcaagaccaacccttcctcttgcttcttttccttag

SEQ ID NO: 1953 - DNA, 566 bp, Homo sapiens
cattctactttccgtctctatgaatttgactactcgaagtacctcatgtgaaatgttggtgccaaatgaacttttctggttcttctgaatatgccactgttgctggagaaatgtcactgctagagaacagaagactattattccaaagggtatttgagactgactgaatcaggtctggaacattattgaaatgagacccacaaaagaagagatactgagtgtaactggatcttggttcatgctgagcttaaaatttgatcttctgaatatcagcagaaagactctttctggtgaatacagatcttctgagcaattatcgactgactttgtcattagactgccctttcagaagttgtcagtgacatgaatctttgctcccttcttcatggaatatttctgatctaatagcccctatatttcaaaagatggatataaacatcagatgaatatcacaggaaagctggattgctctgcagtgagtgaaacgtggaaaggcctttccccaccaagcagtaggccaaattgtaacagtaagatgtatttgaaataaaatggttcatagatca

SEQ ID NO: 1954 - DNA, 1078 bp, Homo sapiens
ctgatagatactaagataagaaataactgcaaccataaatgtatacaggttatgtgtccatgagccatctcttcagtttgcccatagatttttgtctgtggaatattttcttgtttcatcacactgaatcgttggccaagaaatgcttgaaaatcaaaacattaatatcatctttcttcttttttttaaaggtgacttaagagattaaaattaatttggttgctgttggttctgaacaaataatgagttcttttatttgaggtatgccattttgaagactgagacgttggagttttatcctagaggataaaggaaatctttgggaaagtcagtattttatatagcaagtaagtaaatgtttttacccaacatctgcaattgaatagttaccaacatttaagtagaaaaataccattaaagtttgttaatgaaacaaactgtagactacttatcactgaaaggatgagaaaaccatcaaatttctttgcctgacattgaaaacacttctattactatcaagacagtcgatgcatgtaatttatattggagcaggaagacatttagtacttcttaataaaatggtgctttaggattgtggttaaatctgcagtaaagtcatcaagattatgtttttacaaatctggtatatacagtcttaagcctttttttttttttttttttgattgtacaaatcacattttaggaatggtctggaattttgcatttgctgatcgtaggattcttaacaacatttcaaaaactaaatagacactttcatatcttaggcatttaatagatttaaaatactcattttaattgttttcatgagttttcaaacaggtccaaaaatgtgttgttttctaggaaatgagagttaatgcatctaaagagtcctctaatttaattgcttagtaattgcttttaaagcatgaaagatagagataattttcacgcgcagtaggtattgggcccccagcataccatgtatatcacactttaaaatcttaaagctagatacgtgaatttaaaagaatgtccactgatgtttttaaggaaatatgccttttttgtaagttaa

SEQ ID NO: 1955 - DNA, 1961 bp, Homo sapiens
atagtctgctctgagaaaagagccaagttcagggcagagactaccttcctgggtaccccccaagaaggagtcttgatcacttctctaaacatgccctggatgttcccagagctcatgaaaacgctgctctccagtggtgctagcagctctgatgaaggctaagtccaagctctgaattcaggagagcagagctgcctcctgctcccaccaccgtggttctcaggcagtaatggttctattattggccatgtcaattggagcaaccatttggaaagtcatttggcaacatctcccaaagctgaatatacatgaagcctaggagccaggaattccacttccaggatatgcccaatagaaatgaatacatatgttcaccaaaaggcgtgtcctagaatgtttataattgtgaacagaccaaagctagaaactatccaagtgtccatcaacaatggagtgggaaataaaatgtctcttcgtacaatggaatctacatagcaatgagaacaaagaacttacaaaagtacacagcaacatggatgaaattcacaagcataattccgaacaaaaaatgccatgtaccaaaaagcttatagcatatgactccatttatgtacagtagaaaaacaggcaaaacagctagcctgttagaagtcagaatggtggttaccctttgaggggctgttcctagatggggactcatggggtaatgttcattccatgtcttgaactgtgcactgattacactggtgtgtttagcttgtgaaatgtatccacctatacacttatgtggttttctgtatgtacattatatttcaataacattttaagaaagtgttttgccacttattagttcatttgacccacacaacagttctaggagataagaaggccaggtaacttttcttcagatttatagaaagaaaacagactcaaagtttggtccaaggtctcagtgctaattggtggtggaatcaggttaggtatgtcaacctcctgggccaagaaagatagtctctgttggagcaccttgcacagtgcttgatgcatagtaggtgctcaataaatttcatctgaagctggatcatagaatggtggccttctaatcccacaaggctgttatcctgctgtgggagtaaccatcttctctggtggtctaatgtcccttatagaatgtgcgtattctctcctaagagaagagtggagatgaggcctgagtcaaatatcctaagaagctgccaaaatacctgtggagaattgcataaccttgtccctctagggcttagaaaagaatgagtcagacagtcagttctcagacacggtgcccaggaaaacaggaagaaggttcacttaggcagaaatccatgtatgtgaccttggatacatcactgaacttcttcaggggcaacaatttgaaagacacatttgagacactctgcctaggatgacgtgatccttctgtagctgatcttctgagacccgtgaattttatgtactattttctaattatattctcattattttcaagggcatcagactgcatttcaaacttgacaattcctttgctataatttcagctcaaattttgactaatttatactttaaatacaaatatgccccattttctgcttgtcatcatagttcagaaagaagttataccgaccatgttatataaagtaatgaggggtcctattcagcttgttaaccatgtttcttaaaaaaaaaaagtacaatagaactttctttgtcaatataaaattcgagttatttatgatgtggctaaagatatgataagaagtctcaggaatggaatctgttattgcttggaaaataaaatctcaagaccttctttggaaaaaaatggagagtgataaaatgctttcatttagggcttggctgtgatgtcaaggtcagccaatgagcttagagggaatctgagaaaaataaagagaaaaatagaaaca

SEQ ID NO: 1956 - DNA, 430 bp, Homo sapiens
cttttacgtcggccttcgcgagcgtctgggcgggtggtaggaacaatggcgctgtcttcagtggcacagtggagcagctctgaagatgcaaagatacacgaaaaaacttccagaacatctgggagaatatttaatggaaaatcgcttggttaaaacctgacacttttaacagtgaacagcgttctgagtgtggacgagtagccagtgaagataatgaatgtcgaatgtgactgactagcagcttcattttgaatgagggtcgctgtctgcccattgatagaggccagattgtcttggaagttccaaagttgcaacgatttctggctagtgccacgaggtttacttgactgttgtgtgaaaagctgataagaaaaccatccagaaaaaagctcttcgttttacaaacatgaaaataaaacatgtaattttg

SEQ ID NO: 1957 - DNA, 715 bp, Homo sapiens
gtttctagacgaagggcatataccagttaaactccgccattttgcctctcagtgttcaagcttgagcccacgcatccaactcctgagatcttactgggaagctgctgatcatcagtttcaggtaagacgggttgaagatccgagaggctgagtcacttccacaaagtaacacagctgattttaaatgcctgcattcagcatccctgcagcaggctccaggtggaattctaatgggaccagcctccagtccctggaccttagccgtggaaggagagaagaggacatctgcacctcctctcagagaaagcctgatgcctactaaaggacttgggtggtggacgcagtgaccctcagtctggagcttgttcactgaacattggagactatcatttgcgcagatggtcttgggcctctatgagcagcaggctgcaccccacagtgacctcctcattctactctgaggcatcttcatgaaagcagatgtccattgaaaagcacccaagtgcagtctcagctgatgaacttcagaggcgattgagacaaaggctctcggtcccctctgcccttggatggtgcctctggtatgcacttggcctctgtgtctttatttagactggtcacttcacaacccatcatgtcaccccacccctaaccgtgcccactctgggtcctcccctcaactgcctgacttcccactttgagctcagcaaaggca

SEQ ID NO: 1958 - DNA, 560 bp, Homo sapiens
cttcttagtcgtgtgtacatcattgggaatggagggaaataaatgactggatggtcgctgctttttaagtttcaaattgacattccagacaagcggtgcctgagcccgtgcctgtcttcagatcttcacagcacagttcctgggaaggtggagccaccagcctctccctgacaagcaaagtggatcagcaaaggctgcagtcaccagcatcttttccaaccttaatgaactgtatcctcaaaagaacactatcagactgatgaggaaactgaatcccagaatggtggagtgatttgacgaatattgcaaaactataatggggagatgagatggggatccaagtcttgtgcccccaaagacagggcaccaggcagcgtagaggtggccagtaccagagcaacagcctaacaatggctctgccgacttccagttctggaacaagatggttaaactcatttttccctgctctgctcctctaaatacaactaagtaccttggaaactattcagcagacaatgataaagggctctgaaagctagaagaaaaggtgtacttgcaag

SEQ ID NO: 1959 - DNA, 648 bp, Homo sapiens
ctttcccgcgcgaccggcgagggaggaagaagcgcgaagagccgttagtcatgccggtgtggtggcggcggcggagactgcgggcccgtagctgggctctgcgaggtgcaagaaagcctttgaggtgaaggtgtatgaaagtcatcataacagatgttttccaaaaacttgtagaaggttgtgaaaaaactactaggatcacgcggcatgtattgaggtgtggcatgcagcattttggaaggaaaattgaagacgtgttcaagaaaacatgaacagaagcaaatgatgaaaatgagcattttacttgatgttgataacatcacaataaattatggagaaaaatacatatttggctaacttttaattgctgaacaataaagtgttttcttttaaatcaactctaaatagctccattctcatagtcactagtcagacctgttttgaacatattcgaaagattataatcttgtcaataattagcttatttatgggtggtgattctcattgaggctgacagctggggagacattgcttgtacctctaggttccctgtctggcttccccttcagagcctgctgttgtaccaggtggttgaatcttaaaactctttaataccaaatagcaatcaaattcccccttacagataaa

SEQ ID NO: 1960 - DNA, 342 bp, Homo sapiens
cttttcggggtcgagtccgagggggaagaggtttgttaatacgttcgccatgtgctacgatcttgggacgaactgagccacgagcgtggctttgagggccgtccgaacgctgcaggccggccaggtccctgggcgtccaggcctggcctacgcaccactttgtcccttagcgtttaaaggtttcttcccgaatctcaggccctcagctacctgcaggtttcgtcgcgagccggctgcaagttttgaacctaagtaaacctcaatccggagggcctagcggtaaggtgggcgctgtgtctattgaagtgcttagcaataaagaaaggtagtgagttgattcgg

SEQ ID NO: 1961 - DNA, 281 bp, Homo sapiens
aggacaggatgaatgtatgagaatcatcttcttactgagaatggtaggacagaagggatagtttagccactatacttcctggaagaatcagtacttgagggttgctgcagctttttgggattgaaggagtatgttcatttcctttggaagattaattttttccttttttttgacatggagtctctctctgtcgcccaggtggaggttgcagtgagctgagattgtgccactactccagcctgggtgacagagcaagactccatctcaaaaaaaaaaaaaaa

SEQ ID NO: 1962 - DNA, 785 bp, Homo sapiens
gttggaaataatgaaggctgagactcatttctaaactcttccataaccatcaccagaagagcagccactgtgttgtgtgatgtaggctaatgcctcccagatagaggtaaagtcacaaggactattagaattccagtggattgtggaactggttttggattatccttatattttcattctgattactgaggcagttctgaaaactcctaccattgaaatagtggtgtgtcttttccttgtttaaggattttacatcatttttatgcacttgaattccaaaatcagaatctctcttttacctatcaacctttattggctattggcttttggcaatgacctttctgttcaaatgtagtcctgtctctttgtttccttagggagtagaacctgtcctttttctcatctttcatttttttgacgtgtcctttctaagagaaggctctctgccgcctgttctgggtgataagtgatattttcatctaatcgttatgtggttgggatgatcatggtgaaatactaggaagacatactctgttgatggactttttctctccaaataatcccaaatagattattttctagtgaatggtttatatctttctcgtcacaaaaatgttcctttgatttctagcacaaggtacagcaggatgcaaatgattctcagataaaatgatgttgacagtatttccttaacaatttatgtaaaactatgcataattttcattctaacttttgacatttttctccataaataaaagtaatgcctgatgtttagttaaagtaga

SEQ ID NO: 1963 - DNA, 564 bp, Homo sapiens
atcacagaaactgcacaaaataagcagcccatgaaaaacaaccgagaaaaagaggcgaaaaatgaacagcaaaccggaccctgcttcctccagcaggaggctcccacccactgctggtcacaacccgctgtctggacctgccgcttacgggatgaggtgggcctgcagggaacgcggggcttctggttgctgttagtggtggcttttcttctcactttgtgtagcccccagaaccgtgaggggcatccgagtgggtgagcacaggcgtccgctgaagagccgcctggaccagggcggtcagcgctgcggggaggcctttgcccgaccgcgccactgtttctcaccaacattcactgtgtcctgcggggcttgaggcttagactgacgggagctattccgggtgtttaattgaaggtctagcacttgaccagcccctggaggagctgacaaccacctaagacacatttggacttggtgtccaccaagagtgactttgtgcaaagaaatggctgagcactagaataactaaatgcaaataaaatgcgtctttcagtgcagttcaga

SEQ ID NO: 1964 - DNA, 1046 bp, Homo sapiens
ttggtgaaggcttctatttggtcaacttgctctgtctttatagccaatttatattgataagagtttctctctagataccatttgcggtattcctgagtcagaagagaggaaaggtgatactgccaccccctgtatgtatttccttttagatgtgggatgtggtaggcagcatgttccctccccagacttctctccgagagctgtctatgccctaatccctgcaacctgtgaatatgttatgttagttggcaaaggggactttgcagatgtaattaaagttactgaccatataatgaggagattattctggattatccaagtaggcccaatctaattacataaagccttcaaagcagagagctttctccaactggaggcagaagagatgcagcagcagcagcagcagcgagaacaattcaaagtacagggactcaatgggaactttctggtttgatgttggagggagcagcatgatgaggaatttgcacagccttaagaggctgagggaggctcctggctaacagctagccaggaaatatgatccttagccttgcagtcatgaaaactgaattcttccaacaacttgaatgagttatccctcagagccttcagataagagtccagtttgccagcaatttgatttcagtctgtgaaacctggaccagaggaaccagctgaattcaccagacttctgacccacagaactatgagataatacattgaatacattgaagttgtttaaaggagctcaatttgcagtaatttgttatggcaacaatagaaaactgacatatggaggtattgatatagtcatgattttgatgactaactagtttgtgatctggatatgaagtgtcaccatgctacagtgcctgagtctgcttcagattcttctacttcttggccatctttattgggaaaataagtatgtgaaataagtatagtctattgccctttttgagtaccactggttaattaattttgttattttcaagtgtatgtgctttaattcacatggcattaaaagaatcggtagtatagtttca

SEQ ID NO: 1965 - DNA, 1156 bp, Homo sapiens
agctgtgtcctggctcagacggacagctctgactcgctcgctctttctctgggcgcctgcgcgcctaccatgacaagccatttcaggcgagccgagccccagagccatgtgtctggtgcgcagtgttaacagggcagttataccttttacagacaactgtggctccaagtcaagtatgaacttacacaaacagtttatataacaagtggaggtgtgcgcctgcgtgccaaacttgctgactcgtgcaggcctggatacccgcctcagactattccttgaccgaagcacttccagggcaggaaactgaagctcttgggaaggtggaagttgcacgtggtctcacagtcaactgtgccagaataggaggccaggaaccatctctgctggaggaagacccaccacgcatcccttcaagaatgccaaggtccagagcaagtgcttcccttctatgggcacaggagggctgtgggagcccacagaatgtgcttctggccagagtgggatccccgaggaagatgttaagacctctaataatatttaagagcaaaattagcacagctccagcccatgggcaagttaagagacaggagtagtgtctgtggagtggaggaaagcagaggctgccgctgaccatcctgcagccctcgctctggctgctcacagctctccaccttctctggacttcgtcacttcagtatgtgaaacaaccatttcaaccagcttggacaaaagagagaagccaagatggggctgagaaaccaatgcaggcaggcccagggacccaggagtcagggaccaggtgctaccagatgcttgctccgactcgtgttgctgctgtcttctctgtgcctcaactctgtcctctgtcactgcaggcagcttcctcccaaggtgatctccatgggataaccacattggtttgtttagtaaacactgagaccaactccaccatccagaggcctgacagacaaatggcctgagacagggctgggaaagttttgcttctggttgggacttcaggaagagttttgttttgttttgttttcccccaagggaacaagcccttgaatccgggaggccaaggttgcggtgaaccgagattgcgccattgcactccagcctgggcaacaagagcgaaactccgtctcaaaaacat

SEQ ID NO: 1966 - DNA, 626 bp, Homo sapiens
ttccccggagaagttgtcatgggaggccagccgcctgctggcaaggaagatggttgattcttctgatcaatggaggccctgcagagtcctgtagtcactgtggcctggcatccatggtgcacccaatgctggtggatggcttaggacggtacgcctcacctgagagggcggctagagacagtgtctgctcaggacatcagatgtcccgtgaggaggagtgtgtactcacaccaggggagttgactgaggcagttgctgtgggaggtgtggtaactgctggaaggaagatgctcaattcttctgagcaacgaaggccacacggagtcctggattctgtgtggcctggcatccatggcgcactgtgtgctggcaggtggctcaggacgagtagtgggctccactgttgggcacatcttcctggaagtcgtctcttggcccgccattgccgagcggccacacctgctgcagctcgtgtgagcaaatatggctctggatcctctttcctgctttgaaagcagcttccatcctgaaggcgtccagagggggcagttatcatgggacacccgccatatgctggcaaggaagatggtcagttcttctgagccacaaaggcccccaacatcctg

SEQ ID NO: 1967 - DNA, 2493 bp, Homo sapiens
cgcaagcgcaggccgagacgccgcaggtcgagtaccgggtggcaaagcagctggcccgggccgtggaaggtggccaggccaccgcggcctgtgacgcgcacctcggcgcccaaggcccgtagccgcgcagtttcctcgggcgtcaggccgccgcgcagcccggccgtatacacgggccccgcgggctcgcagagcaggagcgcgcccgcctcagtccccgacggggcctcaatgcctggctcggcctgcagccgccgcagccagcggtcctgcagccccagtagctcggcgtacggcacccgacccaggcgcaccaaccgaacggcgggttgccgcatcgtgcccaccgttgcgtccgcggggccccgccctctccgtgggcctgggggcgtggcctgaggggcggggactcgggggcacaccccgagccgcagctcccaggtgcgtgttaaaagctggaggggggatatgtgatcccaggaccaaaagcgcggggccagactcatcggttcattcaacaaccagtatttagtgcctgctgtgttctgcaggccctgccataggcgcttgatacagcggtgcatagcgtatgagaaagatctgtcctggctgagcatccgtaatataaaaatctgaaatctgaaatgctccaaaatcctaaactttttgagtgctgacattatgccacaaatggaaaatttcatacctgaccttatgtgagttgcagtcaaaacacaggtgcacaacacccagttcatgcaacatccccagtgggaaaaaagacccccccagctctcttctgctgcagtttttctgctcacacctggatttccccatgcattcccacaaaaagtaattaaatggcatgcgtgcaggctggacacgccaacaacaggtttcccacaatgccccacatggggccaagacctgtgtgcattactcactgcatttttttgcttattctctgctgtgtggtataaatatattgttgaaaatgtcaaaaagacctaaagatacccctgtgaatatcagtgataagaaaaagaggaagcatttatgtttatctatagcacagaaagtcaagttgttggagaaactggacagtggtgtaagtgtgaaacatcttacggaagagtatggtgttggaatgaccaccatatatgacctgaagaaacagaaggataaactgttgaagttttatgctgaaagtgatgagcagatattaatgaaaaatagaaaaacacttcataaagctaaaaatgaagatcttgatcgtgtattgaaagagtggatccgtcagcgtcgcagtgaacacatgccacttaatggtatgctgatcatgaaacaagcaaagatatatcacaatgaactaaaaattgaggggaactgtgaatattcaacaggctggttgcagaaatttaagaaaagacatggcattaaatttttaaagacttgtggcaataaagcatctgctggtcatgaagcaacagagaagtttactggcaagttcagtaatgatgatgaacaagatggtaactttgaaggattcagtatgtcaagtgagaaaaaaataatgtctgacctccttacatatacaaaaaatatacatccagagactgtcagtaagctggaagaagaggatatcaaagatgtttttaacagtaataatgaggctccagttgttcattcattgtccaatggtgaagtaacaaaaatggttctgaatcaagatgatcatgatgataatgataatgaagatgatgttaacactgcagaaaaagtgcctatagacgacatggtaaaaatgtgtgatgggcttattaaaggactagagcagcatgcattcataacagagcaagaaatcatgtcagtttataaaatcaaagagagacttctaagacaaaaagcatcattaatgaggcagatgactctgaaagaaacatttaaaaaagccatccagaggaatgcttcttcctctctacaggacccacttcttggtccctcaactgcttctgatgcttcttctcacctaaaaataaaataaaatacagtgtacagtaaccttttagtcaaaacagcatcatacttggaaactgaaagcctactgttatttgttattgttgcttaacagctgatacaggtattctggtgacactactgtgctggcttacttaacctgaatacactatttttttcgttgtattactggtatgtcattttttttactgttaagtacttatgtgtgaataagtgtaaaaaaatgattgcttatcggtaacatataaattcagaatcaggaatgatggtgatgccaaacaatcacagatcgtccacatgggtggcggagatgttaacacctttgctttctgatggttcagtgtatccacactttgtttcatgccaaaattatttaaaatattgtatgaaattaccttcaggctatgtgtataaagtatatatgaaacataaatgaactttatgtttaaactggga

SEQ ID NO: 1968 - DNA, 483 bp, Homo sapiens
gaggaaaagtaaaagtaattttgtcatttcctgaaacttcaagttaaacctttaagctgttcatttcctaaaagggtgaaaacgcgggcacccctcgagctagttcatcgccttttaacctgttgttggatctttccagatcaccacaccacatcacccagccactctgcccaatgggagggcagacagtgttccagtgtaggaggaaggggtgtaaggtgcgggcagtttgtgaggagggcaccaacgagagctactgtgagaaagtctgcatggtcaaaaagtggattaccaagaacaaagcatcataatgttgtccagtggaccccaggtgcacagcagctccctgaggtacacagaagctcttgctcacctgccacttccagccttggtattttccagttgtcgggtaaggagtttagcaatggcggtgaagctgttgctcatgcggaagatgtctctgctctgagggcccaagattga

SEQ ID NO: 1969 - DNA, 2750 bp, Homo sapiens
ttttagtagagacggcgtttcactatattggccaggctggtctcaaactcctgacctcatgatctgcccacctcggtctcccaaagtgctgggattacaggggtgagctacagcgcccggcctacaaaattttctagttaaccatcaggcaatcaaagcaccccactctgccaagcgttctcagtgacaagggtttctgtgctgtcaggctgctcagccatgctccctgcactctgcgccaccttcccttgcactaggtgtgctacttactagctgtgcggcctcagtccatgccgagcaagggtgcagggaatgagctaaggcacaggaagcgctcggaacagagcccggggtaaaggtgcgcggtcacggtaagcactatgacagcccgaggtggcagggtactcaccagcggggcctctgactctgtagccgggccctcattctgtgcctcatccttgggctccttgaccacctcctctttgatggcttcttcctccttggtggcttcttccttggccgcctcctccttctcaggttcaggtggggacacgaccttttcaggaaggctcagtagcatcttataaactctatagccaaaatccctctggagcatctccagaaacagctcggccagcaccatcacctgatggggaggtgggagggtccatgagcatcaggaagaaagactgcttcaggcccacaaatcccagcccacagcctccccaagactcttgacacctgcctcaaaagagatcctttcctttggcctccgatcctccacaatcccatggagggacaggtttacacagccagggcgtgcgatgacagcaggttctagggggggtggaggggcctctgggagatcagtgtccgtttcctgctgtgtggtggcctctggagtttctgcgttccgtctagaagtgtctgctgcttgctccaaggcatcaggtgcctgttcagtaggctccgtttcctgtgacaacagctgaaatgagaccctctgggtcccgggattaggccacctatatcccccgctgctggctaaggcacagccttaccccttgtgcctcctgggttgggggagctgcctctgcagctttctgctggcacagggcctcccactcctccaaagtaggcatgatggtccagacatccggcaggtacaccaccactgtctgaagccgccgggggggtcccggctgcaggtactgaaactcggcaaagcgccacctgcacatggcaaaaggaggtactaacttctttagtgacaactccacgcagacaccacgttcacaggcaagggcttcagtttccagtcagcactcaatgagcacacactgcgaaccaagctttgaagacacaacaggaaagctacagaccaagtcctcaagaaatgatcagtcagtggggaggccgcaaccacacaagcaccctacaaggtgcaaggacaactccagggagtctcaagtgcagcctggtggctcagccagattttggcatacaccccaccctaccctgaggcaccagagggggaaggaacgggactagggggcagagagctaaccagcagaaaggggcagggaccgggccttcccaacaaaacctccccaacctggtgcgttggtgcagctgaggctcaggaagcccactcaccacttggtacagccgctcaaatcaatgccagtctgggcctgcgcacagcggatggcggtacgcaccagcacctgcgggtcagcctgggggtcgaggccatccagggaaggagaccattcacccccaaccagcactgcctcctcttctttcctgcccagcaaaaactgcaagaagagatcagggatacaaaacaaaaaactacattacctgggtctcccactgcagggcaaggctgccacccatcaggatgaaggcagccggaagtggggaagtccaccacacagtgaggtctctatctgcaaacatgaaccagccacctcgctctctctgactagtcgtaacagctctgagctgcaccttcctcctgggtgaaatgaggggtgttcggctctgagatgcctcgttttatgcattcaggaacaggagccgaacactcaaaacatgacaggttgtgcacattacccgtgaatgcatctcctcctgctctccagctcttaccttaatctgcttcagaggatgctctggcgtctcccttggctcagccatgtcatccacaaagagcatgcaacaacgatacaattcctccaaccccggggaagagagcagcagtacctgtgcaggaggagacactcagagctgccttcagcctccagaaatcagataagtgagagacgcctgtcagcttaccttcgaactataagcggggtcactgtctgcagtgatgggctcagcaccagcgtctggagctgcctccttttcagaagagacctggatccggcttggatgatggagggaaaagggctggctcagggggaaggctgatagccaactcagatgcacggacagaaaatctgaggggaccaggaggctgcggtaacggcgctggagttctaggaagtcacagatggggctacaggaagacagcaagggaatccagactgagcaaagactaaaacattcgaaatgaaaccatcaaagatttgaaaaaatgggcgaattttttttcagtctgagaacttttgaagtaaggcacctctcaaggaagctagatcagatctgaccacttaatttacaaactctagatggcaaaagtc

SEQ ID NO: 1970 - DNA, 2289 bp, Homo sapiens
tttttttttttttgagacacaatttcactctgtcgcccaggctggagtgcagtggtgtgatctcagctcactgcaacttctgcctcctgggttcaagcaattctcatgccccagcctcccaagtagctgggaatacagttgtgtgccaccacactggcttattttttgtatttttttagtagagatggggtttcaccatgttggccaggctggtctctaactcttatcctcaagtgatctgcctgccttggcctcccaaagtgctgggattacaggcatgagccaccgcacctggcctacttatcctgttaatgaaaatatttgattggacagaacatcttattccttaactctgttatgtgcttttgtagattgtttttacttactgtagatatctgttgctccagagtcccagaaatcagtatgatgagttcagcacagttactagaaggagacaaaaagatatcttcttaattaggtgatatcagggatagttctggttattgattgctgtgtggaaaacactccaaaactcagtgactttaaacaacaccagtcattgtgttatttctcattatcctaagtactgactgggctcagccagacagttcttattcgggttctcatgcagttatagtcatcatcagattgtggccgcgactggcataatctcaaaggcttccttagtatttctggcagttgatgctaggacctcagctagtgctggggctggaacatgtctacacatagcttccccacagcatggtggctaggtactaggagtgactgtcccaagaggaccaggcagaagcagttacattttatgacctagtctcagaagtctcataacatcacttccactaaagtcccaagcccccccagattcaaatggagggagcatatatcccatctcagtggtaggaatttcaaagaataaattctgtgaaactgtagtagatagtctgttttctcccctgtttaaaacctcctgaggacctcacatgcttctggataaagctcaggctcttcaacatggtttagaaggtccttcctaatctggcccacatttgtccatccagctccaactcttgctactctacgcccctcttcccctcttgtggaatggctaattcctactcatcattcaggtcttggcttagacatcttttcatctgagaaggctttctggtctagtctcacctggttaggtgaactccccatgtgccccatgtacctcatttatcaaagtgcttatcatatgcctgtcactgtctgttttcttcactagactcaggtgccatgtctgtcctttctgctctgtttgctgggtgcctagcatggtaggggatgtatcagaggattagtacttatttaactcaccagctcatttaactatattgtataacaatgttggtggtcatattggtcccccatggacagcttttcgtctctaataccatacactcagtgcagggtctgaatgtccccccaaactcatatgttgaactccaaatccccaaggtgttggtattagatgatgtagcctttgggaaggaattagggtggtgccctcatgaatgggatttgtgtcattataaaacaagcccaaagaaatttggtcaccccttcctttaagcgaggtcatggcaaaaagacgctgtctatgaaccagaaaatgggctctcactagacaccaaatgctggtgtcttgttcttggatttcccagccttcagaactgtgagaaatatatttctgttatttataagccacccagtttttggtattttgttatagcagcctgaagagactaagacagccagtcccaaccttccacatttagacctgactccaagttttgctcagcccactgtgtatcccttcctcctcccaaccaaagtgtccccactctttctctattctgttctgcctattattcaaggtctaacttgtgtcactttttcaatgaggcatttgcaagctctttaaattctcaaggattctccattaattcaccatatctattttgagaatctacaaaggacaaggcactacgaaagactctacatgccacagggaaaagacagacaagatctctgtcccaacacagaaaattttagcctgccatgttgactcccagggatctttttgtttctgtaggaggtgctcattacagagtggccaaattcctactgaagaatggacttggttgtgaaataaaacaatcctgggcaatatttgttgatagttttgttgaggatgattcaggaaataaatacaaacttttaact

SEQ ID NO: 1971 - DNA, 338 bp, Homo sapiens
catagagatatagacacagacgcaaatacagtcacatagagatatagacacacacttatacacacatatatgtaaatatacagtctcattcactttataccacacatgtataaacatacacaattgtatgtagacacacatacacataggtactcagaccgcatagatacatatgtacacacatacaaatatatgcacatacacagatatatatatacacacatgcatctttaaccagaacaactttacttttgtcagttttatatgacagagtctttaaaaaaagatttcatctggcttgtgttctactattaaaagagaaaatgaatttgcttgtt

SEQ ID NO: 1972 - DNA, 524 bp, Homo sapiens
acaaccaacacgttctccccacacgactctctcgttctccccacagccaggtctccagctggggtggacgtgcccaccagctgccgaaggccaagacgccaggtccggtggacgtgacaagcaggacatgacatggtccggtgtgacggcgaggacagaggaggcgcgtccggccttcctgaacaccttaggctggtggggctgcggcaagaagcgggtctgtttctttacttcctccacggagtcggcacactatggctgccctctgggctcccagaacccacaacatgaaagaaatggtgctacccagctcaagcctgggcctttgaatccggacacaaaaccctctagcttggaaatgaatatgctgcactttacaaccactgcactacctgactcaggaatcggctctggaaggtgaagctagaggaaccagacctcatcagcccaacatcaaagacaccatcggaacagcagcgcccgcagcacccaccccgcaccggcgactccatcttcatggccac

SEQ ID NO: 1973 - DNA, 607 bp, Homo sapiens
agagtgaaggagcaaaggggactcggccgccatgttaggagtactgggacgattccgcggagccgggcagaggttttaggggaatgattaacaaaggcgtccgaagaaatcgttgttggaaggtgaccaaggtggaaagagacgttgctttggccctgcaagtaagaagagagagggaatagcctgaaggagtaacactaaatttaaaatgacacttttttaccaaccagcgaaagcagatgttcaaaggggatattggccagagtctgtcacactaagatgagaaatgtcctttcttcctgaaggtgtctgatgtgtaaaaatatgatatactttgtgctgtttcctcccttcccttttgcatattattctgaaacaacattaactagttactttgcgtcattgaaggtatgcacttcccctctatgttaggagtgaataaaattaaaaatagatccttataacaaagaaaggcagatagaatgattaaaaatgaccaaaacatgttagaaacagtctctcaggtgtatgcagatggtaattacaaaaatactttttcaaaaaatgatcttctgtgtcatgtttctgggaacaagtcaagatgaat

SEQ ID NO: 1974 - DNA, 1727 bp, Homo sapiens
actcggtctctctggctattttgtgtgttccgatctgacagcccacatgcctctgctgtacgcctcggccacaggacacagagcactaagaagacagagaacattcacagtctggtgagacaagtttgagatctcatattttcagctcatccttgaaaacctttcttcgatttgactgaccttgatggctccctggaatctcacctacattttatgggaaattcaactctccagagagaagagctttcagatagctgcgggacttgcaactgtgactttcagctttcgcttttgaatgaggctccaaatgtctcaatggtggcactatttccagatttgggagccctgcaaagctaatctgctcaaccttcacctactgggttcaatgaatatgaaaagctgccttcctgaaacttttccttcaaagagggaatgatctcctggaattcaagcttctacaaggtggctacctggtgttttccacttttgccgtctcctaaaaagcatcattcaagccttgccctttcaacccactgaacacataaacatgctttctccttaactgaacttatggccacgatgaacttgaactctgagattcacagaggagagtttgttttaacagctgcttttacaatgaagccctggagttactactctcaagacccctggttctgataggccatcttttcactgtcctctgcattttctaatgcccagctgtcaaggaacacccactgaagttttccaaaacaaaggcacgaaacacaagaaaggcaagagaatgctaatcaccagatgcatgggcatcctatgggggaaccccttacatgtggaatacggtttttctccccaatttatttttataaatttattgatttctttgctagtttgttattaattgttagagatgtcctgttgcctgaggttgccctgtccgatatggtagccaccagcgacaggtagctatttagagtaatttaaaaattacattaaaaatgcagtttccttgtcacttaaccatgtttcaagtgctcagtattaaccacatgtgactagtggcttccataaaggaaggcaaaaatagagaacatttacatcgctgcagaaagctactagatttttttggccaaggcataagctctttctcataagagaaaggggatgcagatcttgctaagagtgatggatttctgggttcagcctacatgagtcatcttccatactacccctggacatgctttccttggctgccaattttctattttataaatttcaggaaagagagattatggttgttaaaaccattcatgacaatgatcccactttagagaaaacaacagcaacaagcaaagaagatggtgtggagatccgcacattccacatcttttaattggtacccattaaataacaaagggaaaaagtaccctcagaccacaactctccaccttgtgtggaggccaaggacccagcagggagaaggcagaagattaggttctccactcatcctggctctcagaccactgaactcacatttgggttctaatggaatggtgattggaagcatattctccaataggaggtttttaaaagttctgtgccatcagccaggcagcatctgtcatttaaaatgactggccagttgcacgtttaaaagcaaagataaaattgctaatttatacttactgaataaacatcagcagtatccatgaaggtacctaccctaa

SEQ ID NO: 1975 - DNA, 531 bp, Homo sapiens
cactgcagaatctgaaaagaaatggcaatgagcagaggtctcccaccctcacgtggaggacagggtccgcaaagatgagtcacattgtagaacttcactattcagagaaagccccttcacatgcagaatctcgctggtctctcaggacaatcctgtgagacatatacttctattgactacaatgagaagtgtgtctcttaaaaaggctggagtgcagtggcgtgatctcggctccctacaacctccacctcccagctgcctgccttggcctcccaaagtgccgagattgtagcctctgcccggctgccaccccgtctgggaagtgaggagcgtctctgcctggccgcccatcgtctgggatgtgaggagcccctgtgcccggccgcccagtctgggaagtgaggagcctcttcccggccgccatcccgtctgggaagtgaggagggtctctgcccagccgcccatcgtctgagatgtggggagcgcctctgccccgccgccccgtctgggatgtgaggatcgcctctgccc

SEQ ID NO: 1976 - DNA, 619 bp, Homo sapiens
gttttgttttgttttttgagacggagtctcgctctatcacccaggctggagtacagtggagtgatctcggctcactgcaacctctgcctcccgggttcaagcgattctcctgcctcagtctcccgagtaactgggactacaggcacctgccaccacgcccggctaatttttgtatttttagtagagacagggtttctccatgttggtcaggctggtctcaaactcccgacctcaggtgatccgcccgcctcagcctcccaaagtgctgggcttacaggcgtgagccaccacgtccagcccatacatttcaattttaaagggatgcgccctagtccttagttagtctctcctcatctctataaaatgttcagctactcacctcttgggctattgctagacatcgttttctcttccttctttctgacgcctacaatagataggacattccccctcctcattctattctcccaagtactttaaattgcaatttataaagtttctatgctacactctaaaaaaaattctgttttgttttctaatttcataattggtgcttcactgtgtcttgtcctcgaaggaatgagtattttgattgtgttcattaaatctgatttttcta

SEQ ID NO: 1977 - DNA, 1875 bp, Homo sapiens
gagcggtgggagcagcgctcgtccgccgttggggcccccagcccgcgcgcgtgaagcagctagccgaccaagccccggaaggcgagtgccggagggggcgggacagctcctccggggccagcgggcaccaggcttgggggctgaggcccagcggcccgagaccaactgggctgaccgaggccgcctccccgccagccctggggtccactgcccggggagcagctcccttcccaggtcagactcgggcttcatcctctcttgccgcgcgccgagcggttttcaactctcactgctagaattcctccaaccacccaggatagcaggaccgagatacatggccacccatgacccggagcgtccacttccagggacaggcagtggtgattggcttcggttgtcatctgtgccatctgtccatggttcgagaagctgctgttcacgttttggggaggatcatggtttgagggctcccgtggtagaatttggggagctctcataggcagaaggctgagaaaagttggtgctgtgggaagtcaactggcagccgatggagtcgggacccgggaggaatggaaagggaacccagataggaagctactgcagtaggctcagagaggtgatgacggcagggctaagacagcggccttgggcggtgactgggaagaacgttgaacaccgtgtttgggctgaagaaaagagcaagggaagagtcccagctgctctggagtttgaggcaggaggatggcttgaacccaagaggtggaggctgaagtgagccaagatcgcgccactgcactccagcctgggcgacagggcaaaaccctgtctctaaaaagaactttttaaaaaagcacctgtagatttaagcacataataactacacttttgtctgttttattatgatatcaaagttaaatttatgatgaatgactaactggacaaaactgagagcaaccaccacagaggtgaatatactgaatgtataacactctctaataattttaagaactccgctctaatgagcagatatcacagaaagagacttttcagatgaaataccgatgaccaggaaatctgtgagaccattttaaaaaattcgaagtcattgaagaaatgcaaagcttccaggctccacttttcactgatgaaattggcagagtttgggacaatgagatgttgctgtcccgggagtgcggatggggctgtgtcctgtgatggcggtgggcactggcactcttgtccagaaagacattcaccactgtggttcaagaagcacctcaaaggtcttcaccttggtcccttgtccacctctgcccgcggtctctcctcctttcagcctcctctttcccacacagtccctcccgccctggcttggtcccctttcttctgactgggtcaggcatgtgggtgactctttgacttccaaggctctgtctacttggcttttttctttcacctgttctgcagaataacagcctgattcgttcctctttttgggtccttcacttccatacctgggattcggggcgtggcccagaaagaccctgcagtcttgcagtgtggggctgccagcatttcatggcctccaagctcagctgggctgaatgaacgctgccatccagcgcttggctcattttctgtcccattttcctgagtgcttttgccagacttacacttttctgaaagctactccaccctaccccagacacaccctctctcctcggatgacctgcctcctaatttcctgagaaaactggacatggccacctttccccagtgtctgaggcccaggttgacccgtggtcatggtcgctgtcaccacccacctgcctgtatgacagagtgagaccctgtctcaaaaaaaaataaaaagaa

SEQ ID NO: 1978 - DNA, 3475 bp, Homo sapiens
ataaaggacttgtctaggggagagcctatggatctgagaacgctgtctgggcttggtaccaagagctggtatttcacagcagcgaccgcctcacagacgagctgtgggaagcaggagggagactctctcttagggtgccactactatggagacacagctgggctgaacaagatttgcttcaaacgacaacaagagagacagaaagtatctggttcaaccgctgcccgagcaggcaggcaccagaagagctagcagccaatccggccatgctcgaagccagctctgcagctcagccaatcagtgacatcattgctttctttagcttgcccatggtgatgtgaagatgagaagaaatagcaaggcccaaccagttcttcatctggagacagttcaacgttctgcaaaccagatcttcaggaattttactgggataattatccaaataaattgcaagcattctatccaaatggacatccataaaaattcatcagagagcattttactactgagctgcaaagggaaaaacttaaaatggatatgaaaagtgaagaaagtgatcataggagaaaaccatttcaggtgtctgatgatttgtgagcctcaagtgactactctgtggaatcatctgtccttgcctttgaattagctttccctaggccatgagtcaacattagtagtttatacatccaaattgatgacaagagcacctcaaaggcagcagcctcaaggagcagccatggccccagacttgtcgcacggatgcagaaaacttaatggaggaggctgaggtcagaatgggaagagtttttaaaaaataaaaaggggagctaatatgtgaggaactgattgctgtgcattattttccactgaacagaccttcttttaacttctaatctcaagcacatagcagctgttgttttcatattaaagatcagtaagtgtttgttgaatgaatgtataaattcttccccaatctctgttccatgtaataagaactaagttagcattcaattataaagaggacttagaaagtctgcagacatttttgatcaaaaatccttttaactgtcttcttatggttcccggtaacacctaagcccaaaaaactcaggtcatttcttgcctgtactgttgcaatagcctcataataactagtcttctcctttatcaaccacagtcgtctccgctacacaaagaagagagggtgctaatctaaagtgtaaattattttaaatcagcacccttcttgtaatttcccagtggtttttcctgtcataagaataacatgcaaaattccttgcttgcaaagccaggtatgaccttgccccgtctaccttactggcatcgtctctcatgactcttcccctttttcactctccatcttgccttttcccaaccatgcctgctagtgagccttagcccttgtgttttctctgccagggatgcatgactggcttctttactttattctgatctctctgctcaaatgtcatctttttagagatagctttcctaaacatctttaaaagtaccccatgaactgtgaaacacctttcctgctttttcttcatagtacttatcacttcctgatattatgttagacaacaagcaaataagtatatgctgttcccactaaaatataagctccatttgaacaggagccttgattattcctgagtatacccctagtgcccagaacctagtagggctttaataaatattagattcatttgttgaatgaaaaaatgaatgaataattgaataaagatatccaggtagagtgtccgggcagcccaacctatgtgaagccagtacaagaatgtttctgtgacatagtgagcgcaattattcctctaaatgatgaacttgcatgagtacacaaggataaaattaagcacgtagtttagatttctgcaagtctcttcctcagattgaggaaaaacaaagaaattgagcttattctcacctcattcttacatgaactaaatccagaataaagcatcatttaaataccaagcacatccctacctcagccactcatggaatactttatctgtaaagggacagatagatagtaaatatttttggctttggggaccgtacagtctgtgtcgccactactcagcacttctgttgaggtgtggaatcagccctagacaacacataaacaaatgggtgtggctgtgttccaataaaatgttatttataaaactaggaaatcagcagatttagtccacaggctgtagtttgctgacccttgaattagagagtcttccccaaatcctcttcccaagttattgaaagaatgcccataggaccatagctccctcacctggttctttcaagaaatgagacaaattcagggatggttggagggtggaacgcctacctgtgacatgactattgagcctgatttctttccttttatctctttaaagtgagtcaggtcttaactttaaactgtctctaaagtggcaataactgggccatgtcaaatactcccaatgacaaaatttcttcttggagaatgaatgagggttgcatacagtggtgtgttggtaaatgtttagcaactggctctcttactgatttctgtagtgtaaattctcccatcctggccatctgaaactaccaatatgatgtcacttgatgtagagttgggaaaagacagtctcttgaataagtatgagctggttccagcccactgctgaacacatatttaaaagctacaatagctctgctcactgccattgcagagtctggaggaaagagtagcaggcttgataggagcaattggctgaataatcttttgcaatgccaataaataatgaaaaagtatataaatataacgctgtatagaaagctctcaagttcagtgtttggttaaaatacatactcagtaaatggtagctattattgtcttagtttaagttattgcaagcattaaaattaaatgtttagctacagactcaatccagttttaatgtcattgtgttaataaggcctcttaacattgaagcaacaaagataaaggaatttttttgtagctattcacgattctgcccagctcaaggtaaagatagcaacaaaatactccaaccagaataaaagaagtctccacttgactgcagctcttcgcaacacttcacaagggtcaagctgtgttagtttccttcagtgttaaacagaatgcatcttaagagaatagttcaattattgattgaatagtaggttcaagttgactataatcccaactaatacactctaagaccagggatgggccgacagaagggtaaagttttccactcaagtctcgaggcaaacactcagatagaagtagtaatatggatgccttctattatttggtcaatacaatactgttccagcccagttgtgcaaaactggtgaaataaaaggcaaaaatattgacaacagtttgggtaactggattccaaaatgggcatccatctaagag

SEQ ID NO: 1979 - DNA, 1454 bp, Homo sapiens
taggaaagtcaagaaataggaaggaaatcggtcagttttctatcatcattggttgggcttgaaagtgtaacaagaggttaaaatagaagttctagctgaagcacaaagaaagtagaaacaacacatcaaagtgagggatttataaagcaggagactgaaaaccagctggtgactcttgaattcctcacccttattgagagtataaaaggcttatagccctcaccctttcacctcaaatcaagagggaagggttttagaaacacaacttggagagcttaatatgtatccctgaagtttgaggaaaggggacgtagtgtactgacttctgcctggaaagtctaacaggtgggagattaattgactgcaatgaaggagaaagccaatgacaggttgcttcttgactggaattgttcagcactccagaggctgtcagggaaaggatgtgagcatgctgcctggaatctgatgtggctcagctgtaggacaaagatagtgtgttttcttaagttctgaccaaatgaaccaccttaagagacaaagatcactcagcaaggaaagctgaagatgctatgagatgccagaggttggggaaggagcaaacaaccagctggaatggatatgccttttctcaaagaaaattgcaagtggaagaattccagccatggggtctccaaagcatccgtgaaactgttccacaagacaaggatggatgactgaatgccaaacccagagagcagtgaagctaaatcaactcaatcatttcagtgaagaaagaaatctcctgtcctttcctgtccctgaactccatgatgaagggccatgtgctgtaggtagcaaaacaggggagaaagaatttcagttttccttttcccttgaaattttctagctaaatcagtccgaaatgtggaaggaaaaagcatgaagttttttatttttattttttgagactgagtcttgctctgttgcccaggctggagtgcagtggtgtggtcttggctcactgcaacctcctcttctcgagttcaaatgattctcctgcctctgcctcccgagtagctggaattacagccgtgcaccaccatgcccagctaatttttatatttttagtagaaacaggtttcaccatgttggccaggctggtaatgaactcctgacttcaggtgtctgccagccttggcctcccaaagtgctggaattacaggcatgagccaccacacctggccacatgaaagcatgaaatttaatgcagatagatttacctatcatataaaaatggaaaaccgaattactaagtggaactgatattttgtgatccaggaatgaccatgtctgaactttcatttgaggggaaaaaggataattaacaccattgaacaaatttaaagggagaatggaagacaaagtaaagttgttttatgtttacatacagctgtgctattaagaaaagctaccga

SEQ ID NO: 1980 - DNA, 648 bp, Homo sapiens
atggggagaacaggaggaacctgcaaaggagaatgaaaaggagtggagtcaggtgtctcggcagccaaaggaggaagtggtcgcctctgacagactgtgccgacaggccaagtaaggcacagctaaagaaatgtgttactgacaagcctgcaggccacatggcgagatggaaagcaagcagtaaagaccaaagaaactcgttgaggacaatggaagatgggctcagaagaaaatggatacagctgaagctagatgggtcatgggtgaaagcaggacaggacctcattctccaacagataccaagtccataaaagccctggggctcagtcagagcagggcagaagagagagagactatgggacaaccagcagcagagaggaactaccctccctgctgagagcttcagagacatgcagagatgtctgaacaagttgctgcggagaggagccacgctctccagggcctcctctctgctgagagcagcagacagtggaatgagcagtgggcagagaggagccaccctccccagggccacctctttgctgaaagctgaacactccatgggatgacctgcctacagagagaagctacccactgtgggtctcctctgagctgttctaacactaaataaacctccttttcaccttc

SEQ ID NO: 1981 - DNA, 2583 bp, Homo sapiens
catattagagtctacagatatgcctttcttacagcaatcctgcacccacataaaagctacattttcaatacaagattaaaaggtattctgcaaaatgtgcaaggttttcatgtctgctggtgtagctgtagtgatggcttcatgaatttttttcttttttgactatggtccttacgctggattcatttatcttgaaatggtgaacaatcacagctgcagaccctcaatttatggtacatatcaagcaatttggctttttttcttgtaatgaaaaaaaaaagttttttttgctttttttcatgacactgcttcttgggagcactgccagcattactagtggcacttcgtatgggtcctaaggtgttattgaaggtttacgatattgcactaaacacgaaaaataccagagaaccactggagatactttttactgtgatatgtaatttactggagacaggaactgctcgtttggagatggttagcatcacagggtgttttaagtcgatacttgcaacccttgagctcaccacagtagcaacaggaggtggctaggaaattattcacagcaggacagtacgcactgcaattaattgtatgcagttatgatttaataccacatctttatgctcacgtttctctcaactgtgaatggtgccatgtacagttggtatgtgtgtgtttaagttttgataaatttttaacttttaatagttaaaatagttaactattggtatggtaggaaatgataaagtagactagtatctgtatacattttctgcatttatgacatacctttttcttcatttttttcaatattttaattgaaaagttcatccgagtttcatctaagttttttcaaagtgatacaaatctccaaaaaattttccaatatatgtattgaaaaaatccaggtgtaagtggctctgcgcagtccaaacctgtgttgttcaagggtcaactgtgtatgaatccaagcgaaagcttttcttaacacctcataagaactattttttaaaaaacaggaactagcatagagtaaccatcacaggtaaagtgtaatttgttatcagccatcttttgcccatttcagtactggtagaaggctcaatggtaaaaataaaaacgggacagtcagaagatctggaagtcctgaccctgctttcacctggcatgtgtaatccagtcatgctcgtatcagtctctgtaggagcacttgaaggtattacataaatgctatctaactctgggaaacgccaacatgtgattgcctccagaggaatcttctttaaaaaaaaattcaaaatgttatttccttactaggatgtctttaaagaattataacccttaccgtgcctccacattagatagatccctgccaccagcacccatgtggccaccagcagagacagcaggaggagaggcagccagcctcccggcttgcttttgtctggaaaaaacaaagcttattcacctttggaaaacaaatccacacttatctcttaatttaaaaactaagacttggtatactttatagaggtttatttattttttattattttttagttttgagacagagtctcgctttgttgcctaggctggagtgcagtggcgcaatctcggttcactgcagcctccgtctcccgggttcaagcaatgctgcctcagcctcctgagtagctgggattacaggcatgtgtcaccgcgcccagccactttgtagagatttagatccctttaaaaccatcagtcagaagctctttagagagtctgccaatcatatctttttccctagagtgtgcaggtcttgcattagattctcaaaagggatatgggacccaggaagttaagaacagtcctaaaatctctttggcttctttgtcctgatatgcaccggcattttcacagtaggaactagggtttctgtccagtttttttggttctttaaggaattaatgttattctgggtacaactgcttacatacatagcacatatagatgacatttttacaggccgtcttgttagactgacatacatggaggatagtgccacccgcctcacaagaacatcaggtaagctcaggcacagagtgcccaggaatctgtaaggcttcgcccacgcacaagtcagggctgccagtcacctgggttgtcttcactttatttggctgcgtctaatgacaccttccaacttttgaccccacccctggactgttgtgtaaacattgtatttctccatctgtaatgaaaaagctaacacatctctaactccagagacattttccagaacatgctgttctcaggcactagtgaggcggtaccattattcctcatttgttatccaaatgttggccatgtgaccacaccaaaagctcatcctgggccactgagactggtaattgaatcagaatatagtgaaatattcattctcatatatacccagccatcttacatctttggcttttttcagcagatccttgtggcactcagaacatccattttgcactgtgtatttttttcccttctgtgtatcctgctttgtaaagagtcacgagtggttttacaaataaagcctgttcttactca

SEQ ID NO: 1982 - DNA, 487 bp, Homo sapiens
gcggagatatggcagttcaccaacacaatttgtggtccccctccccttctcttttctagaattttttctcttactttctagccattgtgttatctcaagtatctgtcctggtcttccaaaccaatctgctgggagtgggccagacttcccatgtccctgactgtcagcagcagatgttcctcctctagaccaccatcttgaatccagattcactccactctcttcttgctgcaatatctctgagaagaagccgtaggggattgttctccagtcttgactttgagaacttggtagagctcctgaaggctcacctgataagagatgtatgtcacaatctgctcaccctggcatttctctaaatagaaggttcatctgtctgaatatagatatcaagaagtggcagagtatcagaggagaaagatatcaagaaatagaatattcaagctgtttcaacttctacccgttccacatttccgaagctacttcc

SEQ ID NO: 1983 - DNA, 1953 bp, Homo sapiens
actaaaggtcataattaaaagaatagtgatatgataatagcacacagtaatattaaataaatgatgcaaagtacaaaataaaacactgtacagagagctgagttttctgagatgcacatgcataggaaagaaagaaattgggggttaactgtggttaaatttccagcagtctacattttctacaatgagcctgtattacttttatgatcaggaggggaaggttaataaaagagaaagatcatggcttgttcagagtggtgagactttcttgtgaagtgtgaaatgggtagtggggaataatagaataagggtctggagaagtaaggtccctatttttatccattgttagcattttatggttaccaagaacctaataccaggtgaaggagttcagcagaagaatatatatttgtgacattgttctggctggacagtggaggctgagctggtgaggggagaaaggaatcctgaagaccatattggcagtttttttcagagcccaagagagacagtgggattctgacccagccactagaagggggccagaggagaaggaatagatgtgatgttttgaagataaaatgagcagaccttaagggacacggaagatcaagcagcaaattcccaagccagaagtctgggcctctacatcctggtgagacctacgacatgacaaatgaggccaggcccaggtccgagaggcactgctttccttgcagctctctggagctaccctgtcttcacagtggctaatgcctctctgatgttgggaagggctggagacaagggaggagacaacccaactcatagcaggctacctggctatcgtaggctaccttgacactgactaggttccctacttgtaccatgtgtggttttccaggattcctgtgatctctggtattttccctccaaggactggggttccctcaaggcaagtcaccctactgaaccaatagcaaggttgtaatcatcactactgttagttgaggggttcctgtgtgccaggcaccatactaaatgccaaatgtgttacatctcatttaatcttcacctgaggagggaagttctcttatgccatttgcaaagccagtagtcccagtcaggattagaacaactctgatgtacaagtctgtgcccctttctcccaggtgaacttctcagtgcacccccaaggactcctctccccatgtaagagttctttgttaaattgaaagagcagttcttgcctgtagtaaaaaggtcagtggtgcaaaagcatacaaagagatgtgagactccctcccagtccacataaccagtctcctaccccagtggtagctatttttaaatgtcttgatttttcctcaagatagtcccagcatttacaaccttatgtatcccccttaaagaaacacgcacaaaaaatgaaaagcttaggatacagtctacaccttgcttttttcagtgtcttggagatggctttctattagcctgtaagatctacctcatttttttcactgctttgtgatatccattgtatgaatgtaccataattcatacagtccccctgttgatgggcctctaggttcttttctgccttttgctattacaaacagtactgtgccaaatatccccgcacactgtccctggataaattgatgaaattaaatcgtaggtgcatttgttattttgatagaaattggaaatgtagttcccagtgtgtgtatgaaaatgttcattcccctgaatcctctgaaactattgtgttgtttctgatctcataaatgaaaaatgctctcatattttaatttgcattcaactatgagtgaaactgggtaccacagcccatgtttaaaagtcatttgtatttattttctgtgactggcttatttgcgttctttagcagtttttctgttcatccttttaataatcaatttgtacaaactataaagaaattatccttatctgcta

SEQ ID NO: 1984 - DNA, 429 bp, Homo sapiens
caccagccggaatagcaaccggcggagcccgtgcgcaccgcagcgcagcgcagcggccggggggtgcgggcgccctcgccgcccggctacctaccgccgcctgggcgccgccgctgcctcccttccccgcttctaccctccagcagacgcccgccggagcgacccctcccagggtgaccgggggaaggtgttccacgtggccatagcgtttgcgtcacaatgacctggcggacaggtgggagccacagcgtacaccccagggttccctctgtgctgtgcgtagtgcctactgcttgcttccaggttaaatttctgtagctttagaggacaggagacttcatgacttcactgccaagaaaagttacagaggcctgctgtacctggaaatcaagtttgagcttcgagaataaaggtcatgttttaaaaaca

SEQ ID NO: 1985 - DNA, 3166 bp, Homo sapiens
ccttggtgggccgtgaactgaatggtggcgctggcctgtgcccagtatatctgggttcggtggctgagagagcttttgttgccctgtgtccgtgacgggccagtgttctgcatgcatcccatcacatggatccatggaggatgttgagcccagaggaagacttgcactgggcccaatggccccaggtcagcgtccatcagccaggtgtccagcccctggtgcactgaagatcgggcccttcctggtgccctggtctcctgcattgagctgtgtgagctcttccacatggaagacccctgtcattgactggcatagggttcagtggcggagagagcatcaggtggcccacgtctgtgatgggccagtattccacatggatctcatcacatgggtccatggaaggcgagcatccctgagctggcacaccccaccttctgccagcatggaaggatggtgagcacagaggaagaattgcgttaggccctttggccccggaccagtgtctgccagccacgtgctcagcctcccgtgcgctaaagctcaggtccttcctgtcatcctggtatcctgcactgaggtgtgtgagctcttccccccagcaggccccctgggattgactggcaaaggtgaatggtgtctgtggaggaagacttgccattgggttgctggccccaggccagtggttgtcatccaggtgcccagccttggtgcactgaagctcaggcccttcctggtgctctggtctcctgcactgagctgtgtgacctcttttgcccggcagaccccctggcattgaccagcatagatagtgagactggaagaaaactttcattgggcccgctgtcccggggtgagtggtcatcagtcaggtgcccagcccttggtgtggtgaagctcaggctcttcctggcgccctggtctcctgcacggagctgcgtgagctcttctacccaggcgggcccctgcccttgagcggcatagatggtgaccccagaggaagacttgcgttgggcccactggctctgggctcagcccctggtgagctgaagctcaggcccttcctggcaccctggtctgctgcactgagctgcgtgagctcttccacccaggtgcaaccccctggcattgaccagcataggtattgagcctggaggaagacttgaattggtcccaatggtcccaggccagcatccatcagctaggtgctgagcccctggtgcactgaagattgggcacttcctggcaccctggtgtgctgcaccgagctgtgatgagcacatccgggtcctgctggatgcatgcgccgggaaggacgtgccctgagttgggtcgatgatgagaaccttatattatcctgaagagaggtgatgacttaaaaatcatgctcaataggattacgctgaggcccagtctagtgagctcttccccacaggtgggccccctggcattgactagcatcgtgagctcttctgcccagcagcctccctggcagtgaccagcatagatgctgaccctggaggaagaattgcactgggcccactggccccgggaaaatgtccctcagccaggtgcttagcccctggtaatctgaagctcaggcccttcctgatgccctggtctcctgcactgagctgtgtgagctcttcagcccaggtgggctccctgacactgatgcgcatagatggtgagcctggaggaagacttgcattgggcccaatggacccaggccagtggccatcagccaggtgcccaccctggtgtgctgaagcgcgggacctacctgttgtcctggtttcctacactgagctgagtgagctcttcaacccaggcggggcaccctggcattcaccagcatagactgtgaaatgggaggaagaattgtgttgggcccaatggccctgggccagtatccgtcagcctggtgtccagcccctggtgtgctgaagctcatgcccttcctggtgccctagtttcctgcactgagcttgtgagctcttttgcccagaagactccctggcattgatcggcatagatggcagcgctggaggaggacttgtactggggccgctggccccacatcagtgtccgtcatcccggcgtccagcccctggtgtgctgaagctcaggcccttccttgtgccctagtctcctgcactgagcttgtgagctcttctgctcaggcgggtcccctggcattgaccagcatagatggtggccctggaggaggacttgtattggggccactggccccacgtcagtgttcgtcagcctggcatccagcccctggtgtgctgaagctcaggcccttcctgttgccctagtctcctgcactgagcttgtgagctcttctgcccaggtggtccccctggtcttgatgggcatagatggtgagcctgaaggaagacttgcatcaggaccaatggaccctggcaagtgtccgtcagccaggtgctcagcccctggtgcactgaagctcaggcccttcctggccccttgatctcctgcactgagctgtgtgagctcttctgccaagggggggcctcctggcattgaccaacatagatggtgagcctggaggaagatttgcattgggcccaatggccctgggccagtgtctgtcagccagtttcccagcccctggtgcactgaagctcaggcctttcctggcatcctggcctcctgcactgagctgtgtgagtgcttctgcccaggcaggccacttggcattgaccggtatagatggtgagcctggaggaagatgtgtgggacccgcaggccgagggccagtgtctctcagccaggtgctcagcccccagtgggctgaaactctgacccttcctggcaccctgctctcctgcactgtgctgtgatggtgagacttctgttgggcttgcttttcctgggccagtgtccatcagccaggtgctcagccatcggtgcgctgaagctccagcccttcctggtgccctgatctcctgcactgagctgtgatgatgagctctttcacctaggagggccccttggcattgactggcatagatggtgaccctgaagaaagacttcagttgggcctgaaggccccgggccagtgtccatcatccaggtgctcagctcccagtgcactgaagctcagacccttcctggttccctggtctcttgcactgag

SEQ ID NO: 1986 - DNA, 2182 bp, Homo sapiens
aaggaaggaagaaaggaggaagaggcaggcacaagacaaaatgaatctctccgctgtgcacatggagccttagctctgattccagttgagcaaaattatgaagaagatgattccccatatggatgacagataaacaccctgtggcgagtcactcactcccgaaaggccctctgaaggatcgcgcatgtcctgactgcacagcctgctcctccacggtcctttcaaagtcactgcctttggatgtaagtttctcagagagaatgagccttgtgtccaatgcctggaaagcaacagcatttggccaccaagttcctcttcatcctcatcaagcagcttttcctgttttgtttttagctccaaccttaggacaatggacaagtcaatcagtccagattaccctgcaccagggaagagaggcacctgacagctatacccttcaccaagtccacggggacaaaggcacaagagtaatagaagctgcagggagaatgcaattctcatcaacccttggggttgccgcattgtttttgctctgttttccagaaagtctttaacggaggagaaagggtgtggaggaagggagggccttgcctattagcagatatttcaatgcagtcatcaccctcccgccattcaatgtcagggatcagcccttgcaaaggagcagtcattggacaatgggcacaatcagggctctgggtttttctgtcctgctgcacattcgacccgccttcctctgctgaaaaggctgcttttccactaggcatgccctatgtatggaaaaaacttctacctctggtttgctttcgtttgtacccacccactgcaaactaaaattgcatgaagcagaggctaagatggttttcctagtacaacgaatatctgccaactctaaatagaaagacttagatcaatgatgactagttaattaagcaaacttgagaaaggggactattcatttattccttacctttcactgagcagtttagaggctttcattggaaatatcattaatcacctgaaatgccttgcaataataactggtatccccattttacagtttatcatgtactaggctctgcggtaggttctgggaatacagacttgaaccagacatgctttcaggccatctgcaggacaaagcaaatgttacagaagttaagtgacttgctcaaggccccttgaagtccagcttggaagactaagaactcaacatccctgtggatcctgccagccctgccagctttcccagagacgcccagctgttgagcttaatctcagagtcactggaacaaccacttcaaggttgaattcgtcaccccaatcacatgggaacattatctaattaagtggctctgccacttgaggggcaaggagagctgaagtcgggtattgggaaacacaggttgctcttccatgacaacaggtcacacagttgaaatcccaaaaccatgggcaggaccaggttgtgtaaatgaggttcagctgccctggctcccactgccaccctggcacacaaaggtcatctcatccatttcctccatgtctttgtatttgctattcctcatcccagaatcatggccccttccttcttccctgtggataatgcctcttttccccccattgcatcttacttattaattacaaaattgtccctggataattcttactttgcttttaagattcagcttagaaatgttgtctttgagtctcaatttcttcctctgtataaaggggacaatagtagcttctacgacacaaagttgttgccaggattaaaaaatagataatgtgtagaaagcacagtgcccaacatacagaaagtgtttaacaaacgttggttgtcactgtcatcattgtcactctcctctgtgatcacaaactctggccagactttaaccattgcagtgcacctcctgactgcactgcacttgtttattcctgtcttccccattaggctccgggctcttccagggaggggtgggtacatcaccagcatatctccagtgcctggcacacagtaggtgttcaataaacctcctgcattatctgaatcaacgaataaatccatactaaacaataagccctcctcctgcgggtctgtatctctgtgacacgtcttccctgtgaaaggcacaggaagaaaataaaggaagagaacagaatgttctcgatgctactc

SEQ ID NO: 1987 - DNA, 1225 bp, Homo sapiens
ctgtgtggtgctgggtgtgagtcggagctagcctgggtttacctgagttgcagggtcacccctcatcgcacccttgtcagtcctcaaataggggtgcaactgttccatgaaagggaacaaagagactgagctactagacaccaagctgtttaggactgaacccattcctgtccaaacggaagtgatccagagggactctgaatattacagaagtcaagagatttcatcatctttattcaaagaaaggggtttgtttgttgattttttggattttttttttggaccacagctctatctactccctgaagagtaaggattattaagtaaatcagatggaaaaagaatcgcaaataagcataatgtgaagagcatgagctttggaataagcaagcctggaattacaattttcttttattagctctgtggctgtaatactcaacttttgcaagcttcagtttcctcgtctgtgaaatggaataatagcacttacctcattggctgttgtatggattaaatgagaccatgactatggatgtatggcatttggtacccaataacccctcaataatcggcagctataattattcataataataatggtggtagcaacaaacccagcccaaacatctgaaggaccgatcactaaaaagaagatgaactcagtcctacgtagtaacaagaatgtgacatctatgttgttgccaaaagtctggaggagttgccaggaccagagagaaggaggtggtgaggccggcctggaagagggaggggacagatgtcaaggaccccaatcttgaggtggaaagttctgtgattaacccagatgaatgtctctaacctccaactcttctgttctcagagttttaatggggcacaccgtgtgctgggcattgacatagatgggaaaagcatgacctaaaataagggctggaagccaagactgggaggaagggcaaagggagcaggcagcctggcaccaggtaccagtgaggtgtctgctctttgtccccatcacctgtcagctaaggaattctgcatgtcatcagtgcaataaaatgtgatcgccagagtgaaaaccttgtaatagaccagctgtggcttctctcaacaccagtatgtccaaggaggatgcatttttattgcttttgtggtcttaacaaaaaagattcatgagcattgtataaaaggcatattaaaacaattcggtaaaaggatgaaagaaaaa

SEQ ID NO: 1988 - DNA, 811 bp, Homo sapiens
tgtgtttacagtattggagggattcacatcgttgttttctggattaagctgctaggagtatcatgtacttagaaattcagtgtttatagtaagatgtattaaacattgctaatgatgtatcgttacaatgtataacaggttttccattgtcataactgtatggaattttcttggaggatgtcattagcttctgtttgcactgacttgtgagctgtgtgtacgctgtggtcagatttctgaatgctgtagagcacttaccagctctgaccgtgtcttgctggggccagcaggctgcgtgtgcagcggggccagctgtctcagggctgatatgtagacgtgtattctgtttacaattagttccccaactctgtggggaagaacttaagcggttttagtgttttataatatggtgaggcaatgagggtcagggcgcgtggtccctgagggagggtcttcagggcaagacccatggccctggcctggaactgtgctccccagggcgtggtgcctccctaaggggatggtcagtgttctgggactgactgccaggccagcccgtctgcagactcctgtggtgggagttccctgggacgggaagcccctcggccccttccctccaggggcaggaactgagccagcatgggcggggccggccgagcttccaggcgtgttttctctgttaaatgtacctctgtctttaagctgtctcattttctaatcgctggcatgtcttgcctagaaaagcatttggaattgcttatgttcaattacagaaataaaatgtcttacttgccattgtagaattcctgca

SEQ ID NO: 1989 - DNA, 561 bp, Homo sapiens
agacatctgggctgctagctgcatgaaggagctacccgctgtgggtctcctctttgctgacagctggacacttgacagaatgacctgcctgaactcgggacctgcagaatgatgggactgaagaagctgtaacacaaacagggctaaaacacgcactctcctccccctgctccccaccgccccacccacttgccacattggaggtgatgagaaggagagaagagctgtggcctttcagggagcatagtcccaggggctccctgagccagggctgtgaaaccctcttccgggcactgcagttcctggcatctccaaacttctgagtgccaccgcattccccgcgtccggatgcaggtcaatgcacagaaagaaatctctctcctgactttagtacaatggcacgattggtggccacagtccaaggatggttgctggggcaccaagagatttctgacaaagggcattaaaactgagaaagtttgggaacctctgaatgctgtagaataatggcctccagctccacccaagttgctgcaagagactttatttcattttttttaa

SEQ ID NO: 1990 - DNA, 289 bp, Homo sapiens
gaaggggccggcggccacccctgggcccagccccggcctccccttgtatgcccccagccccccaccaatgccctcccctgcccctggtgggtcagagatctcctggaggctacagggagcaaaggcgatgcccgcaggtggcgagcgtgttctcaggagcaggtgggcaggggccttgcagactcttcatttcttccttcccttatcaccgttagccattttcatgggatagagatacagaggagctcccattacaaagcgccattaaactgtcgtctgtgcaactgtg

SEQ ID NO: 1991 - DNA, 476 bp, Homo sapiens
tgtgaggaggcccaggccacaaggagaggccacctataagcattcaggccagcagccccagatctgctcctcctgccaagctgaacccaagaccagcaccttcctccttgtgtaagatggtgacatggatgccgtctaattgctgcagaggaaatacatacattcaaaaacattttactgcaagaggatgaacaatttaacatcggactgacatcagactgatttgttatctcaaaccccagcttggccagcctccaagttacatcacctcctcaaacctcagtttcctcatctgtaaagaatggaccttcaggagtcatgggaagcttagaagaaaaaaaaaatgtatgtaaagcagcaagcataattattttcctctctcattcaccctgtccacagccgggcagggggagtgccatgaagtcagccagaaatcagcatattggacagtgtgagatgaagtcaggttgtaggac

SEQ ID NO: 1992 - DNA, 1774 bp, Homo sapiens
ggggtcaagcccccttggagcctgcagcccctgccttccctgggtgggctgatgcttggagcagagatgaggactcagaatcagacctgtgtctggaggagggatgtggtgggtggggttggctgggcccaaatgtgtgctgcaggccctgatccccaactctgcaactggggacccctgcatggccacagctcaggctgggctgtggtgccagcatagataggtgggtgagtgggtggcccttccattaaaagggaagccagctgtgtcctttccgggcctggaggcttggcccctcctctcccaagcctggcaggggcactggcccggcccgcaccttcctagcagccagttacccaagaggaagctgccttgggcctccagaccgttaaatgccaactcctggcttccggtatcaggctgggttgacctgacctggccccttcttgctgggccctgcagctttctaacttgccgggaggagcagtgacacccgccccacatgtggggcatggaacaagttccttgtggacccagaagggacacaagcaggtgtgcttagtcctgaggcgctgggaatagctgatcctccctgccttgagggggttctcagggcagggaagagttaggactctgtttttttttttttgtttttttttttttgagatggagtctcgcactgtcacccgggctggagtgcaatggctcgatctcggctcactgcaacctccacctccccagttcacacgattctcctgcctcagcctcccaagtagctgggattacaggtgcacaccaccgcacctggctaatttttgtatttttagtagagaccgagtttcgccatgttggccaggctggtctcgaactcttgacctcaggtgatctgcccgcctcagccacccaaagtgttgggattacaggcatgagccactgcgcccggccaatttttttttatgttttgtagagacggggtttcgccatgttacccagactggtcttgaactcctgacctcaagcaatctgctcgtcttagcctcccaaagtgctgggattacagctgtgagccaccgtgcctggccttttattgtttgtttttgagacggagtctcactctgttgcccaggctgaagtgcagtggtgtgatcttggctcactgcaacctctgcctcctgggttcaagcgattctcctgcctcagcctcctgagtagctgggcttacaggcacccaccaccatgcccggctaatctttgtatttttagtagagacggggtttcaccatcttggccaggctggtgtgatcatggctcattgcaaccttgaattcctgggcacaagtgatcctcctgccttagcctccccagtagagctgggactacaggtatgcgccaccacacctggctaatttttttaattttaatttttgtagagatgggggggcaggtctcactatgttgcccaggctgttctcgaactcctggccacaagccatcctcccaccttagtctcccaatgcgccggaattacaggtggctcaggtgtgagccaccgtgcctggcttttctccactatcttgaaatcagatgggaggaggcttttttctgggtgggactgaggaggcacactgaagtcccccaggtcatcggggctgggccattgcctttttccccaccctgggtagtcgtggacagaagcttgggatgggatggagaggagagatcgtgctgtgtgtcatgtctgttgttcaagtaaataaaagttgccctgacttca

SEQ ID NO: 1993 - DNA, 456 bp, Homo sapiens
agaatgaaaaccatgtagctggtcttattattctctaatcatgaagaccattattgttatttgtggactaaggagcagaaagactgatagtggacataggccagctgatttaataatttaagaaagaactgttatcctgagtaaggagcatagagacaaatataaaatgaacgcactctacctgatttaattatagtcttctggtgaagatcttgctgttatctctgtgaatcaggagagaagagattgataaggaatagacgagattggatttggtcatttccccaaggtgaagagcatggcgatttcttctgtggtaaggagcaataatgaagaccatggttgatttaatcagtctctgctgatgaagatcttggctgttacctttgtgtgtaaggaagctaaagacttaaaatgaatgcgcaatgattcaattattctccagcgaggaagatc

SEQ ID NO: 1994 - DNA, 1101 bp, Homo sapiens
taaaagagagtgaagaaatgaggccaaccagatgcagtgtacagacttgggccacagtgggggaggtgacagcagacggtttggtgggaaggaacgcaccagagccccatgggcctgcctggccagctcgcttggtcatcctggtaaaacagcagagctctctgttccaagaggcccacgcgcagccccacatgcctgctgatctgtgtacacacgtgtgtgcactctagcaagcctcactttaattgtgaagaaacatgggaaccggtgctcccacccgggctgtgggagtgtggtgcggtggggcctggacacggggagggtccgaagtggggccagctccctggagtcaggcatgtctgtctcaagctgcccctgtcccttgctgaatgggaacccccaccagctgcctcgggagcccgtgtccttacactctattcggatctgctccagctccgtcacctcagcaatggactccttcaggtcctccacgaacttctgcatctcgtccgagcccagggcacagaaatgcagcacctgcttcttctcggagcccgagagcggggtcaccagtgtgatgccatgagagtaatctggaaagcagaccccaggcccccagtgggctgtgagcagcagcagccgagggccagagccagccagacatgaggagggcacggggtctcatgcctccacccactctgctgtccagcccttctccctcaactcgccccagccatttcatccattcattccttctcaaagacttacactggctgtcaaagacttacactcgttctcaaagagctggaactgcatgcccagcaggccaactgacttgcaaaaggtgtacgtggaggagctcttcttcttcgggcaaagtttgagaatctgttcaggagagggaaacaggcatgccctgatgaacagacactcacggacacatggatgcacaaacacccgggggatgcacgatcacacaaacccacgcagtgatgaatgtgcacatacagcttctgtgagctgagccctggagatacaggagaactcaggacagagcccctgcccttaaggtgcttatggaatgtggagtgtcacagtgtc

SEQ ID NO: 1995 - DNA, 432 bp, Homo sapiens
ccagccagaagcaacatgtagatctaatgaccttctccaggagtcgaggacccactacctcgctgaattctcagagtcaaaatgcgtctctacctgctggtcccagaacagtcccctgctgctgcattgaatgaatctcatctcacttcctcgagtcagccctacctatatttgatgatcacaaaccttatccttacgttgccagcagtaacattctgcatccctcacccactccactgtgtccttttcctcccactgatcttcactctgccttttctaggggaactctgaacagtatttctgagaagggtgctggcatctcttcatccctagagtgatgctgccatctccgtcttgaatgtctctgctgacatgacctgctaaacttgaactcataggcggggcaatcgcttgagcccaggagttcaaaac

SEQ ID NO: 1996 - DNA, 281 bp, Homo sapiens
tgactgtaagtgaaagtgaatcagtatgatcgtacctaatgaaacccgtctttggcctgtggctgagacgccatctgtaggcggtgaaatctttccagcctatgtgacgagggtcatgccacagggtgcgcacctgaaggaaaaggaaaaggaaaggttgaaacacagctccttcagggctttgcttcttacctggccaggggtgtttcctgtgtgccacagggcgttccgcaggtgctcgccaggccctgtggtggagtttacaactttcacagaaaggc

SEQ ID NO: 1997 - DNA, 4867 bp, Homo sapiens
gaaatggagtctcgctctgtcgcccaggctggagtgcagtggcgtgatctcggctcactgcaacctctgccttccgggttcaagcaattctcccacctcagcctcctgagtagctgggattacaggcgcccaccaccacagccggctactttttgtatttttaggagagacggggtttcaccatgttggtcaggctggtcttgaactcctgacctcatgatccacctgccttagcctcccaaagtgctgggattacaggcgtgagccaccatgcccagccctatagtagttcttcttttgccccttaatatcttcacccacatgtcctgtaccctgcctgaaccctcctcctctttttgttctgatctttgagctccctagagcccataattctttagagcaggtatgtcccgagtctgaaacatgcccttatttgtcccaagctctggacatttctcaccccaaggcggatcaatcatgattaaatcactccaattaaactttaggctccagtcagaccttcagccaaatggaaaaaaaaactaggggataagggaggtagttggagcaagaaaatgttattagttgaaaccttacgggaccttcctcccttagtgagtctgttggctaaaggttctctggcttcgtgaattagaatcggatactgtttccaagttagcaaaaccaactctaccccagcaccccacgaggaagaatgtggaaggatctcccattggccggttggggcaaaagcctgaggcaatctttcatccccttttgccaaggcgagactttcccagtgacggtgatgtagttggccactctgactatgggtggactcgggtgtagacctctgaagctgagatcacacgaaaacctggcctccccgccatgtagctgttggagagtagaaaaatagagcacgcctgatgtttctaaatgagaagactttcaatagtaatgaagaatccatggcactctcctcaccctcaaacacatggcagtcattcacatacaggccccaaagccactgttagtgctgcagtagctcctgtggacattggaaagcccggagagggcgtggaagaaatcagctggcccccggcaggttctctggggttttgtgcccaaggctcctggagccctaaaaactttcaaaagttaactccccacgtccccatcctgcttgggtttctggacttttctgaggcaccggcagaggggtctcgttgctcccttgagtgtaggggcagccctttaacctggctccttgagtccctgctttttctgcttctgttgccttcttcctcgtcttcctctctctcaatatctccctctctttgtccctccccagttcctgacctggccatcccggggtgcccttgaccagccccgtgtctcctcagggtgtcccagcaccagcctggcacagagtggggctcagttagagtatgtgggatgttggtttcgccaggtgagtgaatgaaaggactcgaccaccacagctgagccactagctgggccatgcgaagagttctaggtgcaaaggctggagggtggaattcatttttgagaggtgtgtgagcagcttccgacccctgccccatttgaacgggggccttgctggtcgcgtccctgcattcacccgcgcggccatcccgtcatccaacagttgatcctaactgagcacgcccacggccctggtctggcctgggcaccggccaccgtagcccatcccttgatggcctctgtgtccccaggagggcgggccggggggttgcccaggggctggagcagtggactgtggctccatagaggtaggccggagggtgtgagggcagattcaagctatccccagggctctgctctggtcggagccagccccttctccctctctgccttccccgccccattcctgatgctgaactgttctggacccctggccctgagtctctcaggaccaaagtgggcacgggaacagctgtagtgtgtgcccccccgggctttggccacaggtctccctctcgaggtgtggttgtgactgcgacccttcccttgccgtgatgccttcctcccccggggcttggtccagctccttcactctctagcagctgctggggcccacctcccatgccgaggaccagcaggggaaacctccagggagcatctgcaggctctgcttctgcccggctgctggcttgctctccctggtggctctccagcggccagcttcctcacccacccggcactccgctttgctctgtctcctgaggtgggcctgaccaacctccccttctctgcctcagtccctgggctccagggctcagctccacagccctctgcctagcaggctggttctccctgccaagcccatacctgtggtcacctggccctcctgtggtctgagtaccactcccctgccccaggagccactcccactccagctgcctgtttccagcaggttcccagtgcccccgacaagcccctgctggtgtctccatctcctgccaagcatcctccagtgcctcctcctgtgggcctggcctcagggctatggacagactcctgtcccatcccagagacccctcgtgatcgtgccctggtgggtgttgcccccgcctgcctttgcctccgccgtggccctgagagtcctgggctctgccccgcccggtcccttgctccccactcagttctggatttggggctgcccctaacccagcccgttgctgctttgcaccttttcctgtcattgggcatcccccagtagtcaccccactccaccgaaaagtaaactgcaggtgaggccgtgccccgagtctttcttcggtgtgtttggcttttccggggcgcttgccttgccatgattctaactctctgcccttccccaaggcacgtgggccgtggcccggctgggtcggctgaagaactgcggatggaagctgcggaagaggccctgatggggcccaccatcccggacccaagtcttcttcctggcgggcctctcgtctccttcctggtttgggcggaagccatcacctggatgcctacgtgggaagggacctcgaatgtgggaccccagcccctctccagctcgaaatcgtaagtggctggagtgtaaagaacacacatgtggccttgctgctgagggtggggccagctgcccggagcacaccgccaggcggacctcgtggaggggctggcgggcactggccgggggtctgtgcaccgggaggtgggtgcccatcgagtcaagccaagtgcagacctgggggctcctgttttctaagacaggagccccctgcctccttgtgttgtctctgtggcaaaagaattctataggcgggcttcaaatgtcggaccccaaaagaatttcttctttttcactcttctaaatgaatggctctttcattattgagtctccctttggctcttgtgccgcagggcagactaggatggaagtgccctgtgagctggggggcccttcaaagggccaaggagaaaacgcaggccgagggaccagccttccaaatgggcttcaagctccaatgacctccgctcgccccctcgaaatgtctggaaaacataatgggcagattttctgtcttcaaagtttccggctaaacctcttcaagttctttattgtttgggactgagacactcagccatgttaatgggtagtttcttttgtatttgccttgaaaggccaaaatatttttatattgccacagacaaagccacctatttaaaaatgaactccatgtccgtcgtttcccaccaggagactatgtaccatgtgtgtgtctctatgtattctggggtcttgaaacaggtttctcatggggatggtcattcaccacggtccagaggggcagaacaggcggcgcttgccttgcccagggggcctggggaacgtgggccctcatctcagatctgcccccagtatgtttaggacgcgagccccagaaggatctgggagtaaacttaacattcactgtgtctctgctctgcatccgccatttgtgtgtgtttctggactgtgggctgtgtgtaccttggttggtgactcagtgagaagaagcaggaatgccaaagatactgtgaatgttctgagttttgttgctgttgttgttgagaggttgtttcactggtatctattgcattgtataataaatgaccagatgaatgaatgagtgaagcaagagagaatgaataaacaagtaaataggtaaagaagtaagcaagccaggatgagagtgtgtgtacacaagaccatggttcatccgctttgatggctaggcaatcaatatataaatagaaaaaaaccagtgaatcactaagtaatagggcaacacacaaagcgatatcaggtgattatggactaaggggtatgtgtaactcaaatatatgcctctgacatttgacaatgaaaaagaacctaaatgaaagaaagaatggatgtatgagtagtgaagtgcagaatgagacatagattttgaggcccgtcaaaatgaaaagatgcaagttagggaacaagtgatcaaaagggagaagggaaaggttttttttaaaaaaccaaaacaacaaagaaaggttaaaaaaaaaaacagactagaggatgagtaatgagtaactctgtaaggaggaccatgtcagactattgtaagctaagcattaggactgatacaaataatatatgctcctggcatagaaaaataaaccacagagaacgagttcaaagaatagcaaagaaagaaagaggacccagtgggcgaaagatgagagtgtacttttaccaaaagttatctaagcctgagcacttgaagtctgcacataaataaataaatgacaaaagaaagaaaaaaaggcc

SEQ ID NO: 1998 - DNA, 2029 bp, Homo sapiens
ggatgttgtgaaccgggtcgcggcggccgaggctcgggcctccaggaccactggctgcccatgagagacgaaggatggcatccaagggggccggcgtgtctttctcccgcaagagctgtaggctgacctcagatgctgagaaatccagggtcacagggacccgctgcagctgggaggggagctgtccaggaggccggcctgggaatgagcacaggcctgcggctggcagagagccgggtcgagccagccctggagaagcaggcccagctggaggagcagctgcgggacaaggtgctccacgagaaggacctgtcccagcagcagatgcaaagcgacctggacaaggctgacctcagtgccaggagggtccctggtgggtgctgcatgaggcaggcgtcactgcagaagagtgacagagctgggcctggcagtgaagcgtctacagaagcagaatctggagaaggatcaggtcgacaaggacctcaccgagaagcttgaggccctggaatccctgcggctacaggagcaggcggccctggagacagaggatggagaggggctacagcggagcctaagggacctggcacaggccgtcctgtctgacgctgagagcggcagcctgcgtccaacagcgtccgaccgcagcctgcgggggctctcgggccagcggaccccgtctccaccgcggcgctcctcgccgggccgaggccgttcgccccgcagaggcccctccccggcctgctcagaagactccacgctcgcttgccctgattctctccgccctgcacttttgccagctgaaggtccaggtaggaaggggcttgagttttctgggcgcagccagaggcccagggggaggggctcgcgccctccaggtgggggtgggggcgtgtctgggggaggagtctgagcgccctggggtgcagccagagccctgagaaatagtgtctgagggtgtcaggacccccaaggaggtggtcgagggctctgcgctgaagccagcccagaagtgggggtgcttgggcagctgggggtgggtgcttgggcagccggtggagggaggaggctgcgacagtgttagggtcctggtagagagggagacaggtccctggtcatacagagccaggaccctgggaaaaggtctagcaagggaaatcacagcctaggatgagagcttgggaactaggggcagagccagggtagggaggagtgtgagagtggaaccaggatgcaagggggaggagcctgggagccctgggggtgggatcagaacccaggagacgagtgtgcctgggagtttgtctggcatcccgggggctttgataggagttgtccgggaccccagggagatgagggttcagagggtggtgagggcacataggaggggagtggaagcctggctctcaggcctaggcccctatcctgccccagggcaggtccaggccctggaccccgcctagcgtaggctagtgtgtatccctggaaccagaagagagtaggtgggctctggaggcctcaaaggacccccgctagactctgtgatccccacgccccagaacatgcgtgggcgctatgaggcaagccaggacctgctgggcaccctgcggaagcagcttagcgacagcgagagtgagcggcgggccctagaggaacacctgcgtggcgccgtcggtcttgtcccgcaggcactggccaacatggcgaaaccccatctctactaaaaatttaaaaaattgcccaggcacagtggctaacgcctgtaatcccagcactttgggaggccgaggcgtgcagatcacttgaggtcaggaatttgagaccagcctggccaacatggtgaaaccccacttctaaataaaaatgcaaaaattagctgggcgtggtgataggcgcttgtaatcccagctactcgggaggctgaggcaggagaatcgcttgaactctggaggtggagattgcagcaagctgtgtggagtgcagtgagattgtgtcactgcactccagcctaggcaagagtgagactgtgtgt

SEQ ID NO: 1999 - DNA, 326 bp, Homo sapiens
cgttatgtccagtgcctagaaaagtacctggtaagtgttgtgaagtatttcctgaatagaggttgaatgttgtgataagtttcactgtgactcctcatcttgtacctgcacttgcaagtttcttcttgtctgcctggggcgttgcgctcagcaccttcagcccccaccactcaaggttcctgtctgcatgagtgtaatcaccatcgagtgtcaacagcaccatccctttccccactctcattcagaagctcctcatctgctctgggatgggacaaactcactcttgtgtcatcattctgccaagtttattaaaactcaaaatgtga

SEQ ID NO: 2000 - DNA, 1904 bp, Homo sapiens
ttttccctgttcttcacgtgggacacattctccctgctctgtctgtctctgtccctgtctctctttctgtctttctctctcactgtgtgtctctctgtctctctctctcttttttttttctttgagatggagtttcgctcttgttgcccaggctggagtgcaatggcgcaatcttggctcactgcaacctctgcctcccgggttcaagcgattctcctgcctcagcctcctgagcagctgggattacaggcatgcaccaccacacacggctaattttttgtatttttgttagagacggggggctctccatgttgcttaggctggttttgaactcccgacctcaggtgatctgcccacctcagcctcccaaagtcctgggattacaggcgtgagccactgcgtccagccgtctttgtctctttttctacatctctgtctttcttctctggttgtttttcaaccatcagccgggtgttttcccccataacgtcttgtttgtttgactatgaggttgacaggtgggtacatgaactctatagcagaaggtggacagtctgcacatagcagaggatgggtgaatttttctaccccttgcagagcacaggagagctgagcagatgccagtgtctgctccagtgtaaggaagtccaggaagttcaggtggtgaggtcacagtggaaagcaggacagatagagtttaggggaaattaagcaaaaataccacactgttgtttcttgacatattagtggaaagaggaagggcccagagagaagacagaaaattagatgcaggggcttgttttttctcttgacttgccaacccgcccaacgcaggggccagaactcagggtggtgagatctgggaacattgctgtgcggagaagatgtccctcctgctgcacgggcccccaagcaccacctgggggaagagccatgtttaattcacctggcagtgcagtgtggccaggcagagagggagggcctaccctgtgcttatgatcccaccccagttcccctggggtgtgccctggcggtgaacaccaggaggctgcagtggggcccaacgtgaaagggaggagcagcctcaccggggccagatggggcagcagcagatattcacagatgtccctgtgagtaaccagggcagaggccaggggtctggccttccctttcttggagccctgggccagctgggcaaggcgttgagagaaagattacccggtgacctttatcaaagcagagtaaggagggctttattcagaaccatcactgtaggtaccaggaccccagcggtgggattttgtagtaggggaaagaaaatgggctcgacgttgaatacagcatgaacaagtgagaatgtttgttatacaaactatagggtggactttttttttcttttttttaactttttttttaccttttagtgtaaaactgaacatagaaaataaattcatgaagaagggatattttctgagggtgtccagggctgcccaacacctcttgtctaccttctctgtcatagccccatttaaaacactctctctggatgaatacaccaaacctcacagtctttgctctcttgctaggaagaggagcaagagcgtgtttcactcttggctcctgcttacacacctgccgtccaatggaaactactacttaagacatttaaaaatagttgtggtgatagcatgttgtgttttggttggtgatgccagttagtctctgaaaactttctgtgatgagtgtaaaattctacaccttaatctcctttcttgtaggatctgggaagcagtatgcacttgattgcaccaaagattttacgttcatagaaaatttctggcatctgtgtgaagaaagtaaactatatcttccatttaaacaaataaaatatctttttgataaaa

SEQ ID NO: 2001 - DNA, 612 bp, Homo sapiens
cggtgtagcacgatggaatctggtggcttaaacctagctgtccacatttcactatctgaagagcagaaaatgtgttaataggagcctggtgagtggaggagactgaagatggagagagagcctggacctcaacatgagcatctggagccatttggcagcattaggctgtgaccgcttagagaaccgaaaggtgcagagctttaaaggattatggagtctgaagaccaaatgggatgatggagaacagctattcagtggtacaaatgtaaatgctcccaggcccgggcagaaaagagaaaacatttccatggaagaggaaacaggaaattccaacagatcagcaacagttggagtgctaacctgtcactggaatgggaaaaaaaatgctgtcgttgacacatcttttccttgtttttgacacaaattagaaacaccacctggaacacagctgtgacttgataaacaagtgaaacattctttggtgtggtgaggggaaaacaaatttctcaaaggacacgcaccatggtgtatgagaggacactggagcccagccagcatctgacatgctgaattcaaagtgcaggtgaaagtaggacaactgattcacaagct

SEQ ID NO: 2002 - DNA, 86 bp, Homo sapiens
aagagccaatgatgtttttattcaaaatgtctgaacctgtctgaagcatcccagtgatgcaacttctgtgtgatactgaggctttt

SEQ ID NO: 2003 - DNA, 3049 bp, Homo sapiens
gcaagcgccaagcttccatccggacttcaaggccagtggctgggtctggttttctcaacacggcctcctagtctccttcccgcttgggcatctgtttttcttatatagaccctgaagccgcccgtgatgttctgtaagcaggttccgcttcagaatcagaggtacttaagagggaacctggatgctagacctgcccttgctgctggcctcagtttctttacctgtaaaacagggattttggaactgttaaattaaatcaaacttaaaagaattacaacttaaagctgctggaactttacatgatcccgagccttgagaggaatgtggctatgcagcctgagtcatgtggcatgcagatgcaacctctgcctttttccgctgtaaataattaagaagaccaagtagcatccaagagtcacctaagctgaagattcccttgagaacaagtactgtcctgtggtttcatggcctttcttccatttgtggttcttgccaagcggaatttaaatgacatcttatcaagatggataaaccctagtttcccagtgctggaatatagaaaatggatggacaagtaaatcccactcagcacccatagcccaggcatggggacctcaacacatttgagccgcagagatcacctttcattgtgaatagctctgagatgatacttctggttgaatgtctttttgtcacttccggctggatctaccatgaaagatttctgaatccaggaagagagattgactgggcaacatgttattcagaaacaggaccttgccctgtcactcaggatggagttcagtggtccaatcatggctcattgtagcctcaaactcccaggctcaagcaatcctaccacgtcagtcttcccagtagctgacagggtctcactctgtcgcccaggctggagtgcagtggcatgatcttggctcactgtagtgtagacttcccagcctcaagggatcctcccaccccagactcccaagtagctggaattacaggtctcatgctctcactcaggctgcagtacagtggcacaacctctactcactgcagcctctacctgccaggctcaagcaattctcctgacttagcctcccgagtagctgggattacagttgaagcatatgtcctgtgagcttaggggtgctacaagttgaccactgcagcagtaaagatgattctgaagaatggcatgggatggatcctttcgaatgcacttgagcagcggtctccaaccacagggccacagagctggagctggatctaccatgaaagacttctgaatccaggaagagagactgactgggcaacatgttattcaggagatggggtctcaccctgtcgcccaggcttgagtacagtagtgctatcacagctcactgcagccttgaactcctgggctaaggatcctcctacctgagcctcctgagtagctgggactgtagggtctccctctgttgtccaaggctggagtgtagtagtgctatcacagctgactgcagcctcaaccttccaggctgaagcgatcctcccatctcaacctcccacgtggctgagactacaggcgcttgccactatgcccaactaatatttggaattttcctatacgtggattccagaggggtgacagcgaaacgtgggaccatccagttgcaggaaaacgagcttaacacgcccactgattctacattatgctcctacctcccggcagcctctccaggcccagaactttctccagtcggcctccacagaccaagctcatgactcacaatggcctatttaggcccataccctacctcacggcagtctccgcagatgaggctactgcctcacaacagcctccacaggcacagctccatcgttacaatggcctctttagacccagctcctgcctcccagccttctctctaggccctgaactttctcaagtcgacgtcaccaggcccagctcatgcttcttggcagcctctccaggcccagctcttcctcccggcggcctctgcaggcccagactgtcatcaagtcggcctgtccagggccagctcctgcctcccggcgccctctgcaggcccaagtcgtcctcaagttggcctccccaggcccagctccagcctctcggcggcctctccgggtgcaaaagttcctcgagtcagcctctccaggcccagctcctcctgcctcccagtgcctctttcggcccagcccagctcatgcctctgggcggccttcccaggccccgcttttgacttttggcggcctctgcaggcctcgacaaggcccggcctcctgcctcccgaagcctgcacaggcccagcctctgcctcacagcagactctccacgcccagctagctctcgcctcactgcggcctccccagtccaaagctcctgcctctcggccgcttcggcaggcccagctcccgcctgccagtgcctcttcaggcccatggggctcattcctcacaacggcctttccaggccccgtttttcccttccggcggcctctccgggcccagaacctcctcaagttggcctctccagacccacttgcaccctccgggcgtcctctccaggcccagctcttcctcccggctgcgtctccaggcccgactcctgcctcccaacaacctctttggactcagtgcctgcccatctcctggcggccttggtcggcccacagcttcctcaagccaagctccccaggcccaggtcaggcctcacggtggcctctccaggatcagctcctgccctccgatggtgtctccaggccccaaatggtctccggccagtgggctcctccacgcccagcttgggcctcccggcgacctctgcaggcccaagtcgtcctgaagtcggcctctcccggccctgcctcccagcaagtaagcaagcttttttggcttagctcctgcccagctcccaaccgcctttgtaggccccgaactttctccagccaagctcttcgggcccacctcctgcctcccggtggcctgtacaggcccagctctggctggagaacagcctctgcaggccccgctcttgcct

SEQ ID NO: 2004 - DNA, 1838 bp, Homo sapiens
aaaaaaagaaaaaaaaaaacggtcatgaggccagttctgccattgtgtgatctgtaagtggaggtcttcttctttgggcctcagctataaaataaatgagtcatgttactgtggctttgtttggttttgttgagacagggtctcgctctgttgcccaggctggagtgcagtggcacaatcagctcactgcagcctcaaccatctgggctcaagtgatcttgccacctcagcctcccgagtagctgggactacaggcacgcaccaccacacccagctaatgttttcattttttttttttagagacagggtctcactttgttgcccaggctggtctcaaattcctgggctcctgtctcggtctcccaaagtttcgggattacaggcgtgagccgccgcacctggccaggttactgttggtataggaagtctacccgcaagtttagggagctggaggcagccctaacacggagggaagcattgtcttctcatgccaggtttagctcccaccattagccgcaaattttatgtatttatttactttttgagatgaagtcttgtgctgtcgcccaggctggagtgcagtggtgtggtcttggctcactgcaacctccacctcctgggttcaaatgattctcctacctcagcctcccaagtagctgggactacaggcatccgccaccacactctgctaattttttttgcatttttagtagagacggggtttcaccatgttggccaggatggtctgaaactcctgacctcaggtgatccaaaagtgctgggctcccaaagtgctgggattgcaagcgtgagccaccacacccagccagccccaaattttaacacatcagcaataatttatagctggggctcacaactcttctgaggggatgaaaagctaaagcaatcagcatcttgaaggcgagggatgtgtcagggatgagaaacagaaggaaggtctcttgggacccactttctccatgagggcctctagtgagcctccgccagcagccagattgcaacccagtatggcttccagggtcaggctgttttatctataagtgcaaaattactgtttatcccatagaaaggacacgtctcccaactccttaccatctagaggcgtcactgcgaccgcagctatggaacctgccacacagcctgacacgaaggaatgtgcaaaggacgccttaccggcgagctcgttgaaccccaggttgttaaggttggcaaacagtgggaagtagatgatggagaaaggaatgtctctgcagaagaggaaggagaaacactgagctccgagctgccctggggctgccacccaagatggagtctcgctctgtcgcccaggctggagtgcagtggcgcgatctcggcgcactgaaagctccgcctcccgggttcgcgccattctcctgcctcggcctccctagtagctgggactacagagcacagaggctcatcaggaaggaccccctggcagccctggccccatccccgcagcaacggaaggaacaccagttccccatgtcccatacgctcacacctgctgcccagcctcccaggggacctgagaagcccacctcggtacatgccgaagaagccctccgcccgagccgtcttcatcaggcagtcgatcctggaagcagaggccagagtaggagcgggaggcagactgtgaacaaaatatttggagatggatttacctggaagtggtaagagtagatgatagtgggcctttcacaaaggaagaaacttgggacgataaagagaactgtaaacttaattttgtagttagagaagatgaacccaaacaattaaactatgttgaacaataa

SEQ ID NO: 2005 - DNA, 419 bp, Homo sapiens
ctgctctagtcacacaactggaaactgactagtctacgcatggccaaagcttgaggagtcatcatcaaatgagtagatgtacatctagttcttctatttgtctacctataggtgcactcataacattttaatttatttcatgtgttgtcatcgttatcctctgtattactctgagaaagaagatgttacctgtttgtgaaaaagagggtcacagagtatgtgtgaaccaatacttcatttgagacagcctcacatggagaatgcaatgagccattctcttctcacatacaggtaaattggaagttgaatatgacatttactgcagtttgatcactaagcataagacctttctttaaaaaaaattatgtaagcaaatttcttctttttcaaagggtttttaatacaatgtttatgcttca

SEQ ID NO: 2006 - DNA, 506 bp, Homo sapiens
aagcggctcggagtgttctggaagtggcaggagcacgactcccttaactctggtgcagggtttacctcggctccctcgggacgggttccgtgcagctcctgcttcctcccttctctttcccagtgccatccctggcgagggggaaaaaaaaaaacacggccaggagacttcccacccctgctttgctatttttgtacctccgtgacagaaaaacaaaaccctgaggaaaagtcaggcgacttcattccctgccgtccgcgccggggcctcgactactgctggcgtccgcggctttcgcccgccgctccacagagacggggtcttattatgttgcccatgctggtcgtgaactcttggcctcaagcagtcctcaaaccttagcctcccaaagcgctaggattacaggtggataaaaccttgtatgcatcaactacctctctttcaagatggaattttcagaacacatggtctgggattggagctggagcttggaaatattgagtggg

SEQ ID NO: 2007 - DNA, 1061 bp, Homo sapiens
gaggactgtgaagcaatcggggcgaggccgggtgtctgttcaactctcccgcgtatcgtctgtttcttcggcggcggacagtgttctgtaatgtgtctcccgttgcccgagctaaaggttttcctcgacggagtctttagaataccgtggtagaggcagtctccacaccactgtgctcgaacagctctatgaagaggcctatgtggagaggagaaaaagcctccaccaacagccagcaccaacttgccagccatatggcgtcttgctctgtcacccaggctggggtgcagtggtgtgatctcagctcactgcaacctctgcctcctgggttcaagcaattcttctgcctcagcctcccaaagagctgtgattacagacgtgtgccacaatacccggctaagttttgtatttttattattattttatttatgtgtttatttatttatttatttatttattttgagatggagtcttgctgtgtcgcccagggtggagtgcagtggtgcgatctctgctcgctgcagcctctgccccccaggcgattctcctgcctcagcctcccgagtagctgggattacaggtgcccgccaccatacccggctaatttttgtatttttagtaaagacagggttttgccatgttggccaggctgatctcgaactcctgacctcaagtgatctgtctgccttggcctcccaaggcagggagcctgctgggattacaggcatgagccaccacgcccagtcaaaatgttttaaatgtttctataccaccatctgtgtcaaagagcaaatggtctctctgcagctggaacaacaaaaactcaaatggtccacacagtggttcatacctataagtcaccaaacctaaactaagttgttatctgaccttctggaaatgagaagagatagataactgccagtttcccaaacaggccagtttaaatcttcctgtaagcatgataaggaagttccctctgatttaatccttacacacgaaaaagtagccttaaataacctgatattaactcatcagttttatttttatttatttattttttt

SEQ ID NO: 2008 - DNA, 3403 bp, Homo sapiens
agaacatgtctgacgtcagcgccagcctggacggagagctcggatcccagagaaggctgagcacagggaggagaggggcatgggcctctgcatttgagctgctctcgtcctgaagtttgtgccctgggccctgtgagaactcaggggccagcctgtgacaccccggccaggccatgcgagggtggcgccgggacgccgccctctgcggctcctttggggagcactgaccagcactcagggatggatccgtgcagcgagttgtcgagaggagagagtggaggaggactccgcagtatcccggctgatgcatattgagtcatccagaggagagagagggggaggactccgcagtatcccggctgatgcataatttgttcttcttatgcattttaccaccattttggctagcatttggtgcttcaaggaacagctgttagaagcgaaaatcagagaaaaaggcatttgcgtttcaaaggcttcgctttgtggatgacacatcccagagataggaggaactcctggcagcagccatagatttggaaggatgcatccccatcaggtagcggtggaggaatctccagggaggagacagagaagggagaggacaggagggagaggagtaaggggtttggatgcctgtgggtcctcagagagtggcctgagagccagactttctccctttcccctgagagcaacatggagctggggaaagagacctcagacacgccactcccctgccttcctgatggcgacagacacagagaggcctcagggctgggagccgggaaggtggaggagctgcccatgaggctggtgctttggcagggaaaggggccccccaggagctgccacctgccccaaaggtgcacctgggatgaagatgggggggaggcaccacagcgacctagttatggcgagcaagctctcaccatacagtagaggaggagacagaaattagttcagttacagaaaacagatacattggtagaatttacatgttataacataattccattaaaaagttggcatactcctgaaaacctacttactcttcccttaagaatcaagtaatattatgtttattagaaattatttggagaaatcaaaagattggaattacagtcttagcttcacactaattatgagaacgtcaaagttttttgtttgtttaattgagattaattcacatatgggaacccgcttttaaaagatcaggttccccatctctttattggatataagaatgatcctatttgtttgtactgttaattttttgtttgtatattggttttccctataaaattataacaggctaagtttcttgggacagagactgtcttgaaatttttatttctctgaagatcctagcgcagtggctggatagtccccttccagtgggcagaatgctaaggtggccccaaagtctccccgtgtgcacctgccgtgcgtgggcctctgtccttgagtgtggatggtcctgtgaacacagtatagtcattgcccccatgatggggtgacatcctatgagaccccagcccagctgccaagcagtgaggccaccggctgtgtggccaggacctgggggcctcatccgcggaggacgactctgcccaacgtccagcaggacagtcgggcctgacagctgcaagctcaggagctgagttctgccaggaacccgcatgagctagcagatgcaggaggaggcgcatcctggcgaggatctcactttagcaatccccacccctgctggtgccccagacccctccccatcctgcagggctctggatgggtcaacctgcctggcctccaggactagagatcacggcctggacacagcgcagcaacatttcctctcttttccctgaggtggtgacctggccagatgactgaagggctgatagtgaggggctgccagcccagaatgggggcatggggcttcgtaggagctggggcacggcagggttcagccctggatggaaatgctctctgtctccctcccttgtgctgcatttactcctgggctggggccaccctcccttccacctcctgcagatcacagagggacccagagctcaggagaactttcttcctgtgttataaaacaaggtatgccattgaaacatgcctgggtcaaacagaaagctcccaccgggcctggaggagcccctggcaatgtggtcctcattcccgccaccctctgcctagaaggggatctcagagagttgaggggacctctctggttgggaaaaggggagcatccagggagcgccaggagagtcctggaggaacattctgaggtgacacggccccagggctctgtctacggcagggatcagcattgctgacacacaaaatatttattccctgatgatgtggaatttggaatcatcatcagagacttcagtgcagagcaactggaacctcctgagtgtgccctgtctatatatctggtctctggacagggtggccagtccttgtccatgacagggagagcgaggacccctcccctccacacaattggcagacgaggaactaccctcctggggatccagaggcagggcgcccccctagagaggacagctggggagggtcccctcactgtacttcccccacacctccagacaccagctagtgatctgtcctgagatcaaaaccagaatcctagtagatgagctgcatgcttgctgtggacgccctgcgccctgagagtcttgtcctggatcgcacgggtgtgtccacaaatgagacccagcagccctggagcagccccagcgtctctccctactggcaatgcatccgggagcgtggcttgccctccgagtcagttccctcatctctaaaacaggaccacacagatctcagggcgcgttggttgaatgtttacctgtgttgtgtaaaaactatggctactcagcaccacagagaggcaagagagcatgcaggcgtcctgtttgggatcatgggagaccatattcccagcttcctggtactaggtgacactggggggcctgttttacttatggaattcccagcttccctaatggtaggtgacatcttggggcaggatttacttatggaattcccagcttcccagtgttaggtgacactgtggggtggtttttacagatggaatgagaaagaggtaaggtgtgctcctccagatccagaccctaaacacctccctcttgggatcctccacgttctcttcctctctctgttatggaataaaaacaaccgtatgaaagtgtgtcgaaggtgccagagcccttctccctgttgcctgtccagcactgtgatgtgtgtagacctcagctctgctcaaatagtttgaagtgtgtttgtcatggccgtcagcctattctcgctaatcttccattaaatgagatgactgatttaaaaaata

SEQ ID NO: 2009 - DNA, 2651 bp, Homo sapiens
acttattctctctcctgctgcctggcgaagagatgctttccgccatgattttaagtttcctgaggcctccccagccacatggaactatatgaccaacatatgtgctagagtgtctgacggagagaagaatttaatcgatgtctgttgaattcgctcaagtaaataaaacagaaaaactgttttataaacggcaacaaagtgcagtagtcattactagataaaggaagaataagctacgggcccactgaatttccaagcaacttgcagttctgcaaagagtattatcagctgagaggcaaccactatttcactcttcgaatctatgaaattgaccatttttgatatctcatattggaggtttgtggcaaccctgtatcaagtaagtccactgttgccatttttccaacagcacacgctaacttcatgtctctgtcacagtttagtaattcttagaatagtttaatctttttcattattattacatctgttatagtgatcattatatctgatacagtgaatatagtgatatcatactgttatattcagtggtccctgaagctggcagaggttggctcatgaggtgtaaggaaaaaaggcatctctataacataaaagtgcaaggtgaagcagcaagtgctgatgtagaagctgcagcaagttatccagaagatgtagctaagatcactggtgaaggccactataataaacaacagattttcaatgtagagaaaacagccttgtatttgaagacaattttatctaggactttcatagctaaaaaggagaagttattgcctgcttcaaagcttcaaaggacaggctgactttcttcttagtagctaatgcacttggtgactttaagtggaagccagtgctcttttaccattccaaaaatctcagggtccttaagaattatgctaaatctactctgcttatgctctgcaaatgaaccaacaaagcctggatgacagcacatctgtttacagcatggtttactgaatattttgagcccactattgaaacatatgttaaaaaaaaattattgctcactgacaatgtaggtagtcgcccaagagctctgatggagatttacaaggagattaatgtgttttcatgcctgctaacacaacttgcattttgtagcacatggatcaagaactaattgtgactttcaagtcttattaattatttaagaaacacatttggtaagactatagctgctataaattgtgattcctcttactgatctgggaaaacccaactgaaaaccttctagaaagatccacaattctatataccattacaaacattcgtgattcatgggaaaagacaaaaatatcgacattatcgggaatttggaagaagttgatttcaacccttgtggatggctttgaggggttctagcattcagtggaggatgtaacagcagatgtggatgtggtggaaacagcaagagaactagaagtggacactgaagatgggctgaattgctacaatctcatgataaaacttgaacaaatgaggagttgcttcttacggatgagcaaagaaagtggtttcttgagatggaatctactcctggtaaagatgttgtgaacattcttcaagtgacccaaaggatatagaatattagatgaacttatttgataaagcagtgccagggtttgagagaaatgactccaagttttaaaagttctgtgtgggtaaaatgctatcaaatagcactgcatactacagagaaatcttttgtgaaaggaagagtcagtcaatgcagccagcttcattgttgtcctattttaagaaattgccatagccatccaaccctcagcaaccaccactttaatcagtcagcagccatcaacattaaggcaagaccctccaccagcaaaaatacaaagacttgctgaagtcttagatgatcgttagtgtttgttatacattttgtgaattaaagaatagagtattctttaattaaggtatgtactttttttagacaaagtgctatcacacaattaagagactacagtatatagtaaacataacttttatacacaatgggaaaacaaaaaacttgtgtgactcacttaattgcaattttcactctattgtggttgtggtgatctggaaccaaaccctcagcatctttgaggtatgcctgtgtgtgtgcgcacaacttgaccctgagttaactgtcttattcttctcttttatttcttagcaaatttgccatgatttaaaaaagaaaaacagcttatatttatattcctacttcctcattcctcatttacttctcaaccatctgttggcttttgctcatatcactttatgtaagagaggtcatgccaaagctatatacatggttccttgttcctggaggggatatccatttgaaacagatataaatatgtgtggatatatatatatgtatgtatgtatgtatgtatgcaggcttttatatatgtattactgtgtatcacagaactttgttatagcctctgaagttagaaaaacaaacaatataatatgcagttccaagaatattttaatttttatgttagagacaaaattaaatgaaacatcaccacaactgaatgttaactacttaattttcacaattgccttggcattaataaaggttatatgttttcagg

SEQ ID NO: 2010 - DNA, 1585 bp, Homo sapiens
cggccgcacctcctcctccatccggagaccaggcccctgccccgcccgcggctgaggagataaggagaggctgatttgaaaagctgcgaggacgcgcattttaacctccagggacggcttgagccccgccctgcctttcgaaagtgctgggaacggattttatcagcaggcgaaactgtcctcaaagctccgtggcccagcaaaaggcagggcggggacgcccatggcccccgggccggccccctacgggctcagcctccgagtccccggactggacggcgcgggcgtcgggggtccaggctgctccggccgccccgctgtgagcccgagctgcgctgcagccgctggtcacgtatgggggtcccccgcgtcctttcctccaggccggcagtgggctggggccgcaagtgtccccgcgtacactggccgtcccccagggacaaggacagttgccctgaaaagctgcggctcccgccagaaggtcccagctcgggctgccccgggcagacgcagagcgaaaggcgaggcaggacgggcctgaggaacctggaagtccctgcagggcccctggaagaggcaggcagggggctgccccacagacgggcccaggagaggacacgccgggctggcatcacgtgaggagagcgtccagcaaaccacactggtcccgaggcctccacgaaaagtagatgggcatctcgcggcagccaccactgaggcagcaccgggaaagcatggtgggtgcccactggccccgcagagggcaaaggcatgcacacgccagaagggaacgtcaaggggagcaaagagaaccccttcctcctggaatggctgaggggaccaggccgctctgtgatgcagacatctcaaggggctctcccttgcactaccccatgtggactttaactcccaatttggaaagtaatgatgtcatcttctgtggtctcagggtcctagtgagtgtgtgaggataatagtgttacatgttatgcaaagggattgtgaactggcatgggggtcaggtttgcagggcctggagctggtgactccagctctagaacaaccccaggccggctctgccctacccaggagagatggtcataggggaaagagtccagtgggcattggaggcgtaggggccacttagggttgccctttgagctgacagtggggtacagattcagctctgcagtgcccctaacccccactgcggatccacccgggggaatgccctgaggacacgcgaggtgagggtcaggcgtgtcctgctgggtgggaactccggaccctctgggaaggaatgggtgaatcggctgctctcactctccagctcccactcagaggagccctgggggatcccattcctctacctcagaggactcccaggacactgtctgagcccagtgggaggaggacacacagccctgatctgccagtcagtggggctgagggtcaagctgtgcgccttgtgtgctggcggcgtcccgcctgggatggatggagatggtctgtactttcatgggtgaattgtagggcccctgaattgtatgtatctcaataaagctgctaaagaataaatgtaaaa

SEQ ID NO: 2011 - DNA, 457 bp, Homo sapiens
ttagaataacagaatttggtcccctcccacttcctggagaattatccctctgtaggcaagaagaagtctttattctcttcggaagctgctcctcttgcactccaaaatatagttctgatggaagctgccaatcactttatcccattcccagaacaggcatggtaccagactgaggtcaatcctatactccaccttatttgccatggaaaatagcctagcgatacttgcatgactcagggcagttggagtagtttgatggaattttttaaaccacagctgacaggaagtagctctgttccttattagttgcaaatgctgcaagcatatgaccctagagttatctgttgccagttgttgccttgtggagatcataggcttaagatgatgaaggcagcaatcagcaataagcagaggtgtgcttgtgtgtgtgtgtgtgtgtgtgtgtgtgtgtgtgtca

SEQ ID NO: 2012 - DNA, 382 bp, Homo sapiens
aagaagagagaaaacggagcaagctgcagcaaaaataaacggtgaagcgcgacgatgccggccaagaagacccccagttacttaccggcctgcttaccagccattttgaccagaaagagaagcgttgccttctggtcagtcctgtatacagcactaaagctgatgaatgatctatcttacactagccaaagtgaagtctgaaagatgtgaagaaatgcagtacatttgtacattggcacattgccctgcagaggactggcaacactccagaaatgatggagacaggatacatcaacctgtatcactgaagatgatgtggagcagagcctttgtggtcctaagaaacatgtataagataaaaacttttgtggtttttcaatca

SEQ ID NO: 2013 - DNA, 443 bp, Homo sapiens
aggagagaggaacctgcagcttgaggaagttcagagaaaacccagccctttcaccaagctgtgaagaagccaagcagttctcatggaaaaaccacatatatgtatttctgccaagaggcccagccaagatcccagcaacagccagcatcaactaccagacataaaccggccgggtggaggatgcagccgggcgtggtggctacaaggaagtgccctggtgttaagaactcagcctctgaaacccgccgcccagcttcgagtcagcgacgtacttttgttgtcccggccttagtatccccgctgcaataagaggtactcagctcaaaccatctgggtgaggattaaaggagttcatatccataaaggactagaacaggtcctggcaccacgtaaacattcttatcatcaaatgtgaaaaaacaaagttctctaagatttcgaaa

SEQ ID NO: 2014 - DNA, 278 bp, Homo sapiens
ctttcagcgcctgcaggttccgggaggtcagctcccagccgaggacgtcggatgtcatcgtccttgctgctttgccaccccattcccgtcaataaagtggtttgaacccaaccctggtgtcggtgtgtgtcgttggcgacgcgctgtctttgagcccccgccgagcttcctcgtggcgccgggggtcaatctgcagcgctagagcatgtgcttgcgcataactggggccgcctggcctcccgcgggcggcctttttaaccgcgagcgacaagaagtaa

SEQ ID NO: 2015 - DNA, 750 bp, Homo sapiens
ctgcagctgggcctggaggcagtggctctacagcagcagtgagagccgagctgtggcagacacatgctcttcccctgactcacggctgcccagttccctccagcgaggctgctgacctatttttctattaggaacaaccagccaatgtgataatgaggaaaatgtattctggcccctatgaagtttagtgaagcccgaatgaagtggaggaggccacggagatgcacgaggaagagcattccaggcagagggaacagcgaggacaaaagcccccgggcaggaatgggtgtgcaagcctgagatccaacatggcggagagcaagccggaagtgctgcgcggggatcctaagggagcactgaacaggacaagctcagttttgtccctcaaacctccacaatcagctattttacataaggaaagtgggtggtgattaacctcagagtctccagggacagactatccaggactgtgcctgaaatagaagaggaattaacatcatacagaactgaatacggtgactgaggggagtttgtgtctccccttttaggaaagaagatgagaataagtatgaaggagagtcatgtactgtacattaagcaaaagcatgatgctgttatttgaaatgttaattagaggtgcccactaaaaactgctcagcaattttcttggagacctcagtgctcatgttattctttcctctatcttatgttttcctctctcctgcccttttcagaaacagtctacagcag

SEQ ID NO: 2016 - DNA, 439 bp, Homo sapiens
ccagaaaagggtccatccacaaggagagaaacgtggaaagggcagaggcttcaccctacctttacagccacacttcttgcaggtagtgttcaagacagcctcaagggtgatcttctgcccagtgtaatcctggaaggatcgcctccgcctctcttcttgcctataatgaaaaagataccgactgccggcccccttaagagatatggccagagatactacaaggatgacatatgagttcgatggaccagacctgggcacaagaagaagaaataacgtaaagcagagggcatatctggtatttatactctaaactggataagaaggtagctctctcctggataaacatgaccagtctagaagcgttagcagtgaaaaactggaaacaacttaaaatgattatgtggtacatctgaatgacagaataaagccattaaatgtt

SEQ ID NO: 2017 - DNA, 3249 bp, Homo sapiens
tatgttgatgaagcctccggatggcaggcttcagagagaatagatgtgcatgtctcttataggcccttaaaaggtgtcagagtctccagaaaaagcctaataagggaagcagattctctgcagaatgcacatttcccccatgagagacagctttgcaagggccatttcaacatatgtcaaggaaatatattttgaggtaaaatactttgattccttcggggctactatgtgtcatgtgatgctataccggagtcccgttgaattgggtatcttattgctacagagagtctgttttgtcagtctaggatctctgtttttattttaatgttggtcagttgtgtctaaattccagagcggggcaggtataatggggcatcccgagccctccttcccattcatggcctgaactggtttttcaggtttctttgggtcccggtggctgcaaggggatgcactcagttggctgggggacttagaattttagttttggtttacagcaggatttgatgggcatgcatatttatcaatgtgaaagtgttgtctgtgggcggcggagggcttgggccgtgtccaggccacgcactgcaagggtgcagcccccacacacggtccctgctcctaaagctgttgcccccactgcaagagtggagtaggttgaggtgtagccatgacattctggaaactacattttttgtaatagtcattttgaaaataaaacatttgaaaatactgtgcagcaaaaacttgaataattggaataaaaatgttcagtttaatgtcattgcttgctgccaccgttttctgattgtaaaactaacgtgattattaggtactattttggtaatgtagaaaactttaaagatgaaaatagatatcacttataactccacatggagaaatagttgcccctccaatttaattgatttacttttgggccacaggggcccagaatttgattcattgtactccttggttcatgccagtgttcctgcacccagcactgaagctgaacattgacagtgatttgcccctgccccagagtcctccctgcattcccctcgagggcccccgtctcctggccctggtgtccacttttctctcagctgctgggaacgtgttagtgtgcactgttctcctttccctcacctgctggcttcatgttagcatgcaccgttctgctcactttcttcccctcacctgccgggatcatcttagcatgcaccattctgctcactttcttcctctcacctgccaggatcatgtaagcgtgcaccgttctccacactttcttcctctcacctgccgggatcacgttagcatgcaccattctgcacacttccttcccctcatctgccagggtcatcttagcatgcaccattctgctcacttcaccttcttcttctcgcctgctgggatcatgttagtgtgcactgttctgcacactttcttcctctcccctgctgggatcatgttagtgtgcaccgttctgcacactttcttcctctcacctgctgggatcatcttagcatgcaccattctgctcactttcttcctgtcacctgctgggatcatgttggcgtgcaccattctgcacactttcttcctctcgcctgctgggatcatgttagcgtgcacagttctgcatacttgcttcccctcacctgccaggaacaggttagtgttccccattctgcacactttcttcctctcacctgccgggatcatgttagcgtacaccattctgcacactttcttcctctgtgtacgtgtgtgtggttttcctttcagaaatgggtcatactctgtggacatctttttccacttaaagtgatggcacagccattttcccagtcaagtaacatgaatgtacaagtttagcaaacttcctcctgagagatggagagatcaaggcttctgctccgtggcagccatccgtgcacatgcatcactgtgcgtgagttggtcccagtggcttgctgagacatgctctgcacaggggagatttcttataccagcagtgtgggaggcagtggggcaggtagagccacaagtggggatgagggagcagagtctagggcaggctcctggatggacaccagctacactgtctattggatgtgggacttccctcactgatgaaatgaataagagaatcttcctcatcctgctgttgttggcgttaaaacgggttaatgcatgaaagcaacaaagcccggcctgcagacagcacatggtaagtctcctcttcccagcatgttcaacaggaagccctcattccctctagaatgtaggagtcttgccagcagtggcctgtttgttctctgcctgttgccgacctgatgagaacataaaattggtgtcttctgtatagatttccttcttattgcccctactgtggctgaacataccttcccccgtgcttgaagtctgttcatatatgttctgctgtgataactgcccattcttgttctctatctaagaaggcatttagttttgaaaatattttgttggcttgtaagatatttgtacatattaagcacagcaaacctgtaacatattcactgtaaatcattattcctcatgcatcatttgccatttaactgtatttttttcctttttgatgtaacctgctatagtttacatttttaaatcagaaatgcctgcacattttaaaacgaagactcttatgctctagcctttgaggtcatgcttggaaagtcctttctcacacaaagattatttacactttcatctctttttctctgagtacgtttcagtgtttaattgaccaggaatgtatttcgaggtgtgatatgagacaaggatctgaaatgctttgcccactgaatcatcatgcactgaccgaaatgccacctgtatgagtgctaaaatcattgtcgctggacctgtgtctgcactgtttaattttagtgttgtttctcacatcagcttctgttgttttcatggttgtggttctcatacttttaatatctgttggagcaaataaagcctcgtttctcatcttttccaaaaatgtcttatgtatgtgaactttggtgttatttgtcaagtctgggcattctcccacccccatattaaagaatgctctctggagtttgtctggaggttttgtttaacttttagattcacatcaggagaatctttgtcttcatggtaagtggtcttcccatctaagactatttcttcaagctgtttgtaataaaaagctgtgtgatttttgtatgttta

SEQ ID NO: 2018 - DNA, 1138 bp, Homo sapiens
cccaagaagcaatgtaaagtttgaaacgagccgagcgcggtggctcacgcctgtaatcccagcactttgggaggccgaggctggcgaatcatttgagtagagacggggtttcaccgtgttagccgggatccatctcctgacttcgtgatccgcccgcttcggcctcccaaagtgctgagattacagacgtgagccaccgcgccctgcctatattaggtttttaaatagcaggaggcaaagcttttcggtgtgatcctgacttcacttggggaaaaagggcagacacagggtctcactgtgttggccaggctggagtgcggcagtctggaactcctgggcccaagtgatcctccaatcagcctcacaaagcactggaattacaggtagctcagagagctgcgctggaggagaaaagccagtcctggcaggagctctggtacctgggaagctggatggagagcctgggccagaatcccggacccctcacctctgcggcctagctttgtgaccttggcaaatccattctatgcacctccatttcctgtacagtggggatccttatttctctggcacagattggtatttgttctgtaaagcccagtaccactttattttattttagttattgatttttttgagacagggcctcactctgttgccaaggctggaatgcagtggcgagatcatagctcactgcagcctcaaactcctgggctcaggccatcctcctgcctcggcctcctgagtagctgggacgacaggcgtgcaccactgcgcctagctccagtaccatgtttaaacggtgctcagaaaacgtgctaaacttggtggatgggaattgaaaagagatttaatgttttaaaaatcaaagtcactcagctgcagtgccacatgggaaggaggcctggatgtgaatgttcctgggagctgagagctcctgtgactgtcgccagtttcctgtggtctcccacagactcaggacatctccctctgctccaggacacctcaggaccaccagagggcactcatcgcaccttcacccctggaagggagctggtcctggggccaaaacccactgtgcctgggaagcccttcctggcttctgctctcctcaatgtatgacagccctgatttaccc

SEQ ID NO: 2019 - DNA, 365 bp, Homo sapiens
aaactcgtgacgtccccgcgtgacctcaccgctgcggggcgatggagcgaaaagtgaggaaactgaagtcccgggagagacagtggcaaggtcaagtagcaaagtgcactcagccctcccagcaaggagtctgccactcgcgcttgaaggacgtgtttgaagagctgctttcccagtgggatgctgccttaaagtcttgattccctggcactctttcctattactacattttatcggtgctgtttgtgttatgcaacggtagcatcgtgtctccggaagataaaaaaggtctcgatacaaacatccataaccttccacccactccgtcaggaacaacccaatcaaaataaagtcatgagaattta

SEQ ID NO: 2020 - DNA, 1699 bp, Homo sapiens
ctcaagatggctgtgcctgtcagctgcatggagcttcgttcaagtattttctgagcctgatggatttacagtgatcttcagtggtctggggaataacgctggtggaaccatgcactggaatgacacacgcccggcacatttcaggatactaaaagtggttttaagggaggctgtggctgaatgcctcatggattcttacagcttggatgtccatgggggacgaaggactgcagctggctgagagggttgagatctctgtttacttagatctctgccaacttcctttgggtctccctatggaatgtaagaccccgactcttcctggtgaagcatctgatgcacgttccatccggcgctcagctgggcttgagctgaccatactccctggagccttctcccgaggtgcgcgggtgaccttggcacatacagccatcatgatggtactttaagtggaggctgaatcatctcccctttgagctgcttggcacgtggctcccttggtgttccccttttactgccaggacactgagatttggagagagtctcactctgtggtccaggctgaagtacagtggcatgatcccaggtcactgcaacccccacctcccgggttcaagtgatcctcctgcctcagcctcccgagtagctggtattacaggcgtgtgccacaaagcctggctaagttttgtatttttagtagagacggggtttcaccatgttggccaggttggtctcgaactcctgacctcaagtgatccactcactttggcctttcaacgtgctgggattacaggcgagagtcaccgcacccggacgactctgacatttttgaagagtccagaatcctgttacacctgggatttaggcactttcaatctgaaaaaatacatatcctttcagcactctggacggacttgagaactgtccttacgtgacctaaagctggagtattttgagattggagaattaagagccagtcttggtgctctgtgttcacctggttcatctgaggagctgcatctaccctgcccatgccatagatcctgccctgtttgcttctcctgttgctgctagtggacatgagaaggacagaataacgggctcccagattcacaagccccaccaagaggatcaccccaggaacgcttggaggctgaggagttcactgaggctactgcatcttgagactcaggatgaagacccagcttggggctgtcaaagaggcctgaagaggcagaacaccccagaggagcctggggccaccacccagcatcactgtgggaaaacggcagcaggaaatgtcctctcgcctgcgtgctccacctcggtccacgccttccctccttctggaagccttgcctgaccactggcctgccccttctatgggaatcactactgaccttgcagcttattatagacttatatgttttttgcatgtctgacacccatgactccacctggaccttatggctccacccagaagcaattcagcccaacaggaggacagcttcaacccattacgatttcatctctgccccaaccactcagcagcaagcacctgttacctgtccacccccaccccttcccccaaactgcctttgaaaaatccctaacctatgagctttgaataagatgagtacgaacttcatcgcccacgtggcgtggccggcctcgtgtctattaaattctttttctacta

SEQ ID NO: 2021 - DNA, 568 bp, Homo sapiens
agcagacagttacagctcccactaggacactgccttctcagcggcttcagttatcagatattcctggacatactttccaagccatgaaaaataaccagagccacagctttcccagcactctgacaaacatccatgagcccccaaagaccgggaagtaatgatgatgcagctgcggcaccatagaagaaacaagtgatttcagtcaaagggcctggactcacgagctagcaactttggacagattcttgaactctcagcctcagtttctgcttctgtaaagggagataactacagtgaccttcaggttatcttgaagatgccaatgagctagtgaaaatgcaatttaatctgtacagaactaaacaaatgtaagtcagtgctaatattctgttcctagtggggacatgccaagtctctttactgcaaccagtggttcacatatggaaatattgtgctaatttccaactcctacttatatatatgatttgttaactctggaggatgcagccatcagcataagcaaccaacagaagaacacgctggatcctctccttttcctgacagtgtg

SEQ ID NO: 2022 - DNA, 1114 bp, Homo sapiens
catctgcgtcagcctcccaaagtgctgggattacaggtgtgagccaccacacccagacattcatctttatttttaaaggacatttttactgaacataaaattctctgagttggcagttttttctttcagcaatcttaagatgtttatgccttctggcttcaacagttggagcaagaagattgctgtaattcttatcttggttcctctggatatttttaaggttttctttctatcagcaatttgattacgatgtgcctcataaggatttatttgtgtttatcctgcttggggtttattgagctttgtggacttgtacatttatagttgtcactacagttggaaatttttaagccattatttctttaaatacgtttctatctcaagaagtacagttatctccaaatgagcgtcatctacatgtccacaactctgatcagaccactcttagagccagtaatgattattttaatacctaccatactttgtgtatatttactcctcagtaaatatttgtagagctgcacatagggaatttctttaacacctttaaagtttatttatttaaataagaaatacatgcccatggtaaatatttcaaatagtacaaaaatatttcaaatagtacaaaaaaggaggtattctgtgaaaagtaagtctttgtttcaccaaagataccaatccctgccccctccccgtcctaaggccatcactgttagcatttccttttttctcctcccaaaattgtctgtgcatgttcaagtatatatggatatatatccttgtgctagcatactatatacactgttctgcatctttttaaagtttaataatcttggcgatcattctatatcagtacatataaagtgggctttttatgaatggcctaacattacatcatacagatgtatcataatttaattaagtggtgccctgttggtggatattcaagtcgtctggtcttttgctattgcaaataatgttgcagtaaagtaaaatgtaaaataaaagtaaatgtcttacttacttaaaaacctattttaaaagtaaatgatggactttaggaggttaagaattaaaaattaataaacatataaataaatgaggtactctagca

SEQ ID NO: 2023 - DNA, 527 bp, Homo sapiens
acaaccacgtgtcccctcatgggtgctaccagagtccctccccagcctgagactcctgaagccccagactcagggattttctttccactaagctctgatgaggaaactgaggctgggagaggcagccacacagctagagtgaatggtgaactggactaggaacatgggtgggcgtgtttcccacactgccccacagtgacacagcgggggcggggacagcccttaaaatccgatcctccgcgaacaccttgaatcctcaaacctccatccatccaaaaggggctccgccttggggaggcccttcgcacacttctctacaatttgaggggccgtcggctgcaataaccacatagtggggccactacaagtcaacagaagcagaccctctctccaaaaacacagcagaccctgtctccaacacagactaggcctagttccgacttccagaatgccgtggtccagccctggcattgctgactcatggggtcaggctggcgttgctcctctgtggggctggaggggcccca

SEQ ID NO: 2024 - DNA, 638 bp, Homo sapiens
cggaagaggcggggccaccggagtgcctaagagctgtcttccgatgtcgctcttcctttcccgcgcgaccggcgagggaggaagaagcgcgaagagccgttagtcatgccggtgtggtggcggcggcggagactgcgggcccgtagctgggctctgcgaggtgcaagaaagcctttgaggtgaaggtgtatgaaagtcatcataacagatgttttccaaaaacttgtagaaggttgtgaaaaaactactaggatcacgcggcatgtattgagcatataggttgctgtagatgaatgttcttagctgtcatgtttaaaaatacttctgcttcgttacctcaagtgtggcatgcagcattttggaaggaaaattgaagacgtgttcaagaaaacatgaacagaagcaaatgatgaaaatgagcattttacttgatgttgataacatcacaataaattatggagaaaaatacatatttggctaacttttaattgctgaacaataaagtgttttcttttaaatcaactctaaatagctccattctcatagtcactagtcagacctgttttgaacatattcgaaagattataatcttgtcaataattagcttatttatgggtggtgattctcattgaggctga

SEQ ID NO: 2025 - DNA, 746 bp, Homo sapiens
cgtatcaggaacaacaccaaatcagaggtgacttgtgccccatcagagactttaacaccccaaccagatgggaatttcaggacccaagaaatagaaagtggctgcagggttacaactactgttggattcctgaggtagcacagtgtccaaacaggatttcagcactacccgtattgcttagagccccagccaaagatgtgaggttttgccctttggagaatctgtgcccctgaactcgggggcctctttccacatcttgggggcaggcaagggcagagggtgtgcctaggcctgcggatcagcatgcgacagattccccaacatccttccagcttgaaaggggattgccctgcttctatttagaacctataggaaagcagaagttctagattgaagttaaaattgattcccagcctccaggggctttgggctacacctggatgaccttaattgaccctaagcatgggacaaaccacttcctgagagtattaggatggtatacatcttctctgggggcaaagcaacaagatttatttttcatcatggaccaaacacatggatacccactagaaactgtgtagtgaattttgttaaccctgacatagggaccatggtctttaggttaaagcataataacaacataatacataacatatatagcgaatatatatatgtattatatgcaatgaatgtaaatatgattatacccatcatggtcttggaggaaacagatgacacacttaaaa

SEQ ID NO: 2026 - DNA, 1433 bp, Homo sapiens
tttagacggagtctggctctgtcgcccaggctggagtgcaatggcgcgatctcggctcactgcaagctccgcctcccgggttcatgccattctccttcctcagcctcccgagtagctgggattacaggcgcctgccaccatgcccagctaatttttgtatttttagtagagacggggtttcaccatgttggccaggctggtctcaaactcctgacctcaggtgatctgcctgccctcggactcccaaagtgctgggattacaggcgtgagccaccgagcctggcctaaaacttctttcaatggcactgacctttctgtgttgtcactcagtcataataaaatcccaggtacaatcagaatgctgcattctccagccataaagatcgctccctcttttcaaacatccctgtccctcaaggcctagctcaagacggtcaccttaagaaaagctccctttgtcgagcagtgactccataccaggccctgctttaaacgctttatctgcattatcttacttgattctcgcaatagccctgggtggtaggtgcaattattatctccagtttataaaagaagatactgagggtcagagaagttaagtgactggctcaaggtgtcacattcagtaagcgttgaaggggtctgtgttggtctgtccttgaagatgccccctacgactacactttcaatgatttctgccttgaacctggccccatgactaaaaacctcacgtcaaactcaggcagcaataacgggaaggcttggtgcctcccatcactggagcaactagtctagctggtcactaagtggacagcccctctgtttccctgcagtaactaattagcagaatagcacaaagataaaacccgaaggcctttgtgcagaagtttcagagacataagcaaagtgagagcattaggttctgcatatctttcttgttgttgttgttgagacagagtctcgctctgttgcccaggctggagtgcagtggcacgatcttggctcactgcaacctccgcctcccggcttcaagtgattattctgcctcagcttcccaagtaactgggactacaggcgtgcgccaccactcctggctaatttttgtatttttagtagagacagggtttcaccatataggccaggctggtctcaaagtcctcaactcgtgatccacccgccttagcctcacaaagtgctgggattacaggtgtgagccactgcacccagtcacatgtcgtattttaaaagggatttaaaagtatcattggattgtttgtaacacgaaggataaatgcttgaggggatggatacccattctccagcatgtcatgattacacattgcatgcctgtatcaaaacacctcatgtaccccataaatatatacacctactatgtaccacaaaaattaaaataaatggtgggtgagaagaaa

SEQ ID NO: 2027 - DNA, 347 bp, Homo sapiens
tgggttgcttcactggttttgcttcttagctctccagttacgtgttacaaattccctaattaatttcctctgcttaaaatacctagagaggagaggtttctgcttcctggctgggtcttgattgattcactgatcacaggtatggagtaagacttggacagtcagagcataggttgtcaactgttccagatattaaccaaggtcaagtgaagcactctcctctccaagaaatttcagcatggagagaaagaaagttttaccaccaatttgtgcctgaaacacaagatgaacagacgtcttctgcattaaaaaaggacataggcatgcattaaatcccttatgtctta

SEQ ID NO: 2028 - DNA, 847 bp, Homo sapiens
tgcagtgagctgagatcttgccattgcactccagcctgggcaacagagtgagactctgtctcaaaaaaagagaaatacatttaaccaaagagatgcaatacgtatacattgacaattttaaaatactgctcaaagaaataacaaaagacctaaatgaggaaaaagtcatcccagtatcataaatcaaaaggcttaaaattagttatctccctctagggaacctagactaatacactcaccccgtctccttgttcggaggctctcctgcctatcagctgttctcctctgtgctttccatgtccctgtggttctctggtgagccccatcatgctgtcctagaagatccacttagaatttcggtatttactcaccattttgactcctcttaacgagacaggcacatgccagctgtttccattcatccaacctgaacctgagcccccgatcattttttctaccacttttcagtcctgggaaactcagtcccaatgtgcttgtcattcatttgagaataattttcattttctccagtagttttaaaattactttgtatctattctagatatcgtttgctctatcatagttaagacattaatgttatttatgaatttgtgcacattaaactcatgatctttcatttctgtaaaaatgtcaactatttcctttgcaagtatttattgactaacatactccttatttccttcattctgaaagtgtgacacatagagatatatctgtttcctcttctcactctattctttgtgtgcattaattatcttttctatttttttcatttctagtttttctccgatgactaatgaaaaatttaataaatattctacaccaa

SEQ ID NO: 2029 - DNA, 640 bp, Homo sapiens
ggagggtcttccaacggcggcgaccttcgcctggacagcggtatcctgcgggcgaccatgggccgaacggccgggactccaagcttacctcggacacgaacgccgcgccagtctccaagccaagctatacaagaagaagcatggcaccagcatctgcttctggtgagcagctcaggctgcttccattcctggtggaagggaaaggggagctgacttgtgcagagatcacttccaagagggaaatcaagagagagaggtaggaggtgccaggctctttttaacgtccagttatcttgggagctaatagagtaagaactcactgatacctactacccccatcctccatctcttcgtgaagagtctgcccccatgatccatacacctcccattaggccccccctttaacactgaggatcacatttcaacctgagatttggaggggccaaacaaaccatatccaaactatagaagtggcaaattgacaacatctacttattcgttcaaaagaaatagggtgaaaacatgagatgatccatggatgtttcagcttttctgtgactgaccctgcatactgaaaagcaataaattccttgctaacttaaataaagtaatggcagatatgcctaaggccacaaatcta

SEQ ID NO: 2030 - DNA, 2941 bp, Homo sapiens
aggaaggaaggaaggaaggaagctaagcaatataaccctgtggcaacatttgtaaaagtgactctgagaagacagaaagatcctctatgagagactggtgtccccaggaattggcgaggcctgctgaggatcatttgggtaaatgtcatggtcacgcggccccattctcttcgctgagctccggatttccgtagccaattgtctgctggacattcctccctgatacatctcacagaggctgtggacaggagcaccgagagccacttcctggagcatgctccccacccccgcagcctgtggcttcagcctctgcttctgcagacagcggtggaggaagtcaggactgtcccttctgacctgaacacctacctccaagtcctccctgtcgccacagagacccggcaatgcaagtgagtcctgtttgacctcgtcaatcatcgcagactgtaaaggtgactcggatgctcaagaaacgagcatacccagcagtgggccccagacttctcgcaggcccaggtcctcctgggtgcacagagacctaccagacaacggtccggctgcactggtgttgtgagatgcctgtgtcagaagacactgagttcctcactcgcctcctatcatgccgatgatcacaggagaaagagcagggcacatgcatgccagcatgctgaagggaggccaaaacccatgcttgaaaaccacaggtcctgttctaggagcaggagatatatttagccaagcaggatgtttgtgggtaaaccaacattttgctgtaaataaaattctgcaaactcgggactttgagaattgcagaagcttactttgcctgcgtattggcaagagagctattttcctaacacaagctcaccatgaccctcattcagagatgcgcttgacgccgagggtggtgccttttcgctaaggggtgctgtcaggggattgagtaggagcctgaagagctaggagtatcttctccctgggcagaccagcaggcagaccctgtcccttcacactacagtggcacgtgatgggccccactgcccacctggttctggtgtccaggctgaagtcctcgtgtgacactccaaactgttctggcaaggaaggctcacgggttctgacctacactctgaaactgaccagtagtgataaactccgcatggacttcagccatcattgcgtacgtaagaaatacgtgttgcacacagagtgcttctctacattcccaggtttgccactccccgacttttgctgaagcaggtttctactccatcagtcccacagatgtgttcacagggccagcactgagtgtggtgctggggaaggcatgtgcttggaggcagccctgtgagatggcacagcctaggggaggagtcgtggtggggaagaccctggccacgcatgatagaggaagcgtggccacacagtctttgctgtccctgccacagcatggtgctgtaagtctcctccttccgagtctgtgcagacttatgtgacacatttgacccaacagaaatgcagcatttgtggtgtgtgaaagttccagaccaggccacagcgagctccgtggcttcggctgtgtctcctggagcacttgctctcaggaccccctctctcagagcccaggcaccacgccgtgagagagccccagccacagagacaggctacgtgtaggtgctttcatcaaagtgccacctgtgcctccccgcagcagtgtcaggccaccagcttggacaggcagctccagcctccagtggaggcttcagaggacagcatcaaacagcatccacaaaggagacccaccttgtgaaaagcgcctagccaagccctgcccaaatccctggcctgtgcaattgtgagcaaagcaattcaatttggagtggttttatgctgcagtaggtgaccaaagcactatggaagtgaatatcaggagcccctcactgggatgtcagaagacattcaaggaaggtttcctggaagatttagtacctcaggtggtacaggagaaggtgagatggagagaaagcaaccccagtctgaagacgcagtggtaagaaagggtcattcccctgggcatgtgtggtctgctgggggatgacagccgaggtgaacttgaagcagaggacactcagacaagctgcactctgaatcccgctacgctgaccgcagcacttgctgaagaagccgcctcgccacgcccaagccctgcagagggaaggactgaggaaggcagctcagaggcctcaggcagccacagtgtgcatgcttgtctatgactcacagctacgacgtggcctgtgctgctgcagctgctgataagcctcaaacctcatataccactctcttccgaggattttttaaatacacaaaactgggagtgagaggggtatttaattcccctactaacacatgttgggcgcagctggagcagccaggcccactgtagctgggaagatgcggtgccttgaggtgcaggcactgctcactgccacatgtgagcacaggttctgagggtgaaaggtccctggtatctggccagagtgttagactctggaacataagaagcccccgaggtggtggagaaggtctagccaggctccagactggcttcacagaggtaatgctttttggtttgaaatccgtaagagcgcactacaacttcagggcaagctccaacagtgcttctcaaactttaatgagcacccaaatcatcagggggcgcgggggcagtgggtcgcttactaaaatgaagattctgcatcaggaggtctggggcggtgacacgattctgtgtttctaacacgttcctgggtgaggctgaagccactagtccatgaagcacactttgagtagcaagaatgtggaggaactgtcccaggatgggccatgatttacctgaattctcacagtggcttagacaatggagaccttgtccacaact

SEQ ID NO: 2031 - DNA, 571 bp, Homo sapiens
aatgcatttttggagatccacaccaatttattctgtactcagcctatagaatgtaaaataagatcttaaatatagccaggaaaaagccaaacttcctcagagaaatgaatattctattgattccaagggcagaaatggttcatcatataaggatcaatgatcataatgagctgtgaaggtcaaacttggccaaccatagcgggatgtgcattaaaaagatcagaatgctttgacgcagcgtggagtcagagaaagtgcttggaactggaaatcaagatacatgagtcatcgttccagttatgcctcttcctatttggccttgagcaagtcacttccctgcatgagcctttcttcctttgctctgtgaaatgagggcactagagaaggtggtcccttatgtaccagtgtgggctaaaggtctactggtacttataataggaaaaagaaagaaggcagagatcctgttctgacatttaagaatgaacaagaagcccagaagtttcccagaatgggaaagagaaatttgattaaagacaggatgcatcattgaaggcaaagtaactgtgcctct

SEQ ID NO: 2032 - DNA, 639 bp, Homo sapiens
aattttttttttctcagttgtcaccacagtcggcctcacttcaacaacagcaggcagtgttggctggtgtctctgatgaggaaagtgaagcctagaaataaggaattcacttcaaaggcaccttgtacgaatttcatacttgaaatccagtttggctgaaataaaagcctgtgatttttttcataacaactaagtataatggataaaatttggttaattaaagatttttttaggccaggcgtggtggctcacttctgtaatcccaacactttgggaggccaagtgatctgcccacctcggccctgcaaagtgctgggattacaggcatgagccatcatgcccagtcttcaatcatctctttaaagaccctagttccaaataaagttacattctcatttaccaggggctaggacttcaacatatgaatttgggggaggcacacttcagcccatgacagacacaactggatattagatgatgttatggaattcttggtacttttttcaggtatcataatggcttgtggttctgtaggaagatgtcatggggggatgcatgatgaaatatgttgggatgaggagtgatagagaattgcacattaatttcaaaggttccataccagcagaagtgtttgtgggg

SEQ ID NO: 2033 - DNA, 2475 bp, Homo sapiens
gtcggcgccattttgtctcggcagcggtggccgtagctccatcgcattttatgtttctggcgagaagggaacggagttttcatcaggtagattggtttttgtgcggccgtcctccaccgtttcctccaggacagcacctagtcgtggccggaggagtctcagagctgtcagaaagaataagactgattttatgggaaaattaagcagatgctccagtttgagaaacctggatctgcgatctgtttgtgagtggtattcagttaagagaacaattatttcgtataagccacatcagagacgactgaagatgaaaaaactaccatccccgtatataactaatttgtgctgtgcaccaacaagaacctgctttaaatttccatggcaatttacaacccccatactgtaccaggcaaggtaccagcatcaagatgatttatggtaataagatataaaaccaaggaaaataacctaaagtctgaaaaagaccagaatcgaagtttcctgattcatattttaatgttttgaaatttatactccaggctgggtgcagtggcttgtgcctgtaatcccagcactttgggaggccgaggcggccggattgcctgaagtcagaagttcgagaccagcctgaccaacatggtgaaaccctgtctctacttaaaaatacaaaagagctgggcatggaggtggtgcgcgcctgtaaccctagctactcgggaggctgaggcctaagaatctcttgaacccaggaggcagaggttgtagtgagccgggatcacgccactgcactctagcctgggcgacagagagagagactgtctaaaaaaggaaaagaaaaaaatttatacgccaaaaaagatattctgagataacctgtagttaccactaactttgtgacaaaattataaaaatccacagccatctatgaatctgtaggcagacctgaagtttgaacgactggtgaagacatctgattttctttatagccaagttaggataacaaaatgcaaacaagtcattaatatttactatatgcaagatacagaaagatgaaggaaggagtaagaagttatccttcgtggaactattcaaagcaaaaatgcaaaataccagggaaagctttgaagaaccaagatttgagcaggttcttagaatatagattggattggatttgatttcaagaaagatgaacgtgtaaagcagaagtgggaagccaaaaacttttttccaaattagaattaagcattctttcaatgaacatttggaaatcaaggtagaaaaatatccctagggcctagctgaggagtctgtatgttgttgggttttgatagtaaccagtccaagattttgttattagacgtgggtttctgaatagacaggcatttctgaacagacatgacaggatcaaaacaatgtttgagcaaactgcccttcatctactgtggatatgttgggggatgatggaatatagtgaaagataatgggtgctcatacagcagtctagacttaaggtgattcaactactatatattaaactagattatcttttattttttaattttgaaatctggatgctcaagctctgcctgcacaaccacatgaggaagaaggaacaatgacaacaaaaataacactaaatttaaatttaagagtactacttttaggaaatagacaaaccattatttgggtacaactaaaggcaactggcatggactcaaatattttggggaagaaaaagactaaaagttctaaggaagaaaatgcgaaccttgatagtttgaaatagttaaaaagacagtgtagaaactgcttaggcagtttgattatggactattagatgatacttgggtctgataatggtataaggagaataaagtatttagggatccaatattacgcctgcagctttttccaaatagttcatgggggagggggatgtgtaagtggttaactgaagtctaactagataggtttgttgtaagcttaggatgtttacagttcttcatgttaagttgagcgtgatgggaagggaaagaatgctgatctttaaatttttgtccttagttaagttctgtatttagtgaattaattgcatcctaaaaagtcaaacttgaaaagcacattttaaatggcaaatctattttttacatgtttgtgaagtttttattttttagtaaacagaccatcagaagagaacaatggtacagagcaggggtcagcagatggattttgtaaagcatcaacttgtaaatattttcaagtttattagctgtatggctctggtttctgttccctgttccaaatgttaaagtctactgttgtattctaaaagcagccatggactgaatgtagctgtgttccaataaaacttacacaaaagcaggcagtgggccataatttgcaacacctgattcacagcataattttgtcacaaactgaaagtgttcctcaattaaagtgatttttttttcttga

SEQ ID NO: 2034 - DNA, 451 bp, Homo sapiens
atctcaggccacacaggattccattcatcgaacattcctgagacaacggaattctggcgatggagcacaggatgcttcacagtctacggcaaaggacagaacgttggttgctcgagagcccgtcttaagtctcctatgagcttcaagccaacacaacagagggcaaactccaggctacctgatccctcagcaaagatgcagatggacacagcgttctggccccacgcatctgaagttcgtcttaagatgtgtgaaagcctcagcgcatgagccaattctgtgcagtgctcgacatacagatgagaacactgaggcacgaggcacagcctgtgatctggccaccgcgctcaggaggaggtggttacccgcgggcctgagggcgctgactttttagaatgggcgagtgcagctgtgtcccagtgtcccagtgaccagaacgattactgccttt

SEQ ID NO: 2035 - DNA, 8636 bp, Homo sapiens
caaatgccattgaaaccgctagtcttatttcctttctacttttctttggcactcttactgcctgtaaggagtagaactgttagggcacactgttgctatacagtttaactcccattttcatgttttgtctttcttttcccatttctggggcttacctcctgatacctgcttactttctggaagtagtgggcaagtaagatttggctcttggtttctaatttttaaatttctgaatactgccctagtctgaacttggcctttatagattaatctttgcttcacatttttagtgttgtatttaaactattttataatttaaaaatagattctaatctgaagatacttttcaagaaatattattaactgatgtcatcctcatcccagcagctcatctgttaggaatgaagttgagatgcttctattccatgtttttgtatttgggaaggattcaaagttgaaggtttattgtcgttgggtttttcagatggtgacatgtaaactcaggatagcaaaccctaatgttcacacagtgctctgcctctgcatctcagttgggatagttgctccttttgagtgttttaatcatcgtataactaatcatagtgccaagaagttcataatgtgttatgtagctaatgtcactgaaaaacagtcctaccattttaggtaagaccaaacagagtctctaacccaaggacttgttacacctgacaacctatagtatatttgctttttctcacaaaatgaaaccaattttgccgaaagctagctgggataataggatcatcacaagttgcagtttctataactaaaattagattgaaatctcttctgacctagaacattttacttcaggcattcagcagatttcagaaagaattaccttattttaagttagtttctttgttagtttactgtgtgtctcttattcaataaacaagcagaatttgtgtcctgccctatccatgtcttaaagatgagaagttggatccactgagttagtttcattggggcgggggaaagaactgtaattaaacttgtttaatccttattttgtattgtagctattttttgtaaaagcaacttaaaatcttttaaaaattttatagtgacattagagacaatggtcatacaaattatcacataaacatggacttgaaaaattaggcttttcataaaacacatcacatgtcattgactgctttttagaaatacacttccaaggcagtacatctgtattgctactgaaaagtgccatttcacagaacacagacttctttttgctctttgacatcttgaaaacatctgtttttcttttttaatacaaaactttgtgctcaagacaaatcttacatgaaactctcataaaccatgaaaatgtagctggccttcgggccttaggcatgaaataagcatgaggaacatattcccctaacttctacccccagcccagcaagttatcctttaagaaatctcctaggaattctggagtttgaaaacaattgctctatgttattcctgcttccagtctctaagtaacaagggcatttaaaagcatagtctcttaaggtccactatagtggttctttatttaaggaataactcagctgggtgcagtggctcacgcctgttatcccagcactttgagaggctgaggcaagcagatcacttgaggccaggagttcgagagtctggccaacatggtggaaacccatctctacaaaaaatacaaaaattagccaggtgtggtggcgtgcacctatggtcccagctatttgggaggctgaggcaggagaattgcttgaacctgggaggtggaggttgcagtgagccaagattgtgccgctgcactccagcctgggtgacagagtgagactctgtctcaaaaaaaaaaaaaaaaggaactcatacagctcaatgattcattgatcccaataataaatcgttttaataatgatgaaaacatcctactggggttttcttgttaaaaactttaggacaggcgcagtggctcatgcctgttattccaacacatttgggaggctgaggtgggagaattgcttgaccctaggagttctagacttgcctgggccacatagtaagaccctgtcccagctccctccaacatcgtccccaacccccccccccccaaaaaaaaaaagcgccaggcgcagtagtgagtgcctgtgatcccagctgtgttgggaggctgaggtgggagtatcacctgagccctggaggttgaggctgcaatgagagctgtgatcatgccactgcactccagcctgggcaacagatgagaccctgtgtcacaacaaggaatttttagaaggtgctttttatattactcttcacagagttaaattttcagaggatttagtattattgaactaagtttcataagtgtattttaagcaagtaaatctctaatgtaggaaaatccccaaaatggtagcatttactaatgttttatatggtaatttttgaaaaatatatctgatatttcttcagtaaaaatggtgttgttttaataacttaataagaatgtttaaagattctttaagtctggcttatctagctaatgtgggcctattaaataataggcagacttctgccttccttatattctttagatcttttcaaatactccattccaatatccatcaaaagacttctctttatgccacttattatctatactagtttttaatgttcaattactacaagattataattactgtttttattcatgttcccaagaaaaatacataagattcacacccaacacacttcgaaatttatttcactccctttgactatatgtgattatcaaaaaagtatttttcaagatattaaaaataagtaaaggaaaatgaaatatttttaggacattcaaaatctaatgaagttcagtgtttctttaattgagggcaggcagaggtgggggagaatttcagaaggtagtgaacccaaaggtggattcttggataattctactattctgtactctcatcatcttaacccatctgtttactaccctaaccatagttactaagcagagttttatcataataatatagacagctctcaaagtattgacattcagaggggattacaaatattatttttctatcatattgacctaccatgtccacagtcttccttgaattaccttccagttttactgggctgcatctaccgtttatgtctagtttgactttttctgagttcaccaattgctgctaggaatgtgctggtcactcagcagcacacccacatcacaggggaagattttgaaatacctggacagtctgaacacactgctctgaatacactcaattctaagaagtaccagggaaccgcatcttcttgctgaaatcttgaatttttgtcagcttttttttttactgtggacagtaaagctggaaagatctaaataacccaacaggaaatgcggatgaaagtgcaagagttggtttgtggtcatctggagtccatgtctccaagactgctggaccttcaaattctgcaacttgttagatcatctggatgatagcacaactgttagaagacctagaagaatacagcgttgctatgactcagtggtgttgaatgcagaccatctaccagctggggaaagaatcaattataaacaggaataaagggattcattcctcattttaactgatgttacagtgaagatgggttcttgaactcttggaagcctggatgagccacctaatctgcaagataaaaaccaaagaccaatgcgtattggggaaaagaatgcttagtactgcaagactgttgaatacctgttgaatattcctattgaggttttttcctaaacatacttcagtaacatcttaggacaattcactggagaaatgttgatccctggctggaatgtcataccattgacccatttgaagagttaaagctggatttgactgctctattctaccaggaatattgttagggtagccttttaccagtttctaaacaattgtaatcatttattgactcagcaattcctcagataacaggtcaaaagatgtacagatacattctgaagttttcttgctattaaaggcacaagagtttccttgtattttgactgacaatgtagcatgtttccattttagtttgttagtgatggtggttttccctttgaaagccatttggtatattcaccataacaattagtttaatatgattacataagaaaactatgataaaacccagcaattttagtagttgtgaaaatacgttttttaaatcatgtttaagaagaattgcaagacttgaaaccaaatcctgatgggggaattctgtttaatcctgtttaatctgtttaatttctgtttaatccttagtttcttaacctgcatagcttatcctgtattgtactttttttcttttttaaactcccaaacaagaagcttgaaacttttcctgtattttaaaattgaaatttggtcacagggtatagtcagatttttattaaggtttggtttgacaacctttaaaagaaaggtttacctcgctaatacttcttaataacatgcatcaaatgatattccctatggtgaagtatattctcaaagttatgttatctttcatttttggcatttggtgcttatggacttagtacccaggcaacaaagatctattatgcacctactctcttgtatgttcgctattatttcccaaaaaaaaaaaggggcatatatgcataagaaataaatattagaattattttgtttctcccacaaagcccatgggagatggcccaacaaatgtttaaaaagtaaaagaagctgggcacggtggctcccacctgtaacccccacactttgggaggccatggcgggtggatcacgaggtcaggagtttgagaccagcctggccaacacagtgaaactgtgtctctactataaatacaaaaattagccaggcatggtggcaggcacctatagtcccagctactcaggaggctgaggcaggagaatcgcttgaacccaggaggcagaggttgcggtgagccaagatcatgccactgccctccagcctgggtgacagagcgagactgtctccaaaaaaaaagaaaaaagaactaaaagaaaaggagcagtttatgattgaagaaaacatgacctgggctgaagaagtgaggattgattggagtgggctagaatgagctatagtttctagctcatttgtaaggaggtagacaaaggagcattggtgcctcagagtgggtgtctggtgagaggaaaaacggtgcttaagagattttcaggctattgctgtgggacaggcatattttctccctttgcctttagctgtagataaagtgtggttatgacctgaggcttcttgtattcaaacttggcctagggcctatgtagaggccctagggtctacttgtggtggaggagggaagtatttgtagaatgtgtaggcttgagaagtaaataaagccaaaaaagcatcacttgcttacatttttaaatgagtcacaaaacaatctttctaatgcggccggtaaagaagttttaaaggtctaaggtttctctacagaaattacatgcttctcaggtctttgtttagtaaaataatacagataattatgctttgaatgcatttattattaaagctaaccgttttaatttgtgtcagaaataatttgtgcctatggtaggattaaaattgtattctttagttaaagcaaagcaatctgtttttcattgatttgataaatatgtgaatgcctaatatgttctgcatatgtaaaaatgcagaaacatgctcatttgaattactaataattattttagtatgctgagaggctttgaattcactgtaccactccttcctagagtcattcaaaacagaaaaaattagttttaagtatagattcatgtttttctgttttaaaaagttgagctaatacttttcacaagagacgaaataacatgagccactataattattggctcagttccacccaatttccatattttgggtgtaatttaaaatttttgacttggaattttaactttttttttgttttgattttttaccaggtttctaagcatgaattgaggaacagaagaagcagagcagatgatcggagcagcatttgtttctccccaaatctagaaattttagttcatatgtacactagccagtggttgtggacaaccatttacttggtgtaaagaacttaatttcagtataaactgactctgggcagcattggtgatgctgtatcctgagttgtagcctctgtaattgtgaatattaactgagatagtgaaacatggtgtccggttttctattgcattttttcaagtggaaaagttaactaaatggttgacacacaaaaattggtggagaaattgtgcatatgccaattttttgttaaaaccttttgttttgaactatactgctttgagatctcatttcagaagaacggcatgaacagtcttcagccacagttgtgatggttgttaaatgctcacaattgtgcattcttagggtttttccatccctggggtttgcaagttgttcacttaaaacattcttaaaatggttggcttcttgtctgcaagccagctgatatggtagcaaccaaagattccagtgtttgagcatatgaaagactctgcctgcttaattgtgctagaaataacagcatctaaagtgaagacttaagaaaaacttagtgactactagattatccttaggactctgcattaactctataatgttcttggtattaaaaaaaaagcatatttgtcacagaaatttagttaacatcttacaactgaacatgtatgtatgttgcttagataaatgtaatcactgtaaacatctatatgatctgggattttgtttttattttgaaatgggagcttttttgtttacaagttcattaaaaactaaaaactgtttctgtaaggaaatgagattttttttaaacaacaaaaaatgccttgctgactcactattaaataaaaatctccccaattttttgatagactacttcaagccatttgttacatggtattcctttgcaagtcaatttaggtttcgtgttataacttttcctctttttttaagaaaaatgaaaaaagtaattcttttgtctgaaggggaaaggcattctttcatttttttctttttttttttttttttttatgacttgcaggcacaatatctagtactgcaactgccagaacttggtattgtagctgctgcccgctgactagcagctggactgattttgaataaaaatgaaagcattaaagggtttccctacaaaacatttttctttaaaatacttttgaaatggctataagcagttgactttcacccttggagagcatcacactgtgtgaggttcagtgattgttgaccctccccagcccctcctgcttctttaagttatctgtgtgcgtgcgcttcctctcaatcttctttgcacgctcatttctttttctctgacccatgagaaaggaaaacttactgatgataatttttaaatagtgtaatttattcatttatagcatgtcaggataaattaaaagaacatttgtctggaaatgctgccgggagcctattgtgtaaatgtaggtattttgtaaaataaccttgaaattgtaaattgacacgtgtttggtcagattgtgtcaagtttaatttgttttgttttcttttttcttttttttatttgaaaactactttagcaataattaattccatgattatcacattctgccattaagggatattagtaccgtaatactgaagaaattttattaagtctgaacttctggggtaggcagcttctttgtttcttttctatccacccttgtcggttgaggtatttgtttcttgactaataaaccctttgatacttttagccagaaatcagtctcataaagctatttttgagtatagtttgtgtaaaataaaaatgtttagctttggtaataacttccaagctgaactccctctagcaagatatttttcagtgcttttatttactatgcacttagactatgcactttttctgaaatatttttgtaacacttttttgtatttttgccatttgaaaaggttgtggtgtagttggtctgtaattaagttgcagatttaaaactgctgttagctttgtaaatcaaaatataggtgttttttgtcctggtatatcgtcattccatctgcagctggagctggaatcccattgatcttctagctaccattcattttcttcactgttcacaaaagaagagtgtgaaattcagtgaatgctgttactaatcctgttacgagatgaatctcatttcaccaaaattaaattatgtttttccgctaaaatgatgatacaagttgaagacacatcactctgaaattggaagacctcaccacttaaggctccacagtggcttactcagctgaactctaggttactactctttactttgttcacccattggggggtgcagtttttttaaaatgttgggagatggccattctaactactgttgaatgtctctgttttgggaaggtataacaagaaataaaaaagaatatatatgaagggagagactggttatctcctccca

SEQ ID NO: 2036 - DNA, 666 bp, Homo sapiens
attgggaatggagggaaataaatgactggatggtcgctgctttttaagtttcaaattgacattccagacaagcggtgcctgagcccgtgcctgtcttcagatcttcacagcacagttcctgggaaggtggagccaccagcctctccctgacaagcaaagtggatcagcaaaggctgcagtcaccagcatcttttccaaccttaatgaactgtatcctcaaaagaacactatcagactggctctgccgacttccagttctggaacaagatggttaaactcatttttccctgctctgctcctctaaatacaactaagtaccttggaaactattcagcagacaatgataaagggctctgaaagctagaagaaaaggtgtacttgcaagaaacctcaggacttgagtaacagcaacatggagccacaccggtgagggcagggagagggtgctggttctgagccaactttgcatggaaggcccagcagaccacgctcattacttacagccagcatcatcggggaactccggcacagacctgtagtcagtgccccacagcgccccagccttctctcccgacaggagcggccaggacagggagcagaaggtgactgctgtgctgcctggagctcttctgtccggaggtttagtgaaactagagaaactcagtg

SEQ ID NO: 2037 - DNA, 446 bp, Homo sapiens
ctaagatagtatgagaaagttctgatcttgacagttcacgtaacattcaatcaattataccattgctctatctctaaagttttctttttctccttttctcagtgtcttaccaagaatgaaaggcaacctatgtaaaaactatgggctttctagtataaataaaaactactcatctccagaaaataaacaatgactgctaagatgattgaaaaaagaaaggagaagaaagtagcttgtaaaagcgtgtgaaatgcattcacgttggaatctcctacaggcacttcaggtcttcagactgtaaacattttaagtgtgattgctgtgaatgaaggaaacccagagccatcatgacaagcctaaactcaaaggggactgatttcttctacactgaatgtttcattagtgacagggcccagataataaagaattgtgctcacttcctgtga

SEQ ID NO: 2038 - DNA, 400 bp, Homo sapiens
gcagcccccgcgctccccaataaaggatgcacccaccgagcccgaggactgaaacattgtttaggggaccccaggcactgaagggcgggttcctggagatggacatttggagtgcggtgccaggggcttgggaggattcccgcgtatacgtggtgtgaaagtcagtctttgaatgtagagcagatcaatgtggaatgaggactgaaaggtctgtcaactgaaaaaaaaaacaagaatgaatataaaaaatcacaaattaaataaaccatggtccatccatattaatagacattactcagtgattatacaatataagcttatgggagcaagggagttcctgaatatccttgctgactgtgccgaaatgcaagacctacctaccctctaactctgagccact

SEQ ID NO: 2039 - DNA, 504 bp, Homo sapiens
cacactcaaatcagaaacctgcatccttcccacagagacagcccctgccctttgcattctcaccctgcccccctgccaccagtctgtcccttctagaatatgccatgatcgactcgtatggtcgtggcatttcgaggtgggcattttctgtgagcgtggtgccgagaccccatccagctgtccatgtgttcacagtttgtgccttcctagcccacggttgggttttaccagagtgtgttcgaccagcactcagtagagtacactggggctatttctatctgttgctgttgtgaacaaggttgccaggaatattcctgtgcgagatgtgggtacaagccttttcatgtctaccactgagtcccgtgtgccgtttcgtgagaggctgaggcaccgcttcattccaccgctgagccccgcgtgccgtttcgtgagaggctgaggcaccgctgagccgcgcgtgccgtttttaacttgattataaaatacatttaaagttcacatgca

SEQ ID NO: 2040 - DNA, 509 bp, Homo sapiens
agcaaagcccctggcttgacctggctcccttctgggagggaggaccacgtctcaatttgacagcaggaggctgtaggtcagtggggtgatgacctggccctgggagacctgctctttctctcagcagaaccccataaatccttcaaaaggaaggcatgctacccatcaagctaagaggccagaagaagatctttttataatgtaactcaaaggaggggagaaaagagccagagacccttttagcataatggagcagatgatttttactaaggcgtgcactctcaccagggaaatggcttgattgctgtgtaaatagatgcttgaccttcatcctgccattcatccatatggaccctaaacgctctccagctctatcctaggggacatggaatggaggttttccaaagacattggaacacccctgtagccatagtagctcttttttaaagaggagaggaatctgtagattctttcacatgagggtgggtgagtaaaagttaagcaaacaa

SEQ ID NO: 2041 - DNA, 2049 bp, Homo sapiens
ttctcaatgagcaagagaagatgagggaaggtgctagaagccaggcccaggaaggttcctcaggttaattctcacgtagcaggctgcggatcctcagcaggtttttctcctgtgccgacagcttccttgggtctggatagacagacaactcatcactggctgttcccgcagactggctccgggcctggcccaattgcttctcaagctcttgaacctgaggatggtgtgaagatgaagacataggaagatgaaggggtttgcccaaggtcagagttggcagaccggtggccaaacgtaaactcaggtctcttgaaccccaaggccatgcactatcatctattagcttcttggagtttttccccctttatattggcttcaaggatcccatgggagacactgaagataaaagccactgtgaccctcgaagtccctgggaacaagggtgatatgcttggcaaatggtggaagtcatacaccttctcacatgtttctcagtttgaagggacaaagggaaaagaaccacacctaacttttatacagtgcttcctccatgccaggccctgtgctgagcattttacaagtattgactcaattctcccaacaatcctgtggggtaggcatcgttattatccccattatacagatgaggaaactgaggcacagagctaaaggaacttgcttaaggtcacacagctggtgagtggagagctgggatttgaatctgagcagtgtggctccagagcccctgctgttagctgcttttggtatgctccaaaatattcagacaataaagagggagacaaggctaaatttttattgggtaattaaactttcaaaagactacaagcatctggacaaaactggaaaaagcttacaattacaacagtcacgcaaatctacataaactaagaaaaaaaaaagatgcctggagtaaaataaatcaaaccaaaggcgttggcatttgttaagctccagtgcctggcatgtgctaagtgttatataagagcttgttcattaaataacaaattaaaatcaggctggttggcgagaaggtaaaacaacaaccccgcacgagtgcactgtgagacctaaaggccttttttgggtactgtgtgcttaggtctctaagggggtcagggcagctctttctggggtgttttaaatcctttgttcaggccaggagaagtctgatgactcactcaccttgctctgcaaaacaagaatttgttgagcccgacccctccaggtccctggcgaagataggagctgctgaacgttgatgtcttccccaacctctctggccaaaacctgaaataaggcagggccttcaatgtggccaaaagagagggctccaccagaccctgatgctgctacgtatttagaagcatattcagaagcagtcttcacctacacgatcttcttcccatctcagagcatagccctcaaaggtcagttttccatgtcccaagggcagctctccctgggaaagtagtaaacccatcatccctggcatttcttggcaatgcttagagcagccaagaaactgccagcaatgcccagatagggccccttgctcttgacatattctgggatgactgaaccacaaagctgaccaactcctgcttccttaacccactcacctgtcacctagtgctgagctaattctggctataggaagtacatcaccacaggaccctagcctttgtgaaaacccacggacaagtggacctctgagtgcagcaaaaggtgggctactgaatgtcagttggggtgctgtggtccaagaaggacccagctttgcggttgttgaagtgcagcactcaggcccaacctcaaggctttgaggcagaaacaatacgctccagcttgtgacctgggcccctctgaagcctgtcacagaaacccgatccagcgtaccaagtctctggcacttgtttccacaatagaacactgttttggaaatcttggccagtctgagtggttccagcagggaagacaaatgccagagaattcgctatgtaaataaaaataaataacgaaccagctggg

SEQ ID NO: 2042 - DNA, 2010 bp, Homo sapiens
aagggggctgggcgggtggcgccgccgcttgggcgccgggagggtggcagcacgcgtgggcgcggcgagggctgccttctccctcgccctcccgcccccaggagtccggctccccgacggcagagcggcggggaaagggtggggggagggagctggaggaaaagaaggggtcggccgagtctcttaccttgctctccgctgggagttgggcgggctgggtggcccggggaggggaaaagggtcgggggagggggtggggaaaggggggagcccttgcgaggtgtagcttccgagcagctcccgccgccgccacagccggcgcctcctttccgattcactcaaacaaacaagatggctgccgttacgccgcggctcttcctgccgcccaaatcctcggttcaaatcggcaggatgtttacggtcaaaatggtacctgtgcgcctgcgcagccagcccaagcccccccctccccccagaaggagcggcgcaggcgcaatgactatttccttttctttggaacccgccctctgtttgtggagtccacaactgagcaagcgcaaagagatctttccagtgatgaaagaaattgaagaggacacacaaaaatggaaatatattccatgttcatggattggaagaatcaatattgttaaaatttccatactacccagagcaatctacagattcaatgtaatccctatcaaaatatcaatgacattcttcacagaaagaggaaaaaaatcctaaaatttatatggaaccacaataagaccaagaatagccaaagcaatcctgagcaaaagaataaagctggaggcatcacattacctgacttcaaattatactacaaagtgatagtaaacaaaacagcatggtgctggcataaaaacagacacatagactaacggaacagaatagaggacctataaataaatcaatacatatacagtcaactaatttctgacaaagctgccaagaacatacgttgggaaaaggatggtctcttccaaaaattgttctggaaaaactagataactatatgtagaagaatgaaacagatcactatcttttgccatattaaaaaaatcaaaacaaaatggcttgaagactggaatctaagatttgaaactattgaaactactagaagaaaacgttagggaaatgctccagaaccaaatatttcttagtaagaccttaaaagcataggcaagcaaagcaaaaatggacaaatgggatcatgccaagctaagaaccttctgcaaagcaaacaacaaagtgaagagacaacccatcaagtgggggaaaatacttgcaaactactcatctatcacagaattaatagccataatatataaggagctcaaacaatataataggaaaataatccaattaaaattgagcaaaagacctgaatggttatttctcaaaaaagacatacaaatggccaacagggatatgaaaaaatgcttaacatcactaatcatcagagaaatgcatatcaaaactaggatgaggtataatctcatcccagttgaaatggcttttatccaaaatacaggcaataatgaatgctgataaagatgtggagaaagagaaacactcgtacactgttggtaggaatgtatgttagtacagcactgtgaagaacagtatagagattccttaaaaacctaaatatagagccaccatatgagccagcaatcccactcctgagtaaatacccccccccaaaaaaaaaggaaatcagtacatcagagtggtatctgccctctcacatttattgcagcaagattcacaattgtcaagatatggtatcaacgtaagtgtccatcagtggatagatgggtaaagaaaatgtggtacacatacacaagataatatttttcagccataaaaaagaaaaaaagtcctttcatttgctgcaacatggatagaactggaagacattaagtgaaataaaccaggcacagaaagacattagtgtgaatgttcacactaatatgtgggagc

SEQ ID NO: 2043 - DNA, 559 bp, Homo sapiens
attcgttcaacaagcgctttggacctgacgctgttagacgccgagaccccagagaagagacgcagttactcatctcaagggcagggtctgggtctttatcgtactgcaggctccacccagaatgggcaccgatgtgtgtagtgaccactaacaaaaatggctcagtgggaggagcgggggcaccacgggacaggcggtctggaaaattccctaaggtgatctctgccttggatgggccctccacggccagtgacagaccccctgtaggtggaggtgtggccaagatcagaggtcctgccctcacccctgcccctggcaccactggctcctctgtggcctgcagcaggtgagagggaacagtcagtgactggggaaggcccaggagtttgacccatgctatgactgaagctggagagtgaggaaagaacaaggtagttaatcatgaaaccagcgtggcaggagaggtgcgtcagctgcaagagaaggagtgctgtgcccaagtggggttccatctgcccagcctaactcttgcctgctccccaagaggcccccagaccat

SEQ ID NO: 2044 - DNA, 371 bp, Homo sapiens
aagactttgggtatgctcacaacattcaagggcttaaatgattagttatgcctagcatggatatgggagggggaattggatgatcagttatgtctgacagcagcatgaaaagggagaatggcaacacgcttactgcactgcatttactgtttctgagctggatagctttgaagagatctttgaaggctaactttatgcagttctgcaaaaatcaacttctccatatttttcaaaagagcttgccacagagacagagctgggagactgctggaccaccataaaccaattgaaagatcatctcttgaaattcaatcctaaatgccattgctggaactcagtagcttctcaataaaagatacacactgaataaa

SEQ ID NO: 2045 - DNA, 1791 bp, Homo sapiens
agaccaatttgtcacccaatatgtgggtgtctaatactaagtaatttaaccaacttttgaagccccgcttatccacaaaaatgtttttcagcaaaactttgtttcctgttaagctattaatacgggtcatcttttagctttgtaattgaaaaaaaaaaagtttagatagtagtttaccttaaaagcccattcgaactgacataggaagatgaaagagactgacttgtccaaattgtcaggtccacctctgcatcacagtggatgtcaggatgtaaattttcagtttttctcttacatctagaaagtaaatatattgctgagagggaaattgtttgcatcaaaccagataaggaaggagggctaggcaaatttagttctcatttagcaaaacttcctgatttgttttgttacttaaatggtgacatcagtgtttggtcatggtagacacttaggtgatgatagccaaaacatccatcgattttactaaaatcactgccattaagagagttttttgtctcttcatgttcaatgtttgaaaggtattcagtaatctatttcagaagcaaatcaattagggaatggtgtttattaaaatacggtacagttgccaggactttaaaagatggtactggtttctaacaacttacgagtatatagggtatttaaaagatgggagagattgaagaaagacaaaggtttaaaggtcatagccttcgagcataagaggcatatgaatggtgtcttggccttaactcccaattatacgaacttctgttttagctgaataggccagtgcctcgtgccttgatatttcggcaaatctattagtggttccttaagcatagggaactttgtactttatgctctgtcgccataataatgtatttatagaattaaacattctcaaattagggtcttgttaaactgactttttctttcagaaagtagctacttaaattctgttacagctacaaaagatccatcaagtgctgactgcttaaactgaagaaggtgtccagggccttaattctgcaaacatttcctgttgttagaaagtatgatgcttgaacagcgatctcagtgtattttatgttttaaagggggtaacgtttggtgtgtttaagagagctgatgtgttttggatgagactaaagttgatccttggttttacattaagatgaacctgggtccatgtgtctgcttaaagaatgtaaattggcatacttgataggaggataaagctttgtaggaattagaaaagatcattctcttttttgttgcagaagcagtatagtatagtagttagagcatgggccctggagccaggctgcttggtgtcttcctttatttatttatttatttaattataaaaagtaaatataaagtgagctatgttgaccaggttcgtcttgaactcctggcctcaagcaatcctcctgcctcagcctcccaaagtgctgggattacaggcatgagccaccacaacctggcctgcttgggtttttctatcttggctctgccacctagctgtgggtccttggacaagttacttcatctctctgtgcctcaggtttttcaaatgtaaaattgggataattggatctgtctcatagggttgtgaaaattaatgagttaatgctcttagaagagtacctcatatgtaataagcacgcaactgttaattattgttaatgtagaagttaattctgtgtataaatcagatacactgtggtcaaagatttgtgtgtatttgtaagaaaagaggagaatggagaatctatttttaagtgg

SEQ ID NO: 2046 - DNA, 1679 bp, Homo sapiens
atttcttttagtcatgttgatttgatttcagtttctggctatgaaaaacatttttaaactcgtcacccacaacaaactgaacaaaactactacagtgaaagcccttttcagtgaaagatgtcagaaacctcaaaacctttggcctgactcagaactaccatgtgaaaatcagtactctcttaatgtttgaaataaaaactgaaaaaaaaaacaaaaaaacaaaaaaccttttttgaagcaccttaacgtggccatccatttgagaagtgggtgccacttttttctttgagcaccttattgatgtgtttgctatctgctgtctttctgttacctgttggctgaatggctagctgttaacatatacatgtgcacagaagagatatctgggcatgtatgttctcaatgaagtttactgtggtgactgctgaaaggtgaacccatttcctgattttcccgccgcagtgttgtgataagattcgaagaaacctttttccctgcacagaaatgtttcttatcacattgtatcttagtatggaaaggaatatggtcccttttttgcaattgctactgtgtacacacacacacacacacacacacacacacacacacactgtatgtttagacctaaaatacacacacccacgcacacactgtatgtttatgtgacctaaaacatacacacatgcacacacacatacatatccattcattcattcattcaagtggtgtttccagtgtctgtgtgtcactgtttatgcagtttccatttcccagtgaattatgagtggagggcaacttttctaaccagattgtcttttcagaacaaagacctgggaattgaggaagagtttggaaagagggagaggcaaggaaagagagctttaaattgaaaggttaatttcctaagaggaacctgggctgaatgactgcagtgttataccctccaatctttgcaggtgggcatggaacactgcttgtatcactctgtgcacggtataaatccatatatccacaaaaacacacatccatccatcaacatatacatggtttgggatgagcaggtcaatagttttgagagggagtttgttcctttttttttctcattatactcttaaattgttgtcagttatcaaacaaacaaacagaaaaattgtttggaaaaaccttgcatacgccttttctatcaagtgctttaaaatatagactaaatacacacatcctgccagttttttcttacagtgacagtatccttacctgccatttaatattagcctcgtatttttctcacgtatatttacctgtgacttgtatttgttatttaaacaggaaaaaaaacattcaaaaaaagaaaaattaactgtagcgcttcattatactattatattattattattattgtgacattttggaatactgtgaagttttatctcttgcatatactttatacggaagtattacgccttaaaaatacgaaaataaattttacaaggtttctgttttgtgtggaagagtaattgatgttgctaagaatgatgtttgtttttttggggtttttgttgttttttttttaaatgttaccagcactttttttgtaagtttcactttccgaggtattgtacaagttcacactgtttgtgaagtttgaatatgaaggaataattaaaaaaaaaaaaactctt

SEQ ID NO: 2047 - DNA, 329 bp, Homo sapiens
ggccttgggactggcgctggagcccagcgtgggatgaccgtgccccgaaaacatgccagtgaatggaaagaagccaaggtcccctccctccctgcttataccctcaactttgccaatgaggaccctaaataccagctgcactacaggggatgtaactacatacaccgtcaccaaagttgcagcctggccaagaaatgccaggggacgtcgcggcgattgcagactccgcggtgactgtgtagatacgtccagaattcgcccttgtagcgcggggagaggcgagagtgaaggcctagaaaaaaagaagaataaatgggacattacacaag

SEQ ID NO: 2048 - DNA, 1966 bp, Homo sapiens
attaatcaatgcagagacggggcaagtggagtatttgcagggttggcctggagcccagcatgcgccccctcccacacatccaggacagggatctggacggctgtgggttcaggtcaacaaatgtccatggagtcacccatcaatccaaggctcccagcagaaggcagacagtgtgacttggctacaggctttgccattcgctgcctgtgagacacaagcaagtaggcgaagatatccaagcctcagttctcatgaagcatcagaatgatggtgccactggctacatggagaagcaaggagaggagaatgctagctgcactccctggctacacgcaaacagatgcagcacgaagccttgggaaccttggcaagggatttaaacagtctccctctaatgcatataacatggtgctgctggatttcccagaacaggattttaagatggttccgagagtggaacctggtaactcctgggagcacctctctgcttggtctgctctgggggtgggctgctggcccatctgtggctagcctcaggatagagggaagggagctgcagcagctgccatgacgtgttgggaagggaactgtcatgtttgcagcagccctggtgggtctgatgtttttttaattatccttcaagttccaaaagcacatccatgtctctggggacacataacaagccatgtcactttatgttcctttggaactatgtctctttggactgtctggcttatagttgttgttcagggccaagtgatgtgtcacccttctctgaaatgtctgcatcctgtgaattgtttagcctactttcccctgaccccaggctcaggcccctcttctctgctctcaccatacctttcaccccacatccagtcccctcccaaaatcctcccagttttacttctgtgcccttttgagagggcacagtcatttatactttaagctttccaccagaaagtcggatgctgaagatgtccaggacaaacttaagtttcagtgtttgttgaactctctgtgccctctccagtagactgcctttcctcatgccctcagactctactctacctgcctgttctgcaggactaaccccacgtggagacagtcagcccccaccccagtggggacatgcactggagagcttccagaaggcctgcagatagcttctctcctgccctaccatagtgcccgaaattcccaccagaaatgccactcttgtggattacagcatccagctccagaaagcctttgagttgttacctcaattttgcttttgaggaaatgaaggatgaggattccagtgacttttccaagttcaagatcaaccactggcaagatcagagctgaacctggccaaatgaacacaaatcccatgctctttccacaccaccacactggtgcaggaaggacgatttgatttttcacagctctagagcaggatgacttgcccagatttcaccccttgagaattaggaggagggaaagggaatttcagaggatttcttcttcttcttcttttttttttttttgagatggagtcttgctctgtcacccaggctggagtgcagtggcatgatctcggctcactgcaacctccacctcccaggttcaagcaattctcctgcctcagcctcccgagtagctgggattacaggcgtccatcaccatgcttggctaatttttgtattcttagtagagatggggccaccatattggccaggctggtctcaaactttttaccttgtgatctgcctgcctcggcctcccaaagtgttgggattacaggcatgagccaccatgcctggcccagttttcttctttatacttattttttcaagacattgcagcattgccttaacctctctctttctttttttttttttttttttgagatggagtctcgctttgttgcccaggctggagtacaatggcatgatctcagctcactgcaacctatacctccctg

SEQ ID NO: 2049 - DNA, 589 bp, Homo sapiens
gtgtcgcgtcccgggaccggacgacaggaggcatgttctgcgctagcaccgtgactttgttcccagcgtggggactgtgggagagatggagagagactggtacagaaatggtgagacaaggagagagccataaagaggaagacagagagaaagaagacaaatgcataaagaggttcagagacgtgtgactgtggagatcgaaggcctggttttagggctagcgaacaccttctccctttggttttggtccacagaagactggtgatacagagcatcctcgccaggagaggcagagtccatggagcagccgagacagctgtggaagagaaggtgccatgcggagctactgagagagagggaagggcaccccatcactacacacagcaaaaaatgaccttctgccaaagaagctgatggttcaggaagaaaatagagctgactatccctgaaggaaaaggaaacgtggtactgttttgctttatcacaaatacaaacaaaaggtttaaagatggaaagaaaagaacagaaaggaaaaagagtgaaaagccaggaaaagcacctaggaggaatagccctctgctgccatact

SEQ ID NO: 2050 - DNA, 2368 bp, Homo sapiens
gttgacccgactttggctgcacatttgactggcccctggatcagctctaggactagatgtacccaaaaggatgcccacatccttgcctcagctcctgcctctgcccacccagagagctgccttgcccccatgtccacgatgcagccaccaggcctgggtaagcgtgggtgtccgagacgggctgggacacccagaagaggagccaggacttgcttggtctgtatcccggctctgcatgcctcagtgtccctgcctgtaaagtgggatctatgggaacccatgtgtgggccgggcacagtgctcacacctgtgaacccagcaccttgggaggccaaagggaggatcctttgagctcgggagacagggtctcgctctgttgcccaggctgtagttcagcggcgtgatctcagctcactgcagcctccgcctcccaggttcaagcgattctcctgcctcagcttcctgagtaactgggattacaggcacttgccaccatgcccagctaattttgtatttttagtagagatggggttttgccatgttggccaggctggtctcaaactcctgacctcaagtgatctgcctgcctcggcctcccaaagtgctgtgattacaggtgtgagtcatcatgcctggccaaaaaaaatttttttaaattaaccgggtgtgatggcacatgcctgtggtcccagctacctgaggccaaggtgggaagatcacttgaacacagcacttcgaggccacagtgaactatgatcgcgccactgcactccagcctgggtgacagagcaagaccctgtctccaaaaaaaaccctctaaacctatgtgttatggatagggcctctaagaaggtaattaaagttacgtgagtcctaagggtgggaccctgaactgttgtccttaaaagaagaggaagagacaccaggagtgagcacacagaggagaggccacatgaggacgcagggagagggtgccgtctgcaagccatggagaggcctcaggaggaacccaccctgccggcagcctgatccctgacatccagactccggaagtgagaaaataaatgtcgtttaagccgcccaggctgtggtgttgagttatgcggccctagcaggtcatttgtcacgtcatgggtatctggacctggaatcgtgtgctggcccaagtcagcagcatggcacccatggtcaccccttcagctgagccacatgcccgggtgccccagggacagagcagggtgtgccacgggcactgcctggttcctgaagctgtggggcaggccggtctggccctcacagcctgtgctctgattcgagggccgttccgttgggttgagctccacggtcccagagcgcccgccgtcagctcaggccgagggcccttcctggtgccccggtgagtgacacggccaggacctgaccctcccatgcctctgtggcagagcaaggtgggtggggaactggctgtcctgctcccagctgcgttcctggcacctatgccccacccacccagacacacatctgggtgtcaggcagccgcatgtcactgagtggggtaaacaagggagggtgagaggaaggtcagaaggccatggctgagggcgtaagtgtgggctgaggctcttgcttcccagaacacagactgaccttggtggcagacctcaccatgggagcccccaaaagctgcttgcttgaggcctccaggcctcttgcagggccctaaaagcacagggatccaggacaagaggtgcgggggcccccgcctgggcaccagcctgcatgggccagagcaagccacttcctctcaggtttggggaatgcccacgtcagacttgcagaggcaacttctccatctgtctggctcacaggccctgtggcaggagaggagccaagaaatgaaagggcccggtgggtgtgggcgggccctgctccgatctggatctggccagtgcctgtggcacgccctgctctgtccctggggcacccgggcgtgtggctcagctgaaagggtgaccatgggcaccatttgcctggctcccaggtcctgaggccagagaggagccaagaaatgaaagggcctggtgggtgtgagtgggcctcagtgtctggctgctccaggaggaggggggtgggcactgactcctgcctgagggctggaggcagggaggctcctctggacaggaagaccctccaggaacagaccagcaagactggcactgtccagatgggaccaggagccggacagcggcgtcagacatgccccacagcggccgtgaccacagccacttcctggaggtcaagacctggaggcagggccagtgctgccagggatcctggtgtggacacgggcaggaccaggggatgctcc

SEQ ID NO: 2051 - DNA, 549 bp, Homo sapiens
cgctcaggcagttctcttaagaaatgatgaactgctctattggcagccgccacaggagttcacaaagaagaggcattaggctggcaagcagagctggtgggatttacctttgacgtagtgagctccttgaagctacaacaatgccatatgcatcctgtcacagtgtctggtagaagctgcaaagccttctgggagcctcatatcatctcccgtgggcagctgtcttgtgtccctgggcagaatcactcttcaagaaagcatcagcaagcatcacaggaggctgaagcacgagaatcacttatctgtataagaaatagtgtcaagatgaattgttgtgtcctcaagggtagcaagctctccctcattccttctcagatatcttgcattaccctattttactaacgaaaaaatattctctaatttaagcacaatggcatattttattttcctaatgaactactttctgtgattttggactatcccattgctgaaatgttttatctgatttttgatgctctaatgatcccaataaattataaacattttgca

SEQ ID NO: 2052 - DNA, 5284 bp, Homo sapiens
tttttttttttttttttgtcagccgggttcaatgcgccatattgaagaggacgggtctaatagatcgctggagacacaatttaactgaaccccgcccgttgtggactgactttgatgctctgagtccctccctccttcacgccgctagcaggccctgatgtagattgcctttgtcttacttgggacgtttacctgagcgcttggtgctggtgtcgggaccgggagataggagtgtctcaggagagacctggccgaaaaccgcgagaaagaaaagtgaagcctagtgaaactgcctttgcagtgactcaagaaaaactcatcacctggagtccgtgtaagctcggcgacagccctagcagcgaggccaaaacagtttgggaagaaagaaaacctaaagtatttgccgttggtgattcaagggaatcaaacttgacgtatggagccaagaaagcccttggaaaaactggcctcatattttgtgtacacagtccctgtacagggtttctgacctgtgagtcactgaaaactaagctgcgctttcctaaagtcctgcgaactgaagccagacaacttaaacctcagaagaaaataacagcaacctatttatatacataagccactttcatacctgcctactgttgtatagacttcagagtaatgtggcctgtatcgattttccaggagtattcttttgtgtgttgttttttctcaattcctcctattttctctttacaggatgtgagacttcacaacctgctaaaaatgagctttcaggacctacccatataggaataaaccatcctagccatgagagatcagatgaaacctgagaccagagagactcatttgtttcaaaatagtttctccaaaagattttataaaagaaaaggctggggggagtgggatatgaaaggaaaatgaatcttggggcccccaaatcactaagctcaagggataagtcaagttagaaactgttcagggccaacttaccttgcattctattcaaattcacccctctgctcacttagatgcatatctgattgtaatcagaaactcaaaagaatgcagcagtttgtctctcacctatctatgacctggaagcccccttccccgtttgagtcttcctgcctttgcttcactttatccctgcctttctagactgaaccaacatacttcttagatatattgattgatgtctcatgtctccctaaaatgtataaaactaagctgggccccaaccaccttgggcacatgtcgttaggacttcctgagactgtgtcacaagtttgtgtccacaactttgacaaaataaactttttaaattaactgagacctgtcctaaatttttagggttccatcagatatgcatttctctcacctgagcatcagagggatgatttcgagttctctgtgttttttgtccacaggaatttccttgtgggcaaattctgagggagggatgtagcttttttatgtttggagctattttatttagaaataaaatgggaggcaggtttgcctgagtcagttgcctgcttgacttcctttggcttagtcattttggagtcctgagatttattttcttttcacatacctgttttatttatgatggtttatggtcattgaaccttgtaacattgattacatttcttttcactggtcttttttcttaagtagataaacttatttttaacttgggcacaagagagcataaaaattatatgaggtacatagcctgcttaaatagaatatttaaaatacgttttgtccacagagctggaattctttgtaaatgaaaaccaaattttacttaatttttagagataggatcttggctttgtcgcctaggctagagtgctgtgggggcaatcatagcccactgcaacctcgaattcctggcttaagtgatcctcccatctcagcctcctgggtgcttggacaacagacatgacaccttacctggctagttaaaaaaaattttttttgtagagatgggctttgcctgtgtggcccaggctgctcttgaactcctaggttcaagtgatcctccagcttgggccttccgaagtgctgggattacattgcttccagctttagttttttaaatgtttaacttgtttaacttatttaacttgctgtttattatttaatggagagcttttagtgtttgtcttttgaggtgggatcttgccatgcccagactagccttgaagtcctacagtcaagtgatctttgcatctcagtctcccaagaagtagtggtagagaatttttatgttacattcctttctctgtgtatatgtttgtgggaggacatatgtccctttgtatgtttgggcatatatattttttgtgtgaaagttatgcatgttattgttgatcaatacaagaggtttagaggccagagaagagaaataaaatgggaaaaactacaaacattctacctcccatgataccatgctataatggcaatcataatatttatgtattttttacttttttgtgttcatttttaaaaattagataaaaatagtttaagctagaggcttctctctttcatctttttttttctaatttaagttttccctaagtaggaattttggtaatacttcattatattgatgtatcaagatttctttagtttctcctttgttgtctttaggttgtctacaatattttttgtcattgtgaatatgctgtcatgaacattttgatgctgattattaccagattagtgtgttgtgtcaaagttttcatcagttggattatttttcagtttagtaagtgatgcaagccaaaactaaaactctaaggcaccttctccccacccaaccagtcatctgagtagacttcctcctcagccagggcagtcatagcccactgcaaccagccagcccctttccattccagtatccctttccctttaataaaatttaaggccaaacatggtggttcaatgcctgtaatgccagcactttgggaggctgaggtgggcggatcatgaggtcaggagataaagaccattctgggaaacatggtgaaacactgtctctactaaaagtataaaaattagctggatgtggtggcatgtggctgtggtctcagctactcgggaggctgctgaggcaggagaatcgcttgaacctggggaggcagaggttgcagtgagcagagatcatgccactacactttagtctggtgacagaatgagactccatctcaaaaaaaaaaaaatgatttgtgagatgaatttgttttgaaaatattagcttgttttcagttgtgatacatttgaagttggtacagagtccattttcttttatgtgttaatgtattgacaatatagttgtgttgacaacttcttttcttatttccagttcagtctttacagaagctgacgagagatttccttgtattttatggtggtatgattggccttagagcacttcagttttgagatctctgctgtatttgtatacaagtattttggaaggtcagttgataggatgaatgaaaaacaaaaattggaagtaatggtactagtaataagtggggattttcatgtaggtaaaggaactgataagtcatagggaatccgtgagttcttaatcttactgagtttagttgtgttctttgattattttggatagctttgtttaacggtgaatgaaatgattaaaatggaaaaattaagtgcagaaaatatgtttaacattatataggatgtcttgttttaggcatttattgctagataacatatgtccattcttgtattgctataaagaaatattggatactggctaatttataaataaaagagatttattggctcatgattctgcaggctgtacaggaaatatgattctggaatccgcttggcttctggaaaggcctcaggaaacttagaatgatgacacaaggcagaggggaagcaggcacatcttacatggcaggagcagggagcaagaaagagtgaagcgggaggtgctacacacttttaataatccagatctgagtcaggcatagcagcttatgcctataatcccagcacttttgggaggccaaggcaggcagatcacctgagggtcaggagttcaaggccagcctggccaacatggtgaaacctcatgtctactaaaagtacaaaaattagctgggtgtggttgcacctgcttataatcccagctgctcaggaggctgaggcaggagaattgcttgaacccgggaggcagatgtttcagtgaaccaagattgcaccactgcactccagcctgggtgaacagagtaagactctgccttaaaagtaaaataaaattaaattaaaattaaaaaccagatcttgcaagaactcactgtcagaagaacagcaccaagggtatggtgctgaaccattcatgaaggagccatcctcaagatccagtcatctcataccaggtccacctccatctaatattgggaattacaattcatcatgagggttggtggagacatggatccaagccatgtcacatattatcctgactgtagtggtttaagataacaatttttatctcacaatttattttgaatacaggcatgatttagctgtgtcctttggttcagtatctcttcaaagctgtaatcaggtttttcatgtgtttgtcatcaactgaaagattgactgagtatggttctgagatctctcaggtgattattggcagaattaagttccttttcgattcttggtcttatttcttcacccatctactatagtgcattcttgccatgcagccctttttatggagcaagtcacaatacagcagcttgcttcattagggcaagcaagcaagacaagctgcagcaaatgcaagtaacatggaagtctttataatctaatcatggaattgacatagttaaaaacaaatcattaggtaggctccaaattgatcagaacatggttattggacaaaaccatgactgtcaggaggctgcatcatggggagccattttacaagcagcaccatgggtgttatgggggattttattacatttgttctgctcttaagagttgaaagtctttaaaaatgtgtaagtctgtcgtttgttcttgacttctgtcatgttttcaagaatgcattatgcaatgatgtagaatactgtttgtaaagtagttgtctagactctagtgaaaataattacagataatctcagttcatcaacgaatcggtatattaatgtcatatttaacagttataggaataaactaagcataataataaatgatgatttgaatgttattataatta

SEQ ID NO: 2053 - DNA, 536 bp, Homo sapiens
atcatctaaaaggactggacctacatctgcagttaactgcacaatggaagaaacggcctctcctgggcagcctcatggatggggtgaagagacaaagcttgggagtgtagcatgttgagcacatctgctcagaggtaacatttaagcatttaggttgtctccaagcataaaaatggaaatactgatcctgtgacaacacagcctgaattttctgctttgcagatgccagatttatttttaaatggtgtgaatcaaatctgtgctgagaggccaacttcaaaatataaaagaaaaattggcaatgggaggattgtgctggtttggctgaaatgaagtgctctacggcatttcattctagtggagcgtctgactgtgaaaatccttccaattgtaattttctttggcttgtcaaaagaggattatgaactaaagtcagtgttgcaggaaatgtcacctgtcctttgaaagaaaataataaatcaaaatggcttttgttcatcatgtttaaaatgaaaaaaaaaaaaaagttgatccac

SEQ ID NO: 2054 - DNA, 542 bp, Homo sapiens
atagtccctggccaaatgcaaggaaactgttcctcagtgccttttctccccctccccatccagttcgtggatccccgtaagagccctaacttgggactgagcacggagtacgagtctgacacaagctcagactaactgacttgggaaatgctagctatacttaaagaataaccctgtcaggtcggtgcggtggctcacgcctgtaatcccagcactttgggagaaattaaggtcggaagagtggcaggggaggactgaggatcagtattgtagctggggagggggatggctagggatgaatcttgcccaccgatgataccctgacattcttgcctggacagggttatttggagggaaaagggaggtgcaaggatgcaaggcagagaatgcttaccccatgattctacgctccgagtaagcctttcgcttgttggtgaagggagcagcaaatcccatgaaggaacggctcgaaggtaagccagcctcagccgccaagatctgggcagcccgaggcaagaggaggctgcaggaggtcagaaacc

SEQ ID NO: 2055 - DNA, 609 bp, Homo sapiens
ttgtaattgcagtggaaggggagaccaaacattcaaagattgctgaagagccaacgaactctgattctgtcaagatgatgtctttgatttctttcacaaacttcagtggcacagcctttagctgatggtattgcctctgaatttgctgattcagaagatgtcggactcatgttatcctatagaagatgtaacaacccatatacatttatgaaaatcaggaactacattattataatgatgaaggaaaagcccaagaaatcaaccaacctgaaacctgcaatgaagctgtgcagctgtctttgccaacagggttctgcacctcaaaactgtataccccactgtcactcggtgctacattgatgatcttaaggccggatactttgttgaagaagcttattttgtatttgttgtcacttgttagctcttttccatccttaaaccacttagtactgagttcaggggtgccagctactgtacactccaaggtacaggtgtctcccgtggtaacttttatggattctggcttttctacaattgttgcaggctctggaatgaaatgtaaaagatatccatattttaaactcaaattgaaaaactaaagaaaataca

SEQ ID NO: 2056 - DNA, 597 bp, Homo sapiens
agtgaactggcagtgaaggatttacactcaggtctcttgggccccaaaatctaagtactgcacacgactctgcagacctccatggagtgactctttctaaaaagctttatgccaacagacaccagaggaggaaggtggtcaccaggcatcactgtccaccttacatagagtctcgctctgttgcccaggctaaagtgcagtgatgcaatcttggctcatggcacctctgcctcccaagttcaagcaattctcctgccttagcctcctgagtagctgggattacaagcacacccaccgcgtccagctagtttttttgtatttttagcagagacagggtttcaccatgttggtcagagtagtctcaaactcctgacctcaggtgatctgcactgcctcagcctcccaatgtgctgggattacaggcatgagccactgcgcccggcctaggccctctcttttgatgatctcaacaatccttgccagatggtgttcgtatccccattttaaagaagagaaaaaaagagacatggacagattaactgattcatcaagggtcaagccaagctcatcagtggccaagcaggcatgggaagccaa

SEQ ID NO: 2057 - DNA, 1899 bp, Homo sapiens
taatttctgtcatttattcacgtcataatccccaaagctacctttattccacgactctttccaccattttcctacagtcagctttttttaaggctatagcctttaaaaacttgaaacagaaaattttaaggatgcaaccattagaaaatgttcccatactaccatttaacattccccatttatcattatgtttactatcgtgtaatttccaacataatattatgaggtcaaaggctctacgaacgccgttttacaatctacctagggaggcaatggctgtgaaacacaccacaccaatgacaggaatgcgggtcactgtgacacaacggatccctctgcaaagtcaaagctaagagttcactttacgctgacggagcttctttccaggacccccacccccacccaaggacaggagagtgtcgatttcccaaggtgtctggcactgcttcttgaaaacgcagctctcatctggttcctggaaggtcatactggttcgcgcagggctcgggacggggcgcttggcttctgaggcacccgcgctggctcctcacccggtgaccttcaggcctctgcgcttggcctgaccctagaagggccaccgcccttcacagcgggcgggcaccgtccctcccacggccccgccgactgctgacgcggtggccccaagggtccaggcccgcacttgccccactcccgcggcgccgtcccccatagtcggtccccgagggccgcgcccagctcctgctcggatttcagcccgcaccgcaccccagccgccagggaaccttccagaaccctgcccctctggctttctcccgaaagcccagggtcgccgtccaggaagaaacttcgattcatttattgagcgccgactgtgtccaaggccgagggaggggcggggtttccacgcggggagaccccctaggttctcgcctcggtaagcgcccgcgttccagcacctcgagtcgcccgcgggcccccacccctcgggccgggcccggtcctcgaggaaaacccacggcggggcaggaaggaacgaggagagccacgctccttgcccgcctcgtcccctccactccccttcacctcacgggaccccagggaagccgccggagctaaaattagcaacccgcgcagcgcgcgctcacgtgcgcgcggcccggcgggggcggggagcaaggggcgcggtccgggtgagtcaccggccccgccccactcgccaagaacgcgctgacgtcagccgcttccccgaagggtgacgtaagcgcgccacggggaggccgaggcagctgatagaatgttctgagtttcgatgccttaaagggaccaggcctgggatcgtgaaacatctggggaaacgactccactcactcacctgcagactgagagcccatcttgtaccgtgttatactttaagagagttgactgttgagatgatgatgaaaacggaagaacaactgagcctagttggaggctctttgaagtcccagaacctcctcctggaagccctctttggttaaccagatggacatctcagttgccctctgagcctgaaccaagtgtcaggaagagttttctatggcccttgactccttaactctttgcttatagcgtctctgctctctgatgcctctgctgtcagagaaaggctgtggtttaaatatttatttatgaatccatcagcttgggccaactaggtccatttatcaccgttttgactgtgtctaaactgtcattagtggtgtgactagaaaccagttaatttcgctgggtggtaaattcgtggactgatctccaaaccctcctactgtgctaatgttgccaatggaagtttccagaggccaggatccctggccaacacgtgatcgtaaacaacatcagggcctcacagggaactca

SEQ ID NO: 2058 - DNA, 855 bp, Homo sapiens
agatgcttttagcctgaaaaggagaatagaaatgcattttctctaaacatacaagagcactcatttccagagagatcctggactggagggacaggagcgtgacccaggctgttcatcatgaatggctggctggggcttccagggagctcaagatcaaatccgggggcaaagagacagaagaactaaaactcagagtgaccaccaatgcagctatgaaacaggtggcaacagccaagtggaagaagccaagtgaagggctatggggacctagaagatggagtcgtcacacagtggaagaattgcagatctctgagtcaccatttggacaagaacctactagaacaggtgcctgaacaagaacactggactttgtgtgagtgagaaacaaacttttattgtgttaagccaccgagattttgggttggtttttatagtagctggtgttgcttacactgactaatacatcttgaaagtaaatgatgcaaaacaattctacttattcacagggggtggtatttataagggaaaagaataacagggtggtgtcagtgatgggtcctgataagtaagcaacaacaaggaaggggccccaggtagggaagaacaattgttctgagagactgttaatcacaaacaacctgctagccccacatcctgttctcaaatactttgctcagcatgtagccccagcagcatgactttgtctgcatgtagaccctccagcatgaccctataaaatttccctccagccactgcctcttggcagacagtcccttctctgctgtgctgcccactgctttcttacaacgttatctttgtactttctctaataaatctgcctttctttacccacaa

SEQ ID NO: 2059 - DNA, 1029 bp, Homo sapiens
cttcgcgagcgtctgggcgggtggtaggtgagtgggtattgcgggctagtatccgagcaaaagatggtggcgcaggccgagttaagagctttaatcctgtgaagacatcttagtgaagagtttagagtgctgagagttgaaagcttgcacgtgggaaacgtgcggccggactgccacatgtactgaggttgagtcgtgacggccacaggctccgagttttggcgtgaggaaccgctgatcggccacgggcgccgaacttgctggcctccggcatgtgcctgagcggcggcggaaaaaccaccttaattggggcggagggttagttttaacagcaaagggcctttactaaaatggcgaaggccttccgtcggcgttgttttaaaatgggaagcctcgaccctgtattgaaactgagctgttcgaaggcggcgttgtgtgcaattcggattaatgaaggggaagggttttgtgtggaaaaacgccttggagtgtgacatttctgcgagaatgcttaaataccgatttcccgcaggaacaatggcgctgtcttcagtggcacagtggagcagctctgaagatgcaaagatacacgaaaaaacttccagaacatctgggagaatatttaatggaaaatcgcttggttaaaacctgacacttttaacagtgagggtcgctgtctgcccattgatagaggccagattgtcttggaagttccaaagttgcaacgatttctttagttgaatccatggacatgaaacccacagatatagagggttggcccggtgcagtggctcacgcctgtaatcccagcactttgggaggccaaggcgggtggatcacctgaggtcagaagcttgagaccagcctggccaacatggtaaaaccccatctctactaataatacaaaacaatttgctgggcatggtggtgcacgcttgtaatccaagctactccagaggctgaggcagaagaatcgcttgaatccgagaggcaaaggttgcagtgagcccagatcacaccactgctctc

SEQ ID NO: 2060 - DNA, 718 bp, Homo sapiens
atcacttttcctttcatgttttttctacatgctattatctgtatgaaatgaagaccaagaaaggatgggaagaaggagaagaaaaattttgatttatctcagaaactatactccgaagtgagagtcctggttgcaggtgcaactgaaggactatggctatggtagctgcccaggaagactggccatccgattcatgcttgtgcagtccttggacttttagatctaccagttatcttcttttaaaaaattccccaggaaattcagcagagattgagcatccctgacccacagtgatggcttctcgtactattgtttaatggaaggagatccttttagcagaaatcactcatgatttagcagtctaggagccatcatgaggaaagagttggagtggatggttttaatgcagatggtctcaatatgatggatcatcacattttggagttctcagtcctgtgtacaaagtccaactatctgaggccaccatgcacttaggatgtccaggccacctggagaggctaccagatatgtgtatgaagaagttgtcttgaaagtggatcttccagcccatgttattctagctacagctgtttgagtctccttgtacaagccccagacatcatggaatggagaagagctgagccacggtgtcctctccaaattctcaatccacaaaactcatgaaaataataaaatgattgtgtctttgtgctactaa

SEQ ID NO: 2061 - DNA, 465 bp, Homo sapiens
caccccatgcggtcaccagcagacagccgctttctgcacaagttccaagatggactcacagcagtccccgccagccatgacgctgagatgggtgtacacccagctctggaggaacccaaccgcctgtggtctctccacaacggctgcaaaatactattctccgctgtaaccaacctccaggtcacagccacaggacttcccacggacttcccctgctcttaaagcaaactgcagaaccaagcgtggacttctgctcctgagggggacggaaggacagtcccctgcggtcatctctataggagatgggggccatgggtgggagagaaactccctgttgcactttgtagccctcagtatgattaaagtgtttaccatgtacataaattatgctttttaagttcacatgtcttatatacttttacgttactttttaaaattaaaagacagttaacttttaagaataaa

SEQ ID NO: 2062 - DNA, 713 bp, Homo sapiens
acacaacgaaggagaggaagaagggaggaaggcacttcacaagcagagctgagccagcagggcagcaaggcagaaagggactgagattgtacctggaagtatcccagtggctggatattcaagatcattatgtccatgccagagaaatcaagttataccaccacttcttggccttttgcctaagatcaagtgtagaaatcaagttaaaccaaaccaagtgaggatttcagttatttctctgaaaagctggaagtagtctctttgaaaaccagtacaagataaggatgccctttctttccactcctattcaacatagtattagaagttctggccaggacaatcaggcaagagaaagaaataaagggtatttaattaggaagagaggaagtctagttgtctctgtttgcagacgacatgattgtatatttagaaagccccatcatctcagcccaaaaacttcttgaactgataagcaacttcatcaaagtctcaggatctaaaatcaatgtgcaagaatcacaaggatttatttacatcaacaataggcaagcagaaagccaaatcataggtgaactcccatttataattgctacagagagaataaagtacctaagaatacagctaaaaagggacatgaaggacctcttcagggagaactacaaaacactggtcaaagatataagagaggacacaaagaaatggaaaaacatttc

SEQ ID NO: 2063 - DNA, 310 bp, Homo sapiens
cttcatgtagattgctgtgtgtgtctttttcttcataattccccttaattctgtgtgctttgaatgacactgttgttgttactgttgttttatatccattgtcacataaaactcttatcatttattcttccaggccagggactgtccttatgggtagagatacactatctgcaggaatttatttttttacgtatttttactagttgatgggaaagacattgggaaagacctgggctggatttgtgatgagctgtgtttactgagcatgatgaagtaaagctcaacgtgattactctgaagtccagcctta

SEQ ID NO: 2064 - DNA, 585 bp, Homo sapiens
gagttgcatctttttgcctcgggagcctggcgcatcggagcttccctgcactcatccacgcgggatggtcacctccactccggaatgggcgtgagtcgggcaaagggctcggttggctgtgcatataaactgggcatgtgctcttggaaataaatttataaaatcccccgagaaagtaaagtggggacagccgagagggccccacacacctccttatggacacccaaggctgaggcagctctgtttccagccccttcctcaccggacgccaggttcaccccaggccgtgagaacccaggcctgaggcagcgcagccaaaggccccgatccggcccagagccgtgccctgattaggcccaaaggagaagtcaggatcaggaagagcagaaaacatctgagcaatgagacacgttgggaataaagctcccgcccaccgcatgataacaggcagagttcccaacctccagaggcacgtgactttaaagaccatatcctcacaaaataggatcaagtaaaagctgctcagtggtgaagacgcggagctggaccagccccggtgctgggtgcagcagccgctgtgcagga

SEQ ID NO: 2065 - DNA, 2271 bp, Homo sapiens
cgatctcggctcactgcaagctccgcctcccggattcacgccattctcctgcctcagcctcccgaggagctgggactacagggacccgccaccacgcccggctaatttttttgtatttttagtagagacggggtttcaccgtgttagccaggatggtctcgatctcctgacctcctgatccgcccgcctcggcctcccaaagtgctgggattacaggcgtgagccaccgcgcccggccggtactccgaagccctcagatcggcgacctgggcgctgtaggcaccgagaaaatacaggcaccgagccagaagcagtgccgcaaccaagagacctcggcttggcgaaatggcggcgtctggagcctgcgagtgacgccagctggtggggctgtcaaggagaacattcgttacggcgcaaccaacggtactgtcaccaagaaaccgtcgtctctgagaaaaaaagagacgttcggccgccgagaaactccgtacaagtgctgtgacagaaaaaccgccggctccgcgcagcggcaaaagagccaacgggaacgccgggtgctgcgaccatgaccccggcactggaggacgtgggatggagaatgggacacacggagcgagaagggaaacgtttcgtgcagaccaactagcgccgccgccaccggaaaactgactcgccagtgctgccaatgaagtgcgtgtgagaaaccgatgactggtgggaggagcagcgctgggcgctggacccgcgagtgtgagaatctggcggcgctaggacccttcaggcgcgggcacgaggcgaaacccagcgctgttgccaaagacaaatgcgcgttcttttgggcgccatcagcggtgcagccagtgatcactcccaggctctgagaaactagagatgtcagccacaaaccctccgttcagggaaagtttgcggcgccgtgacggatcgactggcactgggtgcaacattgtcttgtggcctagagactagaatataaaaacaaaaaccaaatacaaaactgctgctggcattactcctactctcccccctcaagtcagtggcttcaggcttaagaaaacctgtatttttcttggctgtgccataatccgtaattaccgaggcccccagcgacccacccagtgtgattcgcagagggaaaggagctggaataaggaccgtgaatggggcggatgtggctcgtcctgggagagagctaaagcttatgctggtcgcaaacagcattacattgcaggaaactgctcttccaatggccgtggctgggtccttccacaccatccctctgccctagacctttgtccccgttcagagccatcagagattctaggagagctgtcgacaaccgcatctcttcggaacttggaaactctaggttcaagatctccgtggagaatgaaaggcacagtcgcctgacccgggcatcaggcttgccccgcacatcaagtccctcccctactggatggaactctgtggcaatcgctccttattctgatggttcactctgtcagatatcctcgatatttggggatagtagttcaaaaacagccggggaggaaaatgggctgaaagattccagcgttggatgtagaattgacagcgagacatacacctcctctctaagcccagagaaaagctcaagttgtggttctctgtctctagcagcatgatcttcaaaatgcatcattgatttctatcttctgggaaatgcaatgcaggtgaacttcttttcatcttagcaaaaaagttgcaatcagcaccccctagacggaaggaatatcctgtcttaatgggagtccataggaggctgcaggctgctcccctacagagactaacatcaaggaggaaatcagtggtgcttcaggatattgtgaatttggtcttctgaaagcagaattctgatttaacagtataatggaattcgtgaacgtcatgatgctaatttgaaccaacaagcacccttgtgagaggaatctgcttttcctcaagtctgaagaacaccaggagaatctttctgtatggagttaccaggaatcctctgctaaggaaagtgaaagggaagatgcaatttctcctgggaaggggggatgctgatgtagagggtgacaagtaatatgccatgaaggattcagtcacctggttagatttagagttagagttatggttaaggaagaaggaaggaaaaaaggcagaagaggaagaaaggaagcaagaaaagataaaatttattctaagataaaatttgtgaattttgctaaa

SEQ ID NO: 2066 - DNA, 449 bp, Homo sapiens
cagaactgtctcggaaagccctggaaaaacaggacaaagaaacctgtgtgaattttcagcttttcaccttctctgattttatttcttcctcactcttcctttgacagtcctcgcagtccgcctgagagagtagagaagaccccctcccagaaccttcctgtaaggtctccccgctgacttcctgtagtggatgtgactgtgtgccaggtgcctgccgaagacccctgtcactgactgtgccctttgggaaagagtcaacaatggcctcctcctatggctgacttcgttcatgttcaggctctccagcttgctagtgagaattgccaaggattggttcatggcaggatagaactaaactgatagatgaaagctccacagtgcttcaagacggggtcccgttcatgttaagcagttttccttccttcaaaataaaaaactagcagtcctta

SEQ ID NO: 2067 - DNA, 3370 bp, Homo sapiens
gagacacactacaacaggagagggagcaagcgcgagaggatattagaagagaggcttgtctccaagatatggaaggaagtgagaaatgacagggctgcaagctttgtatgtaggagcccggcagggcgggggagcggcgaggagagccaagtggattctcagaaaaggggggaagccatcgaagagctaaaggtgattagagggggatattgatttcttattctgccagagatttaagcaggcatgcgaggaatctgcaccatggttggcaaaaagagacccgttgcctcctgtaaccagacactcaggctttccaggagcccagggagcaagccgagaagaaagggggcagtgtggtctaggaaaattcaacttgtcgctgatttgtgcctgatgcctgctgtccgtcagcagcctcccttacaatctttttttctctctctcctttttttttccttgccttctccttcttcactgaagcctaggggagccagtaaagattaaatgtgcttctcaaaggcagccacttcatgctgctatgtcgaaagggccattattattattatattttaatggtaaaagagaaaaggagagaggttgagcgagcgagagagaagctaggtgtgatgatgacagactagcttttctgagaggaaaaggaaaagggaagggagagaaaaaggagagcctctgagctcaacggaggattgtgcctgagaagaacccacagagttgtgttgatgttcctttcagctggtcctatagtacccctcctcaggaatgtctccccagtgcaaggacaaagactgaagagactgctatattgatggactctcaagccaactatgaagttgaaacaaagaaagtgatcacctgaagacacctcctctgctaagaaacacccccaaattgtgcagcttctgccactagaactctcagaacaagagacaatcttttcaagaaacagaaaaactcaataatgacatctagattttcatgagccaagaactttcccttcctcatgtgtattcctctgtttgtacttaaattcatgtgacattcatttttttcctagtatggatatgcttattaatgcacttgtttcaaaatcccaaattgcacaaatgtgttaatattttaagaaacaaaatgaatcctacaaggagaatgatttttagccacacatagggttggatcttgagagtgacctacagaataaaagtacttttaaaataaagtagtcagaggctattcaaagggtaaaataatcatagtaccacattggtccacttgacactaaccaatcgatcatttttttttaatcaagaaagctagattctatcagataaaatcactgcttctaaagagtttaaatctagttagaaaaagttatagaaatgtttgcaaagataagtaacagatagagtcagtagaggataagatcaaaaacaaaaccaagcaaaagatgagttcaggggagtttgccatcaagttggcaaaactgacttacttagggaagaaagttataaaacaggaaaatatgagatgaaccttgagtgatgtggaagatttagataaatggaaaggaaggagaaaatggagttctttaggtggttgtaattggaggaggaaatgaatacacacatcttgttgacttaaacccagacattcagcagctctctatacatatctggaaaagactgcacagtcacctcctgtctctcaccccaggtattacttagaattattatcatatttcccttcctttaaagtaagtaagggtgattggtgacaatatggagaactatgatttttccattaacctaataataattggtatttattgagttctgttaagcattttacatattaactcacttaagcctttcaacagccttgcaaaataggtattattatccccattttacaggcaagaaaactgaggtttaagtaacttgccgaagtgccatatacagggctcacattcagtattgcagttgcaaagctcatgatctatagtgccaagttgcaatattgtagtcaatgtcacaattattacccctttttatattccttgatatttttccatggcaaacaattagctatttcatttaataatcacctaaaacttttcagtcttctgattaaaattacgctggagtgatagaatgtattttcatgatagaaattgggaaaaaaaatggggaatgaagtttatcagcatttcagacttgttttttttttttttttttgcaagactttgatgagattgttcacttttgtctatgtaaaatcccaaatccttgagaataaaaaagggggaggtttaagtcacttgttgcaatgccctttttaatagaggcaataaatctaaaggccataaatttagagtgacttacagaagatcgaactttggagtgtggcagagtaagggatggaaaccgggccctccagttcactatcagtagcttttgcactggtctgcccttcctaaattaagtatgcacttcaatttgatgagtggaaacagtctatctgggcagtaaccagggagctttgtgcctagtagattgcttctgttctgcacttctttggtttcccacctcaatgtaaaaaatagctagcaatgaagtccagaagttgtcaatggttcatccccagaagaatgcataatgtccaaagttgtatgtgtatgatgtcttcaatggtattaagttatttcaaattcttagttcacctacataaatcatttctaacaagcatcttcttaaccaactttatgcacagtgtatgtttgtaagtgcttctgcacgaatgtttatacatgactgtttccatagtacttatgtttttaaaaatattcagtcatttcctactataatcctcatgtatccatgtaactgactcaaaaatacttcagccacagaaagctaaaactgagcaaatctcattcttcttttccatcccctttgcatgtggctggcatttagtaatgattaataatatggccagctgaataacagaggtttgagacacaattctttctcaaaggagtcagctaagctgggtctacttatggacaaacatctaaatgtgtggaagtatctgatatttgacaatggtaaatttccacttagctagctagcattgtcagacttcaatctcctcatggctctggccgtcctgttttaagcatgataattgttggccacatctcacatagttctcattgagtgagttcataaataaacagggtttttttttttttttaaagagcagccaagcacaaagtgtgactttgttgacattttatgtgactttgtcatatgttcctaacccccaataaaagcaatgttgcatcaactgtgaa

SEQ ID NO: 2068 - DNA, 2732 bp, Homo sapiens
ccggacatgggacgctggagggtcagcagcgtggagtcctggccttttgcgtccacgggtgggaaattggccattgccacggcgggaactgggactcaggctgccccccggccgtttctcatccgtccaccggactcgtgggcgctcgcactggcgctgatgtagtttcctgacctctgacccgtattgtctccagattaaaggtacgacatttggaggccccagcgagaaacgtcaccgggagaaacgtcaccgggcgagagccgggcccgctgtgtgctcccccggaaggacagccagcttgtaggggggagtgccacctgaaaaaaaaatttccaggtccccaaagggtgaccgtcttccggaggacagcggatcgactaccatgtgggtgcccacaaaaattccacctctgagtcctcaactgctgaccccggggtcaggaactgttggaaactactgaaactggccgacctgatcttcaaaatgtgcccctaggaaaggtggatgccaccgtgttcacagacagtagcagcttcctcgagaagggactacgaaaggccggtgcagctgttaccatggagacagatgtgttgtgggctcaggctttaccagcaaacacctcagcacaaaaggctgaattgatcgccctcactcaggctctccgatggggtaaggatattaacgttaacactgacagcaggtacgcctttgctactgtgcatgtacgtggagccatctaccaggagcgtgggctactcacctcagcaggtggctgtaatccactgtaaaggacatcaaaaggaaaacacggctgttgcccgtggtaaccagaaagctgattcagcagctcaagatgcagtgtgactttcagtcacgcctctaaacttgctgcccacagtctcctttccacagccagatctgcctgacaatcccgcatactcaacagaagaagaaaactggcctcagaactcagagccaataaaaatcaggaaggttggtggattcttcctgactctagaatcttcataccccgaactcttgggaaaactttaatcagtcacctacagtctaccacccatttaggaggagcaaagctacctcagctcctccggagccgttttaagatcccccatcttcaaagcctaacagatcaagcagctctccggtgcacaacctgcgcccaggtaaatgccaaaaaaggtcctaaacccagcccaggccaccgtctccaagaaaactcaccaggagaaaagtgggaaattgactttacagaagtaaaaccacaccgggctgggtacaaataccttctagtactggtagacaccttctctggatggactgaagcatttgctaccaaaaacgaaactgtcaatatggtagttaagtttttactcaatgaaatcatccctcgacatgggctgcctgttgccatagggtctgataatggaccggccttcgccttgtctatagtttagtcagtcagtaaggcgttaaacattcaatggaagctccattgtgcctatcgaccccagagctctgggcaagtagaacgcatgaactgcaccctaaaaaacactcttacaaaattaatcttagaaaccggtgtaaattgtgtaagtctccttcctttagccctacttagagtaaggtgcaccccttactgggctgggttcttaccttttgaaatcatgtatgggagggcgctgcctatcttgcctaagctaagagatgcccaattggcaaaaatatcacaaactaatttattacagtacctacagtctccccaacaggtacaagatatcatcctgccacttgttcgaggaacccatcccaatccaattcctgaacagacagggccctgccattcattcccgccaggtgacctgttgtttgttaaaaagttccagagagaaggactccctcctgcttggaagagacctcacaccgtcatcacgatgccaacggctctgaaggtggatggcattcctgcgtggattcatcactcccgcatcaaaaaggccaacggagcccaactagaaacatgggtccccagggctgggtcaggccccttaaaactgcacctaagttgggtgaagccattagattaattctttttcttaattttgtaaaacaatgcatagcttctgtcaaacttatgtatcttaagactcaatataacccccttgttataactgaggaatcaatgatttgattccccaaaaacacaagtggggaatgtagtgtccaacctggtttttactaaccctgtttttagactctccctttcctttaatcactcagccttgtttccacctgaattgactctcccttagctaagagcgccagatggactccatcttggctctttcactggcagccgcttcctcaaggacttaacttgtgcaagctgactcccagcacatccaagaatgcaattaactgataagatactgtggcaagctatatccgcagttcccaggaattcgtccaattgattacacccaaaagccccgcgtctatcaccttgtaataatcttaaagcccctgcacctggaactattaacgttcctgtaaccatttatccttttaacttttttgcctactttatttctgtaaaattgttttaactagaccccccctctcctttctaaaccaaagtataaaagcaaatctagccccttcttcaggccgagagaatttcgagcgttagccgtctcttggccaccagc

SEQ ID NO: 2069 - DNA, 2466 bp, Homo sapiens
ggacttccattgctgttgctgttgtccctagacaagcccgttagcaagaagcaccggcaggggagccatgcactccataggcttgggatcacccccgggaaagcgatcttccccgggctaccacccccagctgcagttctgtgttagtgcatccttcaaagctaggagaattctagggtgaccagtgagctaatgttgagtgagcaggtattgacttgaacacactgcaggcctttggctgtctcatgctgtccttactcttcttgggaacagtgagtcactcagctggccagggtggggatgcatcctggtgaagagacagctttccctgaagatgctacagaaagttactgtcagatttcatttgtttctgtttcctgagatcaactaacagaagaatctaatggtgagagtgtcttcattcatgttttacgttttatcaaggcacactggaaagggaattatgtggctgacttcccttggccttcccaagagaagattctgttcttatgtcagtgtggcttctggaagtgtctcctatcctcccatcctccaggcctgtggtgtgacttctgccccgaagttcctactatagtgagtcatctggggagaggccactgaaaagaggccttcccttcccatttcctcccctgcctccttagaacacactctaagtcagaacttaatctaagaagaaggaagctggaccaggaaccttggaagtcagccagccctagaacagtcagcctaaattttggccgtaatggcttttttggttttttgttttgtttctgagatggagtctcactccgttgccaggctggagtgctgtggcgctatctcagcttaccgaatcctccgactccctggttcaagcgattgtcctgcctcagcctccggagtagctgggattacaggcatgcaccaccacacccagctaatttttgtatttttagtagagacggggtttcaccgtgttgtccaggatggtctccatctcctgacctcatgatgtgcccacttcggccttccaaagtggccgcaaagtggcccacttcggccaaagtgcacttcggccttccaaagtgcattacaggcgtgagccaccacgcccggcctggccttttttttttttttcttttgagacacagtttcactcgttgcccaggctggagtgcagtggcgcaatctcggctcactgcaacttctgcctcctaggttcaagcagttctcctgcctcagcctcccaagtagttgggattacgggcatgcaccaccatgcctggataattttttcttatttttagtagagacaggatttcatcatgttggccacgctggtttcgaactcctgaccacatgtggtccacccaccttggcctcaattatgtgcattttggtatatttacttgtatttcaacatcttgtgagtttgaaaaacctgaaaggccagaatgcttccttttatttctcaccatttgggcagcacctaagtggttttgtaaaatgcagcatctggtgctgtgggtctctctcaggccttgagggacacttccttcctccccactcgcctcctctccactagactttggttcctagagggcgtggggccgggtctgaggttcttgcctgccttccctcccattggtctttggttgctcatccctctaactgcaccccttcttggtccttcctccacagacttcagataatagataagtcattagcaaaccagaccgaatctttagggtgaagagctccccaaagccatctggtgaggtcattgtggggaccagggactgattatttgtcacctggatcacaaagatgggactgtctgctcaggctggtggtgacaggatcctgacccgtggtcctctcccgctccctctgctccaccaggacacatgtataggacactgtgctgtgtgcagtggagaaatctccctgggccaggggaaagttcagacagtgcctctagattgtgttttgcctcctccaatgtagagttgacatctggaccccagagcccagcagggctttctgtcagacatgctagggtggtagaaatgggccctccaggtccccctgcagtgcactgggcagagacctccggaaagccggcagcgggagcgcttcctgggcagcttcccccagcacagtgttcccaaaccagtccatccggaaaacagtctgtacagcaaatgctgtgtgagatcttaggcttttcactttttttgttttgttttgtttttgaaagaaagaaaaaaatacaattaacaagcctcttttgtaaatgggtttcctttctatgtataaaatcgtggtggtcccttgtttttacatgttcatgctgtgtaattttgagatgttactgagatatgttctgaacataatgtgcatttttttctgtacagatgaaatgggagaatttaataaagagtttgcaggtttttacttgttaaa

SEQ ID NO: 2070 - DNA, 773 bp, Homo sapiens
agactgctgtgctagcaatcagcgagactccgtgggcgtaggaccctccgagccaggaaagggaactccctgaccccttgagcttcccgagtgaggcaatgcctcgtcctgcttcggctcgcgcacggtgcgcgcacccactgacctgcgcccactgtctggcactccctagtgagatgaacccggtacctcagatggaaatgcagaaatcacccgtcttctgcgtcgctcaacgctgggagctgtagaccggagctgttcctattcggctatcttggctcctccccctggctgtgggtttcttatagatggcttttattacattgaggtggagccagggcgtgtgatgggagcacggggcctgagctgcagcataagtttcctctgattttcaacctggaagacgataccgcagaagctgtgcccctagaaagaggtggtgcggagtaccaggctgtgctgcccgaggtcagaaaggttcttgcagacgtcctccaagacattgccaacgacaacatctccagcgcagattacactcaggacccttcagtaactccctgctgtaatccctaccaaattgcctgccgctgtcaagccgcataacagaccaatttttattccacgaggaggagtacctggaaattagatgattaccacatgctgagggcacctgacacagagcccggtgcagagcacttgcccactagaggtttgccactgagactgccagtgaagaacaaatcaatgcaagggcactgaagcttgtcgttctt

SEQ ID NO: 2071 - DNA, 539 bp, Homo sapiens
agaggctgcctgccgctttctttcgcagttttgcggcccaaggcttgggcgaatcagttcacatcaacacccctactagcctctccctccggggtcgaccatttatctccagcagcggaccaggcgcccgggccagggtgacatgcgcgccctgcctacacgcagctcggatcctctgctgtttctggagaggcctccacaggtagaagctccctggaacaactgctggaataaggttccagagtggaaggtggaagctccctcttgggataaaggatccacagtggaaaaaaaaaaagttgccctctgctggaaaacagcatctttgtcctctgagaaaaacagtctcccttcttacggaggccagtggattccatcctagaggctgtgttgaccgtatctccaaatagacaataacgaggcatcttgattcccacaactccagcagcacagggacctgaaatgaaggacagaaagcaggaagtggaggcaatagaaattgcagagtagagtgaagacaggtggcatttctgggattg

SEQ ID NO: 2072 - DNA, 601 bp, Homo sapiens
taagaacaactgctaggctggtttttattgaacatggtttggaaatctctcgaacaaatgattcctgagacccaccccaattccaatgctatcattttgtgagttttattattcatctgaattcttacaactggtgtttggtaaccagaagaaacctgcaaggtgatgctcatttggacccaagcagtggtgaaattgctgactgaatcaaatagtgtaaatagatccacagaagaagaagtataatgaacctgaaattgctaaaccccttttaaggaaaattttcctagcataatatatgaagatggtccctctctttgttgcccaggctggagtgcagtggtgcgatcttgactcactgcaacctctacctcctggattcaagtgattctcctgcctcctgtagtcccaagtagctgggactacaggcacccgccaccaagtccagctaatttttgtatttttagtagagatggggtttcaccgtattggccaagctagtcttgaagtcctgacctcaagtgatctgcccccctcggcctctcaaagtgctgggattacaggcgtgagccactccactgagcctggccttttaatcttt

SEQ ID NO: 2073 - DNA, 1320 bp, Homo sapiens
gaactccttaccccagctgcctggctgccctcagcttcccaaagctcaaataagaggggccggcggcgcggggaagaggaggagccaggaggctcggccgctccattcactcagcagcccaagcccggccaggcagcgcgcgctgctccttgggggcgccctcgcagctggggtgagggcgggtccgagggagcgtccctctcggagacaccctcctcttcaacccaacacgcgctctcagctggccggtgtggcacaaccctccccccacctccccttcttggccttcgccagtgtgggagcctcgtctcactggagagtccgttcagcttgcattgcataaacgttgtcgccattaaattctggctgcggacccgaagtgtgtgcgggcccaggacttactcgaagggcgcacttcttgggaatgcgcatcccgtaggcgcaggagaccctgaggaatccttgtgggggcggggaggggaagagcaccggtgcgaaccccggggtgccccctcgcccgacttggacttctccgactaaagaggtgggaggagttccctgcagcctgcggggccaagaagaaagtgctaagctgaggagccgcagtcggaggaccccagggacccgacaggaagtctccgtacgaccccaacggatccacatgcccggaagcccaggcgacactaagccagcgctggggaactgacgtactcctgcagtcgcagggcgctccatgcctctctgtcctcttctttgttgtgggtaacgttctctgcgggagacctgaggttttccaagggggacatgccagctacactggccttggcgccctgagctaagcaccaggactcacagcctagcacgaaggcaggtagcaccttcacccgccgcggacgataggcgctctcctgtacctcctttagctcgcgaggcccgcccttcgcgaggtcccagagaaaagcaggctgtggaaaactgggcgcccccttctttcacccaccttcttacccctgtcagcgccgagatctgtagcagaggttcctggtctgaaccaccgattggcaaagaaagctgcagattaaacttctcgttttacagagaaggaaactgaggcccagacagccgaaggagaggcagtctatggagcgcagcggtaaagagcaaggggttggtggccccagaatggaacctcagctctgccaggtaaccaacagctgtgtgaccctagacgagttccgcagtctctctgagcctcagtttccttactggtcaaacgggataatgggatactagcgcccacctcatagagttgttctgagg

SEQ ID NO: 2074 - DNA, 2615 bp, Homo sapiens
ttgaatctttgatacatatttgttgaggagcttgtcagatcactacctttcactgaacagtaaaacatggatcatttatttcacctcattttgcacttcaatgcaatttcactctttaggtggttgtacttggacagttaaatgaagactgtctttaagggtgcagggatggagaacacagcatatatgagaggtgggagggcagagacgccttgcgattcctgtgaggagggacttaccgtctcctccaaaacagaaattcagtgctgcagagacggtagcaaagtgcagttctcttgttaaaacacaggctaaaagcagtgactgcttaacttattaagcagagaaaaccaaaatgtcattttcaaccaaaattgagtgttagagtttatggtctctgttatgatacttttcaagacctgggaaatatttgtatcctttagtgaaaaggggaagaatcaattactgaaagccataagcttacagtaacggagccaattaatcctttgtcatctttgttgagtttagttttcttctgttcttagcacgtcagctagtagatctttgatgaactgttgctcctctttaaatgtttcttttattatattgatgatgtgcactcattcagtattcttattttaagctgcagtaatcactgtacatttgattgccatctgtacttcccttgaagcagctttgcttattacagccacacctgcatctgttttgactagcccacataacctacacatttttcatccaaagctatcccattaccttatttatgtccatttattttcatatatagtatctgccaaaatagtagcaaaagttttatcaatgtgtagatttcaatcagaaaaacctaagcaaaaggaaaaaaaagtgatattctaaaagccacacttcttttatcaccagtgcagttttttccatcatcataaacttagttttatgaaaatgttaatatcttggatttaaacattggggtagaaatcaggacaaaatttaaatgtcatatccaggacttaatctcagatattctggtagaagatatttagataaggttgtggctgcctgtcaagttttttaattttttaaattatataatgtcagaaaattaaatcacaaatgagccttccagattgtgaggaaaattacttggctgaaaatgactttgcataatgcccaaatcttgaagtatctgctcagatgtttgttccatctgaaatgctgccaaatccatctgtattgaggaaagagctatgaggtagtttcagagaaagtgaaaacaaaacaaagcaaaacaaaaatgctattacagaagttggacagcccaatgtgttaagtattatacacctggaacaagagcagcaaaactgaagctctttggaaagttatggcaacagtggtctgggaattctgggcctttagaaataatcattcccagtgatacagggatgtgcagcatccagacactgcttaatcacagtgagctgccgtcttccctgaataagttgtatcttataacattgaagtgaatgaaaatgtattagtatttgagaatttactattccttcacctccttgcacatgtaaattaaagatgttttggaaaatatgagaacttgatgttcactgccctagagcactattctccaaccttttagattcctgcaatctgttaataaaatattgtaggacaacaactctatagactgatacatgctgctctcaatccatatactacatattaggacagcttttcttttctaaatgagcatgaatataaatagaaattctagtattttcttcacctaccccagtgaatcatctttatattttacttgggaaactgctacagttggctagtgggtcttcacttttattgctttgagaaatggataaaagacatagactatcacccctccaaaaatgtgcatatggccccatacaagacacatgtactgccagagcttggggaactccctagaatctactcctagaccaccctagtgaagtaccatagaccatattgtctagatgggacaaaataataaattttgactaagaacttactgtttagagagaaaaaatagtaaataatgttcaaaatgagaagacaataactgacaagtctgtgatttttgggttagatgagaccacttttgatttttgaggaataaaaggagttagttttttggtcctgatgtgtaaaatgattcatggggtttcacatacagacaagtagttttcttttcagcaaatatttaacatatctctcaatatatttttcaccagtttttggtaaatatgcattgctataggtataccaagttttttttgttatgtttagtaactaatttcattttttctgtatatgtaaatatagctattggaccctgcattgaaaaccttcttagtactaacaacactccttttattattaccttcatagttactttaaatgacatatttatttcgagttttacttctggctgagttgcaaagtctatgagaatgttacctcctgtctcagaagcttgttagttattgtgccacctaaatattgtaataaaagtgtttaaataaaaatcttcttaaaatttaaaatga

SEQ ID NO: 2075 - DNA, 429 bp, Homo sapiens
ttttaaaaaaagtcacagaagaatgtggagacacttagcaaaacggactctcataagagtgttcgatggtgctgctactaatgaaagatttgaggaaactcctaaggtccctccagtgtacaacaatttggaacttccattttctcaacaactgctcttccaagatgctgcctcatttcagagccatgttttactcatgagctggtcctgtccagaaaacagccaatgctcattcccgacactttcttgtcactgctcttttctgttccctattttgtcagtaaggaagtaaacaaccgctaaaacaaccctctaacaacagaagaccctcatgagaacaccaggcagcagaagcttctttagcagtaaaagatatctggatattcatattttgttccatgatcttcaacattaaataaataaacttaa

SEQ ID NO: 2076 - DNA, 724 bp, Homo sapiens
attctcaagctgctgcagaactcgactgccattgaaatgtgcaaaagaaaaatttcctggcatcttaaaaaaaatgtcgaagtcagttactccacaagccctgtttgtaagagtccttgaaaagagaagcatcagttttccaatatgaagtaaatggagagtctggagttgcttctgttggccatcaatttcctgtggtgcagaggggctacaaatataatacagattaaactccctgcaggaagtctcttatggataagaacaagttcagcttcccattggggatgacagagctggtgctcaggtcatcaacatcctgctgaacctatgagaaagcatttgggacaacttgacaatgcatggtgagtcagaaagtttgctttttgattcaactatttaaaattccctattattttctttgtttttggctgccttttgcttaattgtcttgtcagctgtcctaagcctgacagccatatgaggtcaagcagaaaaactgaactggggaaataatcatagttcttcaatggattgtttctgaaaactgaatatgaggagagaatattcataggtatggcataacttccattttgtagctggaagaaatcatacccccaaattatgacaatttatagaattatgagttgaatgtttgtgtaagtatatgccttcatatttttaaacatgtataggctgcattattttctgccaataaattttatgg

SEQ ID NO: 2077 - DNA, 775 bp, Homo sapiens
agcgcgctaagctagctggcccggcaggggcgacggcggcgggtagctcgcgggctagcatcgagacgaggctcccgcccgacaggccgagcgcgaaacgggcgcgggcccctgccaggcagcatgctgcgcgctgggccaccagctgcgctagcgccgcacccagctcctgggaactcgagaacaccgagatgaggcccggggccggcgcggccatggcgagggcggcggcggggaggaggaagcgctccctacggccgtcgctagtacgcctgcgcaagggccggccctgccgcttggtttcgagtactttgggtgattgtctttggcacatgcgcagtgaggcaagtgaagcaccgcgaaggtcgggcagtcggtccggccctacccattgaatctttgcctgctgtgcctgagtcgaagtgagttcgggaagccagtgcccgaatgctcaaccttgctgtatcagggagggccggagaggggagctcaagaagaggacgtcctatcgaggtggcagggattttctgaaggagggcgtattttgatggaatctcactctgtcacccagactggagtgcagtggcccgatctcagctcactgcagcctccgcttcccaggttcaagcgattctcctgcctcagccttccaggcagctgggattacagtcgtcccagaagcggctggccgagaatttcttgcggaggacgactgtcagcccatagatgagacactgccccacgccgatgatgtttcctgcagagggtggccttg

SEQ ID NO: 2078 - DNA, 959 bp, Homo sapiens
atgctcagtgtaaattctcctggagcctgtcaagctatgtttgaactcgttccaggatagtggatttacttttttttccccaccaggaagaatactcgattagactgcattttgccttgcttttccttctccctttctctctctttctttctttctttctttctttctttctttctttctttctttctttctttctttctttctttctttctttttctttctctctctctctctctttctttctttcctttcttttctttctttcctctttctctttccttctttctttttttcttctttctttccttccttccttccatctttcttttctttctttccattttttttttcctccagaagaatggaaacagtattcttttccgatcagttcagtaatacaatgtccttcagtgtccatatgagcatttcagtggagaagaaaagaaactttgctacctgggaactgaagactacttaggcaaagatgggctgtctggaaagctggactcagcctggagcatgttccccagattgctattttgtgaaggcttccgcatacaaatgactcagatccaaacattcaaaaatgatcttggagggccatctggttcttgctggttctaaaagcttccttcagcctggagtatggatccagtacaaaagatagtgagagctgttcattgaggtttaacatgttccactgaccgaggctagaagctggctttaaaaaatagccaacactgatgctccaagggccaattgctgatgcttgtcacagtgaagatcccggtgttacacatccaatcgttcacctccttccaagactatgacattccaggaaaccttcactgctaagaggaactaagatctagagtatctcctcgaggaagtacaactgacttgtctttggacaaaattgagaagaactcataaacttggcttcctcgcttctgctcctc

SEQ ID NO: 2079 - DNA, 327 bp, Homo sapiens
ggaatagcgtcatcagttctataagagagcgtgtgccgaaggcctcggcctttcacattcgggaagcgtcgggattaggtgaaagaagctgagctgaacacattacgatggatgatggaaacataagactatcaagaaatccaagtggtaatgggcgaagtttattcagcatccggcaatggacttatcgtagttggggaaacgggtgttccgaataatatcctggaagttatcaggacacctattttaaatataggcctgaattttgtaaagtaatatttaaggtggtccgtgataattaaataaaatgcttaattcatgtggcta

SEQ ID NO: 2080 - DNA, 2255 bp, Homo sapiens
ctttcggagtggagtttcctagctggtgcctgtcctctcttgagcctttgtttcttgagtgagcactcactggggctgtggctccatgaactggatttcaggaaaccagccaaggcattctctctctctctccattcctagaaaggcagaaagcctgggaatgggttcggcaggaagatctctgtacctcaatctccattgctttcagcaccactggctttctccccagctcaagtgcaaaacctgccatcgttgctacctggggtgcctcagactcacccaagtcccccaggccagaggacatgctctcaagccttgtttcagaaagagggacccaaaggctgttagggaagagaaccagggtcctcaaacccagggttttctcacccactgcctctgctctggctgtggcctgccagacctctcctctgattttcgctttccttcctgccagtgcctttgtttatccgaggcgccaagatcccactgtgaagtctgaaaggaagaccagtggttctcgcttttcctctagatgctgtgtctcccaatgtcatcttctttcctctcaaagacaattggacgttgttacagattttcttggaatgagtaaatacctagcagtgggattgctggatcatatgaaaatgccagactatatttcatcagcaacatcggagagttccagttgctctacaccctcactagcacttaatattgttgatcgctgcctggattcacagaaggacaaattacaatgcattttgaaagactcgtctacagtcaactaaaataccagttatcacagacttcactggccttaatgaggaggctgagagggatttaattactgggacatgcaacgcttacaccaaactctgttcgattcacgacttggaaaagcaaatgtggatacagatgagtgtggacatggcttcagtaggaaatgtcgagtttgttcatcactctgaagtttcttcagctgcaacggaaactgcaccctccctcccgacttgttggttatcttgctgtgctcccaagaaggtattttctgctgacctgatagatcagacctttgtcattttgattgaaaagatgtttacctgttggtccccagcctcactcttctgaacctcagatccactgagtgtgtatccagaggtaagtatgtggtaagtatgcttgtcatttacattatctgtcagcatgagtattggtttcctagaaacctaatattgaaaacacttagcattgctaaaagcattaaatgaaataaagactcaatatagctgcactaatctgtgctttctaaatttactgatggacgtgaagaaagtaggttggcatggagtttatacaatttatggatcacactgatctgaattcagacagtgtgtgctcagataaaaatattgtttcctcccatgaggtttccaattttgcagagaagaatacctctgtttagctcattacttaacacaatgggtagctgggtggccttgcattctggaagtgaaatgacacaagaatgtctccactgcattctccagaggtaaagattctctggcacaaaatcacaaccaaggtggggttccaaaactatagaacaaatggcagcagccatgcagccagccttggttcgggtgggctgtaaaagcagaggttgtcctcgtgttatcagcactgacttcctgttgtggccacactgacagagatgagatggcagaaagcaggaaagagaccagagctgcaattgacagatggctggccaaagttgaagggtcagagactacaccaaagacttctcagaaaatacttgcctaggaggctctcacttggaaagatattcagggttgttaaacatatcctgttattaggaaaacgagagttttatctttctcttactcagaaagaaaaaacaaaaagaaaattagtgctcttaagaaaagctattttaatgttatccattataaaattagaaaaccttgaaaggcaaatgtttcttctgaccatttacactgagcttctttcattatctcatatgcaaccttgtggattgaaggtggagagtccttaggattacccaggaacatccctgtctgctccccctgctaggcaggaggagatttgaaaccacatgtgtctacttcatttctgtcacgggtaggacagtgtcatatactttgtaggtaactcaaagatattataggtaactcatagatattgattgaattaatgtttaataaaatgagaacacc

SEQ ID NO: 2081 - DNA, 3590 bp, Homo sapiens
cgttgttagaaaccacacaggtgtattccccactctgagatatgtcaatattaaataattccagttctgccacagtgtcttcaaaatagatgttgcaccggtctcctttcactagttctctggcacctctgaaccagttgactttgaatggaggggttcctctaataacgcttgtgaaggttacatttttgcctggtagtacttccaaaggttcaggttctttcacaaaagagggtggttctatatagacatggagaacaattaaaagatcctgtaagcttcagatggagttgcaattttgaataaaacattagagcactttcaaatgtttgtcaacatagatgtgcacctgaagaggaatttgtaagaaattccttacaagtttgactgtctactgaccttgtacagttagcactgcacgacattcatcagacccagcgacattagcagccacgcatgtgtaattgcccatatctgaggaatccagagaattcaactgcaatgtgcagacattatctgaaaatgtggtttggtactttgctccactgacaatcttggttttctcatgaaaccaggcaactgaaataggtgatgatccagctactttgcattccaagatgcaagaagcacctaacaccccaccagtatttttcagtcttcgtgtgaaagagggaggaactgctcggtctgtgtgaggaaaggtaagagactcatcatgatttgaaagaatagaagagacttgaaagaaggaaacttgtaaaaggaatttgcataagcaaccagaagaaaacagcagaactaacctgaaacatcaaccacagctgtgcagctgcttttcccaacattattttgaacctggaaagtgtatgtgcctgcatcttgcctttcaactgagagaatccttaaggaagagattttgttgtagaagctaaatttgtgtttttggctgctggtcaacagctttccatccttgtaccattcaacagagagttccggagtgccagccaccttacactccagagtgcacgtttctcctacagtcaccgtcatcggtcctgccttctcaacaatgactgcgggctctgaaataaaacgtgatatccatctgtcaaagtctgggatctttactctgtctctactatcacattcactaagattgtttctcccagtgagatggttatgttagggtgctctctctctcgactttaaagtgtgattccataattacatgcagtcatagaattatagctattttttattttaatattttttcttttcagttttttctttattttttgtttttcccaccactcttgctgtcgtcttatgtagcaattattcttaagaaatatatgttcgtgcatgactcaacttcaaaacaatttaaacaatgtgcattagatagtatatattgatttccacttgaccctctgtagatcaaagtctacaggttattgtgaattacttggtatttttgctctaccttaaggtgctaaagacaattctttgaaagttgttattcaaacaattgtttaattgtcattaattttatgtggaagctttgctatcaaatgccaacctttggagttcttgttagttttaacaattactcttgtagcacatgctgggctctgtattctttcatgcttaatcaaagagagtcatgattgtatctgctaattgatatagacaggtagttattaaacaataaaacagatgtctaatttttgttagaatcacagaaacagaaaagagtgtttgaaagatcaactatgtctttcctctagacctttcaaatagatgaggataaatatagttctagaagaaactcagaaaaagaatctgccagtaactcttagtaattcattccagcatttggcaccagtttctatcgtgggctattgtaccaacctaagaccatcagtgtggccatgttctccctcattccaccatcattcttgatttggcagatatactttccagcattagctggctctgcttttgcaaactgtagagttgcaacattttccacaaatgtaatcctgatgttttcactttctctaatcacttcttccttctctttaagccactggacaaaaataggctgggcgccttctatggatgcttgtaattcagcaggctctccggctacaacagtgaggctgttcagtttggagacaaatcttggtggttctgaacaggaaaagatggatggaaattgttgaaaagattgtccagatcatgcgagagtgaaaaaagtaggattttgcacatttatgacatttctgccatgtggatgaactatatttacctttcaattttacagtacaaacacaagtatcacttcccacttcattctgtgctttgcagtggtattcaccgatgtctgaagtgtccacattgagaatgtgaatacttgtgtggaagtttttggatgcaatcttgtatttcttgctgcttctgagttgccgcttgtctttgtaccataccacctcaaacggtggtgttcccgaaagttcacattcaagactgacttcagcatttttaagggtttctactataggagggaagctgctaaaaacaggtggctctgcaaaaaacaagaatttctcatgaattgggctactgaatttcacaaaatgaaaattttttatttgtctttaaattggaagaaaggtttaagatattctaatgggtaagtagagtccagcactaacactctcatgggataacagcctcagaagccatttgccttcacaagataaccagctagatgggcagagaacccagatagatcctagatgtcgttactgaacagttcaacattctatctactacaccttactgatgtatcttaggctacaaagattgatacaaaaattgcaaacaagcaagtatagcaataaataatgatttgcatgaagtatggaattctaatttcaaggatgattttttttgtatatgttctataacagacacttggaagtcatcacaacatccgtgatctaagtcttccatttcagcaaatgattactgcaataattgtcttaaaacaagacaaacttggcctttgtgacaaaaaaaaaaagcactggaaaattgcagcaaaaaaacacagatactatttgtaccaaggtatagtcatataatttttaaaggataggaagtgatccttgagagagaaggaaaaaatattattgtcctgttttaaacataagtttaaaacctgtattgctttcactttgcatagatatagtaaaagtgcttgttattaatgatatagattatagtgagaatgatatatctgtaagttgattgaaagcaaaagactaattttaaaatgcctacttcatttttttgtgcagttttgaaacatcacgtttgatgtttggcaaatgtgttgaggtaatcagaattatgacactggaataacaaaaatatttcataatgactagttacatgtaagcaaaattcaagaaggaaaccatctaaaaagggaaataatactagctcagaaaaatattctatgatctcaaatggaaactaaaatgatagtaaatgaataaagagctataatacccaggggagaa

SEQ ID NO: 2082 - DNA, 1095 bp, Homo sapiens
attgacgacgtggcaaatgagcagcaaattgatcaatacgaatgatcacgccccatgtgcatctcctcagcagccacaagagagacgaggtcactggaggataaacatccgtgactgcacctcatgatccatcacgcacgacggccgcagcatctcctgccagctgccggcacagacaagagcacgggatggacgaccgcggtagcaacgtggggctcatctgcctctctctgagcaggaagcccgctcacacggggagccaccaggctggactgggtgcagcttacggacgtggcgcgtgctgtgggcgtcgggccgcggctcctccatgcagtacttacactgctgtctgcagatcgcacccaatcaggagggaatggtccaggcaggtgggcaaggccacggtttggccaggtaaggctgggagggcccaggatgattgtgcgttgagccaggcagatctggagaggcggagggatggggacggagcgccatgcagaggccgctcggtcctcaggagctgagcatcaccctgggagtctcaaggagggtgtcccctggccttagcgggcagccagggccagcatgtggtctgtggcagccggtctcagaggtggcctggttcgcagtcttgctggatggagatccccagctcctagggcaagggcaggtggggtggggccgcctcggtcagctgataggaactgaactgagaaggctgtgagccgctgagtcgccctaactgcagggtggtcctgcgggcagtactgagcccgccctgctgggcaccccacagcccctgtggctctccagctgccactgaggccggacgcctcatgaggaggctcccatctgtgggtggcagaatgacggccccgaagaccccccgcttcctcacccgaagaccccccgcttcctcacccgaagaccccccgcttcctcacccgaagaccccccgcttcctcacccaaagaccccccgcttccttgccccgaagaccccgcttcctcaccctgggacctgtgagttcacacagcagcggggacctgcgactgtggacggcacatcagctccctcaacagggaggctgccctg

SEQ ID NO: 2083 - DNA, 584 bp, Homo sapiens
gtcagctgcatggagcttcgttcaagtattttctgagcctgatggatttacagtgatcttcagtggtctggggaataacgctggtggaaccatgcactggaatgacacacgcccggcacatttcaggatactaaaagtggttttaagggaggctgtggctgaatgcctcatggattcttacagcttggatgtccatgggggacgaaggactgcagctggctgagagggttgagatctctgtttacttagatctctgccaacttcctttgggtctccctatggaatgtaagaccccgactcttcctggtgaagcatctgatgcacgttccatccggcgctcagctgggcttgaggacttcgcaggtgagcagtaacggaaatcagccccgtttattcctcccagcacctgccttatccaactccccacgctgtggctgagtcccagcctgctatggaagcatcactggactcccattgaactctgtgcagattcgctgttcgtagacatggtacctgatggacaccaagctacgtacagcttcaaggccccttctttctttgctaataaaaaataaaaaataaaa

SEQ ID NO: 2084 - DNA, 1326 bp, Homo sapiens
aagagtgaacacacactttgtgccggctttaaagaacccagcacaaagccagtctgcatggcctacagacatattttgctggacaatgattacttgcttttctttttgtttttcttgtatatgcctgtttgattggttcctgacataccagaaaatcactgtcaaaacattagcttaacatttgttaaggaaacaaaaagacttcggtgaccacaccttataaaccaaacagttttgtaaatcactttggaaaatttcactaaaaaaaaaaatccttaacaatataataagtaaagaaaatttaaaaccacaaaacattactgtgtttgtagggggaggtctgatttacagagtaaccacatagtaattataattattagaatgtccagttttcaaaaaacgttacaaggcatacaaagaatgggaaagtgtggctcattcaaaggaacaaaataaagtgacagaaaatatccctaaggaaacccagacatcaaacttaccagacaaagactttaaaacaactctcttcattatactcaaatgtcaaaaggaaaacataaacaaagaaataaaggaatcagaaaaaatattaaaaagtaggaatatcagcaaagagataacaaattctggagtggaaaactacaatgataaaaatttaaaaatcaccagagggatttaagagtatatttgcacacacagaggaagccatgaacttgaagagaagaaaatggaaaatactgtctctgagaaacagaaagaataaaaaataaacaatgagcagagactaatgaatttgtgggacatcatcaaatagaccaacattcatattctagaaggataaattatgttgttaaaaagtttaccattctttcttttcacctttcttccttcttccttccccctcctcctttttacttttcttcctcttcctttctcttcttctttctcgccttcattatccctttcgctgtttctctttctccctttctcttttttcttttctttcaattttctcaattactaagagatgtttaagtacccttagcatgttagtagatatggttatttctccctttagttctcttttgagatttatagtcactcaaataaagagataacccaaacataagcgtcacaaacaggctttcataccattcttaatttggtcctgtaattcttcattgctgtattaattttctgatgcttttaaggatgttttataacaaattgtgtagctttttccaatggaatgtttattctgaattatctaattcatattgtaagtatagagggagtttaatataaaattattaaactaatatttgt

SEQ ID NO: 2085 - DNA, 454 bp, Homo sapiens
ctgaggctgcgtcttgggtgcgcagctccggcccagcctcacccaggggaacgcctcgcaggtgctcacggacgatggagaggtccgcgcccagggtgggagtccgcgcttccgggtgtgtctgcagctcggggcgctggagggtgggatgtgaccccgagacggcggcggcctggcacgtgatgtatgtgtgtccttgtctgatgtgtcggtgtccccgatggaccgggttccagtcccagctttgccactccccggcttgtgtgccttggggcaggtgactaccccgcgctgtgcctcagttgcctcatctgtacaatgggcatgattaaaaaatacctgtctcagagggcggttgtgaggattgagaggtaattctgtacgtgtaaaacgctgcggacgatacctggcacagactaaatactcataagaataaatacattaaataaactat

SEQ ID NO: 2086 - DNA, 522 bp, Homo sapiens
gggttgattctattatctgatgttttattaatctctgtgaaataattgtgtaaattaatatagagactagttgagaaatggtggataacatgaagaagatacccatttttgcatagattagatgtgatcaacctcacactatcatatgaaagttggctgcattggagagacaggaattaatattaaaaatgttttcagttcagattgatatcttacatttccaaatattattttcttttgaatatgtgtgagccactgtgcctggccccacattttttaaaacaatgactttagggtttcagcttttcctgtcttttaaaacaaattagccattttttattctaagaaagggttgtattataaagctgacctactactagcttatcagaaaaaacacgtgggtctcatatctgattctcctatgtagccaaaagtgccatttgtaagtctactaaatgacggatattttctgaagatcttttgcctggaaaacaaatagtgcattaaaaagcttttttggta

SEQ ID NO: 2087 - DNA, 815 bp, Homo sapiens
tgtttgctaagtcaccgcgcaggaggagacagaatcagaggtgacgaatgtaagtccacccattggcttaagatccagtatcctgagtgagttgcacagatcctctccttcagtcctctcaggaactctagaggtccctgcagttatgaagaactaattaaaggcatgaaatgttcctctgcaagtttcattgaccatattgggcctacagtccatttccaaataaatatctaaggtagcaaccttggcagtgggagcccagcaggtcccgtctttgtccctgtgctgatacagagagactctccgtgctgtggacgcctccatctgggcacatgtttcagttgttttctaaataccaagagcacagattgctcagtaataatagctctcctgcaaatctggaatcacttaggcagctgcagtgcctctaagcctccttgcatccaaggctgtgatcaaggaggactggtgtctgagtgggcttgagaagggcccggagaacagcgggtttcctgatcacaaatcagcctgtcattcagcatgtgttcccttggtgactcagggcgatatctgcccttctccggaggtcaagggctcatcgtgtcaattgtggtcttgagtttgttttttttttcctcttgaaatcattgtaattaagctaaaagtatagtgttggtatccagcacatgtttgcaaagtatttaacaatgagcaaaaactttaagaataaattaaagcatctagtttactttttgccaacagccaggttcctgctagaaatgattttgaaataaatgttgtcttggaaatagaaa

SEQ ID NO: 2088 - DNA, 327 bp, Homo sapiens
gtgactgccaggtaatgctaaccccgaatccttggtgcctgtgttatgcaccatatgctgaatttcggttccagctgtgtgctaggctgggtctgatctggcaaagaggaactggctccacagctctgggcagaatccactgctgctcccacacagagaagaccaggggaaccgcagtcccactctgatagtgagagcaaaggaaagtggcaacaatgaaggaataaaacccagctcgtccccctgttcctcatgcccaacccttgccaagacttcaggtaacagaaggaagagaacacatggatgggcacatgctgggcccggaag

SEQ ID NO: 2089 - DNA, 93 bp, Homo sapiens
ccttccggcgtcccaggcggggcgccgcgggaccgccctcgtgtctgtggcggtgggatcccgcggccgtgttttcctggtggcccggccatg

SEQ ID NO: 2090 - DNA, 1281 bp, Homo sapiens
cgattcctctgccctggatagagagcggtgtctcataacagtttggaaactacaaaagtttccctggcaggatgaatgattgactcggcaacatgttcttgccttttggagttgccctccaatttttccaggcttgattctgtaaatcatttcatcttgtaaaaatactgggctgtgagcacggatgatctcaaagatgaggaaacagaagctgggatatgtgagtaaacatttccaaggtcctgcagctaatcaatggttgacaacttctttcctctgcctatgttgccatccatgtcatggtttgtgtcaagactctaggagaagtctaccatcagcaccacagctactgtgcacaaatccagaatgccagactgaagtcagaaggaaaggtaaaagtccaattctcagatggcaattcagacttagaaaacagaatgagaaaaagcagtggtgtccatctctcctcaacgatgaattcatgtcttaaaatgtatctgcatctatttctttctgtctaccatccatccatccatctttccttctttcttctttctctttctctttctctccctccttccttctcttccttcgttttcataagtaaaactagtactaatgcagaagtctgaaattagactttaaaaacgagtactactctttttttccccctttttgagagagctggtgattttcttccttgcttggcattaactgtcttactgtcttatgatacttatctttaatgtggcatatcagagaacctctttgaaaatgttacggcttaatgcggctcagggaaataaaagcccactttaaaaaagccaaaataaagctttctgatacggacttcacaattaatttttgagaaggtccactttcatatgcaagcaaatctgtttagaaatgttttaaattttaaagcatgcatacacatataaaactaatttatgtgtttttaaatgctgtttaaaattttaaagcatatatagagagcaagagagcaagagagggtgctcaatatgcatcataatagcatgagaactgaaaaataaaagtttacttgcaaacttaaccggctttgcaatgcaacagactaaacaagtcacattttatacaatgtatatgtttataatatgagtgcagcatgccaatgtgctatttagatcattgtcctggttgaatgaacaagctcacaggttcaccatttaatatttgttctcttaaaaacatgaaactcgttttgaaaataccggcttaaatgggcattattaagtcttt

SEQ ID NO: 2091 - DNA, 3088 bp, Homo sapiens
tcgctcaggatgtcactctctttgatgagattgtcggcaaaatctgccaagccggggtgtgggtatttcccgggagaagtgctcttggagtcctgcctgccctcagccgtggggcagccgctgctctgggtgccgctgctcaagctgccctcgtcagagtccagcaaggttcccttgccagtctcaccggtccactcgttgctggaggaattcttcaggacttttaaagacctggatgaagctacagtgagaaaaacacatttcgctgtgatacagaaacaggttacacaatgtgtaatgtttgcctcaaagcttgtgtaagatttaacattaagattttattttatgatatgacttcagttagcaactatcctggtaattaggcaaaaatgtagctactgaaaacatggacatttttgacttaggtttacagttgtaagttaggcaattcagcatttttagattaccagagctcaattatgtaaatagaactagacactagaaactactacatgggctaagattcttattttgccaaggagtaagttgaaaagttaattggtaataataaatctaggctcctttctttcactaaggtgctttgtaatttgatcatgaagatcacaccatattcctatgcatcttctcaccttgtggatttcccttgctgctcaattaaaagtagaaaatgcccctccccccccctttttttttaaagacagtgtcttgctctgccacccaggctggagtgcagtggtgtgatctctgctcactgcaacctccgcctcctgggctcaagtgatcctcccatctcagcctcctgagtagttgggactataggtgcgcatgatcacgcctggctaatttttatattttttttgtagagatggggttttgccatgttgcccaggttggtctcaaactcctgttctcaagagctcaagggatccacctgccttggcctcccaaagtgctgggattacaggcatgagccaccatgcccagcctagaaaatgctctttatctctcatatgagaactgtctctgctggaatttcaaaacaactttctgaaattttatgttataggtgtgtgtgtgtgtgtgtgtagttctgttctcttggattgaaagaaggaagggagttctcagttttggtgtttctacaaagtaataacagcatgttattttgatggccagtttattttgacaatggagaaaatagtaaatatgtggtagatctgaagaggtcacactgatttgacatgaaaaagcgaagttttacattttctaagcctaaaaacaagaaagataataacaaaatagttaatgtagaaataaggttctgaaaacttaagctgaaattttagaaacaagcagaaagaacaacgtgatttgaaatgcttacttggtgccctatcgattaagaacgagtataagaggccccttaacttagatggcattacatcccaatcaacccattgttaagttgataatatggaaagtcgagaatgcatttaatgtacctactaaccactgcggcttagcctagcctgccttcagtgtgctcagaacacttacattagcctatggttgggcagaacacaaggcctgttttataattaagtgttgagtatctcatgaaatgtattgaatgctgcactagaagcaaaaaacagaatggttgtctgggtactcgaagtacgatttctactgaatgtgtgtcactttcacaccacggtaaagtcgaaaaattgtaggttgaaccatcagaaggtggagaccctctgtgtaaggttcttgatcttcattcagcattgaccttcaggatgcctggcactgttctgagcactgggaatacagcagtgaggaaaacaaagtccctggacccatgcacatcttagtggaagaaacaaaatcgtacatttggactatgtcagcgggtaggaagacaagggactgggggttgggggtggctgtattttacagtagaacgtctgggagcaagaggcatgtttaggtttcttaaaaggagataaaggtacctcgatgacttacaaagtgaaaagtcacagctatgttacaagagcatatatccttttcagaagctcataatattttgttgaataaacacaaggctagcaaaattctcacctaatttggccgaaacaggaactcggttcttaagaggtaccaggcgatccttacacgttttctccagtggtaattcacactttatgtgacgcctgaagttctccctcagaatagaacgaatcaccttaacaatgttggttttgctttcactgtcactgggtggggggggagagaaaacagcagaagtgtccacagtgttcatcgtgcttccattccacgcccgcctgtgttcctgtgccttgcacctgctggaccaggctgccagccagccacccagcagcagtgccatgtggcctcccgtacagaaggagattttcctccatctgaactgccttcaccctctctctggagcccctctctggggaagaggagattcagtggatcctattcttcaacctcctttgcagttttgccctttccttggaaggaacaggagctggggtacttgaggtaaaagaggcctgccccaaatgtggtcattttctcgaaaacataagcacttctgacaaaagttaaacagaagcccagcaggtcactgcatgactcagcctgctggcctcttctgtcaccagatacctgtcaccaaaacaaggttactctggaaggatctctgaacattttccagagtcaaagatttttttctttttatatcacctacagtactacctaaccttaaggaattttctgctatattctaaatttgtaaaaacataaatttgtggatctttgttcttctaacacattttagggtatcaaggcagaaaggaaaatgttgaaaactattgatagggaaaataaggaaacaatgaaaggcatttggcaaagaaaaagctatccaccagcatttagtttctcccagaagtctgctaaggaacatcaaaacaacctctcttgtcctcattttccttgtctataaaataaaaggcaccaaaaatta

SEQ ID NO: 2092 - DNA, 437 bp, Homo sapiens
aggctcccagactctgtagtgaagaggcatgtaaagagacaaatgagagcatgccatgcaaactgctaaagttagcctttgcctttttcccagagactctctaggaatttttcccatctgctgactaggagcattcaaattctcagcacagaaggttcttgctgttttgctgcaccaagttcttggaaatcacatacagatccccctaaaggagattggaacagtgcaatatttggggactgcattctccacccaaggatttagcatcaaatgaaaaacaggttcatgttctgacaaggtagtcacaacatttggccattttcttgggtacaagctaagacctcagaagacattactgatcaacacatcctgtttagcagtagtgacagaacattgtgcattaaaaattcaatgatatttaactttgaaattataaa

SEQ ID NO: 2093 - DNA, 1887 bp, Homo sapiens
gcggccgcctctccacgccctgccccgggccgcccgccaggccgccgtttcccggagccggccccctcccgccctcgcggccggctgatgtcatctgcacacaactttccgcttcccggcccgtctcggggccctgagtcatcgccgcccccggccccgacgctggcctgcggcgtctgtttgtgcagagcgaggccccgccggccgggcttgacgtcaggctggcagggcctggaacggccccgcatcgcggccccctgggggcaggacgacaccgctgggggccgagggcagggcacgccttcggaatccggcttcgaagccggccgcctgacctggggcaagtgctttcaactctctgaacttcggttcctcatctgccagttggcagacgctcagcaaatcttcctagactcacggggcgaattgtacagttgggtaaatcgaggcccagagatggcaaaaggaccgtccaaggtcgtacagccacccggaattacaattcttttctgccgggtcacacgctgtcatccacgtgttacctaagagagctttccagcctgtgctaagaaaactgccccacatcatctgcagtaggacgggggagttggagccctggtcaggccactctgctactgaccacagttttctcatctctaaaaaggcgcagtaacaatataattaccgtatgcagtcccccaggatacagggtcaaaggagagcacaaccatcgcagttggaagcccatggggcagcagggcccaggacacagtgagcatacaatagacattagctgctgtggtgtcttgatttcaagcccagtgcagatgcatctgacttacgaaacttcagtgacacctgctctgtgccagacactgaagatggagcagtgaacagcactgacccagcctgtcctcctgttgcctgcaggccagaagcaaggtctcgctgtgttaccctggctggagtgcagtggctacttacaggcatgatcatagcatactgcagcctcgaactcctggactagagcagttctcctgcctcagcctccagagcagctgggactgcagacacgcaccacagagcccagcctgagtcattttgattctgtaactggcttcctctcggcgggcaggctcacaccctccacccccagctggagatggaaggaggatgctcaccgcccattcctcatgcaggccatcgatggaaatgtcagacagtgcgagtccacgcctgaacacttctggggtccgctctgggactgacactggcagatccatcggtgagctcccgcctgccacctctgggcctgcattgcggtgatagggccaagggcctgggccttcaattctccagacttgccaaaatgctcagcgcaggcctcgtcggcaactgcagacaagcagaggcagcacctgggctctgcctgtgcctggcacagtgaagcgagggtgggggcaggaatgagggtcctctccatgcaaggggggaagatagaagaacaaaatttcaccctaatgtagtgtctttagaccgtgcaatgttgtgctcctgttagtctgatatcaggggcttgcagcctggcaaaggaaaaaaaacaggctgaggcacatgatagaagacaggcagggatgccacaatcataaccatggcaaagaccaggatcagaaaggcccaccatctctgaccccaaatccctgggcagatggttccagaactcagaattttcccagttgtagaaagatggggccaggtgcagtggctcacgcctgtaatcccagcattttgggagtacaaggtgggcggatcacctgaggtcaggagttcgagaccagcctggccaacatggtgaaaccctgtctctactaaaaaaaaaaaaaaaaa

SEQ ID NO: 2094 - DNA, 19275 bp, Homo sapiens
ccttcagttcttaaagcgctgcaattcgctgctgcagccatatttcttactctctcggggctggaagcttcctgactgaagatctctctgcacttggggttctttctagaacattttctagtcccccaacaccctttatggcgtatttctttaaaaaaatcacctaaattccataaaatatttttttaaattctatactttctcctagtgtcttcttgacacgtcctccatatttttttaaagaaagtatttggaatattttgaggcaatttttaatatttaaggaatttttctttggaatcatttttggttgacatctctgttttttgtggatcagttttttactcttccactctcttttctatattttgcccatcggggctgcggatacctggttttattattttttctttgcccaacggggccgtggatacctgccttttaattcttttttattcgcccatcggggccgcggatacctgctttttatttttttttccttagcccatcggggtatcggatacctgctgattcccttcccctctgaacccccaacactctggcccatcggggtgacggatatctgctttttaaaaattttctttttttggcccatcggggcttcggatacctgctttttttttttttatttttccttgcccatcggggcctcggatacctgctttaatttttgtttttctggcccatcggggccgcggatacctgctttgatttttttttttcatcgcccatcggtgctttttatggatgaaaaaatgttggttttgtgggttgttgcactctctggaatatctacacttttttttgctgctgatcatttggtggtgtgtgagtgtacctaccgctttggcagagaatgactctgcagttaagctaagggcgtgttcagattgtggaggaaaagtggccgccattttagacttgccgcataactcggcttagggctagtcgtttgtgctaagttaaactagggaggcaagatggatgatagcaggtcaggcagaggaagtcatgtgcattgcatgagctaaacctatctgaatgaattgatttggggcttgttaggagctttgcgtgattgttgtatcgggaggcagtaagaatcatcttttatcagtacaagggactagttaaaaatggaaggttaggaaagactaaggtgcagggcttaaaatggcgattttgacattgcggcattgctcagcatggcgggctgtgctttgttaggttgtccaaaatggcggatccagttctgtcgcagtgttcaagtggcgggaaggccacatcatgatgggcgaggctttgttaagtggttagcatggtggtggacatgtgcggtcacacaggaaaagatggcggctgaaggtcttgccgcagtgtaaaacatggcgggcctctttgtctttgctgtgtgcttttcgtgttgggttttgccgcagggacaatatggcaggcgttgtcatatgtatatcatggcttttgtcacgtggacatcatggcgggcttgccgcattgttaaagatggcgggttttgccgcctagtgccacgcagagcgggagaaaaggtgggatggacagtgctggattgctgcataacccaaccaattagaaatgggggtggaattgatcacagccaattagagcagaagatggaattagactgatgacacactgtccagctactcagcgaagacctgggtgaattagcatggcacttcgcagctgtctttagccagtcaggagaaagaagtggaggggccacgtgtatgtctcccagtgggcggtacaccaggtgttttcaaggtcttttcaaggacatttagcctttccacctctgtcccctcttatttgtcccctcctgtccagtgctgcctcttgcagtgctggatatctggctgtgtggtctgaacctccctccattcctctgtattggtgcctcacctaaggctaagtatacctccccccccaccccccaacccccccaactccccacccccaccccccaccccccacctccccacccccctacccccctacccccctacccccctctggtctgccctgcactgcactgttgccatgggcagtgctccaggcctgcttggtgtggacatggtggtgagccgtggcaaggaccagaatggatcacagatgatcgttggccaacaggtggcagaagaggaattcctgccttcctcaagaggaacacctaccccttggctaatgctggggtcggattttgatttatatttatcttttggatgtcagtcatacagtctgattttgtggtttgctagtgtttgaatttaagtcttaagtgactattatagaaatgtattaagaggctttatttgtagaattcactttaattacatttaatgagtttttgttttgagttccttaaaattccttaaagtttttagcttctcattacaaattccttaacctttttttggcagtagatagtcaaagtcaaatcatttctaatgttttaaaaatgtgctggtcattttctttgaaattgacttaactattttcctttgaagagtctgtagcacagaaacagtaaaaaatttaacttcatgacctaatgtaaaaaagagtgtttgaaggtttacacaggtccaggccttgctttgttcccatccttgatgctgcactaattgactaatcacctacttatcagacaggaaacttgaattgctgtggtctggtgtcctctattcagacttattatattggagtatttcaatttttcgttgtatcctgcctgcctagcatccagttcctccccagccctgctcccagcaaacccctagtctagccccagccctactcccaccccgccccagccctgccccagccccagtcccctaaccccccagccctagccccagtcccagtcctagttcctcagtcccgcccagcttctctcgaaagtcactctaattttcattgattcagtgctcaaaataagttgtccattgcttatcctattatactgggatattccgtttacccttggcattgctgatcttcagtactgactccttgaccattttcagttaatgcatacaatcccatttgtctgtgatctcaggacaaagaatttccttactcggtacgttgaagttagggaatgtcaattgagagctttctatcagagcattattgcccacaatttgagttacttatcattttctcgatcccctgcccttaaaggagaaaccatttctctgtcattgcttctgtagtcacagtcccaattttgagtagtgatcttttcttgtgtactgtgttggccacctaaaactctttgcattgagtaaaattctaattgccaataatcctacccattggattagacagcactctgaaccccatttgcattcagcagggggtcgcagacaacccgtcttttgttggacagttaaaatgctcagtcccaattgtcatagctttgcctattaaacaaaggcaccctactgcgctttttgctgtgcttctggagaatcctgctgttcttggacaattaaagaacaaagtagtaattgctaattgtctcacccattaatcatgaagactaccagtcgcccttgcatttgccttgaggcagcgctgactacctgagatttaagagtttcttaaattattgagtaaaatcccaattatccatagttctgttagttacactatggcctttgcaaacatctttgcataacagcagtgggactgactcattcttagagccccttcccttggaatattaatggatacaatagtaattattcatggttctgcgtaacagagaagacccacttatgtgtatgcctttatcattgctcctagatagtgtgaactacctaccaccttgcattaatatgtaaaacactaattgcccatagtcccactcattagtctaggatgtcctctttgccattgctgctgagttctgactacccaagtttccttctcttaaacagttgatatgcataattgcatatattcatggttctgtgcaataaaaatggattctcaccccatcccaccttctgtgggatgttgctaacgagtgcagattattcaataacagctcttgaacagttaatttgcacagttgcaattgtccagagtcctgtccattagaaagggactctgtatcctatttgcacgctacaatgtgggctgatcacccaaggactcttcttgtgcattgatgttcataattgtatttgtccacgatcttgtgcactaacccttccactccctttgtattccagcaggggacccttactactcaagacctctgtactaggacagtttatgtgcacaatcctaattgattagaactgagtcttttatatcaaggtccctgcatcatctttgctttacatcaagagggtgctggttacctaatgcccctcctccagaaattattgatgtgcaaaatgcaatttccctatctgctgttagtctggggtctcatcccctcatattccttttgtcttacagcagggggtacttgggactgttaatgcgcataattgcaattatggtcttttccattaaattaagatcccaactgctcacaccctcttagcattacagtagagggtgctaatcacaaggacatttcttttgtactgttaatgtgctacttgcatttgtccctcttcctgtgcactaaagaccccactcacttccctagtgttcagcagtggatgacctctagtcaagacctttgcactaggatagttaatgtgaaccatggcaactgatcacaacaatgtctttcagatcagatccattttatcctccttgttttacagcaagggatattaattacctatgttacctttccctgggactatgaatgtgcaaaattccaatgttcatggtctctccctttaaacctatattctaccccttttacattatagaaagggatgctggaaacccagagtccttctcttgggactcttaatgtgtatttctaattatccatgactcttaatgtgcatattttcaattgcctaattgatttcaattgtctaagacatttcaaatgtctaattgattagaactgagtcttttatatcaagctaatatctagcttttatatcaagctaatatcttgacttctcagcatcatagaagggggtactgatttcctaaagtctttcttgaatttctattatgcaaaattgccctgaggccgggtgtggtggctcacacctgtaatcccagcactttgggaggctgaggtgggaagatcccttactgccaggagtttgagaccagcctggccaacattaaaaaaaaaaaaaagtaagacaattgccctggaatcccatccccctcacacctccttggcaaagcagcaggagtgctaactagctagtgcttcttctcttatactgcttaaatgcgcataattagcagtagttgatgtgcccctatgttagagtagaatcccgcttccttgctccatttgcattactgcaggagcttctaactagcctgaattcactctcttggactgttaatgtgcatacttatatttgctgctgtacttttttaccatgtaaggaccccacccactgtatttacatcccagctggaagtacctactacttaagacccttagactagtaaagttagcgtgcataatcttaggtgttatatacacattttcagttgcatacagttgtgccttttatcaggactcctgtacttatcaaagcagagagtgctaatcaatattaagcccttctcttcgaactgtagatggcatgtaattgcagttgtcaatggtccttcaattagacttgggtttctgacctatcacaccctctttgctttattgcatggggtactattcacttaaggcccctttctcaaactgttaatgtgcctaatgacaattacatcagtatccttccttttgaaggacagcatggttggtgacacctaaggccccatttcttggcctcccaatatgtgtgattgtatttgtcgaggttgctatgcactagagaaggaaagtgctcccctcatccccacttttcccttccagcaggaagtgcccaccccataagacccttttatttggagagtctaggtgcacaattgtaagtgaccacaagcatgcatcttggacatttatgtgcgtaatcgcacactgctcattccatgtgaataaggtcctactctccgaccccttttgcaatacagaagggttgctgataacgcagtccccttttcttggcatgttgtgtgtgattataatcgtctgggatcctatgcactagaaaaggagggtcctctccacatacctcagtctcacctttcccttccagcagggagtgcccactccataagactctcacatttggacagtcaaggtgcgtaattgttaagtgaacacaaccatgcaccttagacatggatttgcataactacacacagctcaacctatctgaataaaatcctactctcagaccccttttgcagtacagcaggggtgctgatcaccaaggccctttttcctggcctggtatgcgtgtgattatgtttgtcccggttcctgtgtattagacatggaagcctcccctgccacactccacccccaatcttcctttcccttccggcagggagtgccctctccataagacgcttacgtttggacaatcaaggtgcacagttgtaagtgaccacaggcatacaccttggacattaatgtgcataaccactttgcccattccatctgaataaggtcctactctcagaccccttttgcagtacagcaggggtgctgatcaccaaggccccttttcttggcctgttatgtgcgtgattatatttgtctgggttcctgtgtattagacaaggaagccttccccccgcccccacccccactcccagtcttcctttcccttccagcagggagtgccccctccataagatcattacatttggacaatcaaggtgcacaattataagtgaccacagccatgcaccttggacattattggacattaatgtgcgtaactgcacatggcccatcccatctgaataaggtcctactctcagatgccctttgcagtacagcaggggtactgaatcaccaaggccctttttcttggcctgttatgtgtgtgattatatttatcccagtttctgtgtaatagacatgaaagcctcccctgccacaccccacctccaatcttcctttcccttccaccagggagtgtccactccatatacccttacatttggacaatcaaggtgcacaattgtaagtgagcataggcactcaccttggacatgaatgtgcataactgcacatggcccatcccatctgaataaggtcctactctcagaccctttttgcagtacagcaggggtgctgatcaccaaggccccttttcctggcctgttatgtgtgtgattatatttgttccagttcctgtgtaatagacatggaagcctcccctgccacactccacccccaatcttcctttcccttctggcaggaagtacccgctccataagacccttacatttggacagtcaaggtgcacaattgtatgtgaccacaaccatgcaccttggacataaatgtgtgtaactgcacatggcccatcccatctgaataaggtcctactctcagaccccttttgcagtacagtaggtgtgctgataaccaaggcccctcttcctggcctgttaacgtatgtgattatatttgtctgggttccagtgtataagacatggaagcctcccctgccccaccccaccctcaatcttcctttcccttctggcagggagtgccagctccataagaaccttacatttggacagtcaaggtgcacaattctaagtgaccgcagccatgcaccttggtcaataatgtgtgtaactgcacacggcctatctcatctgaataaggccttactctcagaccccttttgcagtacagcaggggtgctgataaccaaggcccattttcctggcctgttatgtgtgtgattatatttgtccaggtttctgtgtactagacaaggaagcctcctctgccccatcccatctacgcataatctttcttttcctcccagcagggagtgctcactccataagacccttacatttggacaatcaaggtgcacaattgtaagtgaccacaaccatgcatcttggaaatttatgtgcataactgcacatggcttatcctatttgaataaagtcctactctcagaccccctttgcagtatagctggggtgctgatcactgaggcctctttgcttggcttgtctatattcttgtgtactagataagggcaccttctcatggactccctttgcttttcaacaaggagtacccactactttttaagattcttatatttgtccaaagtacatggttttaattgaccacaacaatgtcccttggacattaatgtatgtaatcaccacatggttcatcctaattaaacaaagttctaccttctcaccctccatttgcagtataccagggttgctgaccccctaagtccccttttcttggcttgttgacatgcataattgcatttatgttggttcttgtgccctagacaaggatgccccacctcttttcaatagtgggtgcccactccttatgatctttacatttgaacagttaatgtgaataattgcagttgtccacaaccctatcacttctaggaccattatacctcttttgcattactgtggggtatactgtttccctccaaggccccttctggtggactatcaacatataattgaaattttcttttgtctttgtcagtagattaaggtcataccccatcacctttcctttgtagtacaacagggtgtcctgatcaaccaaagtcctgttgttttggactgttaatatgtgcaattacatttgctcctgatctgtgcactagataaggatcctacctactttcttagtgtttttagcaggtagtgcccactactcaagactgtcacttggaatgttcatgtgcacaaactcaattctctaagcatgttcctgtaccacctttgctttagagcagggggatgatattcactaagtgccccttcttttggacttaatatgcattaatgcaattgtccacctcttcttttagactaagagttgatctccacatattccccttgcatcaggggcatgttaattatgaatgaacccttttcttttaatattaatgtcataattgtatttgtggacctgtgtaggagaaaaagaccctatgttcctcccattaccctttggattgctgctgagaagtgttaactactcataatctcagctcttggacaattaatagcattaataacaattatcaagggcactgatcattagataagactcctgcttcctcgttgcttacatcgggggtactgacccactaaggccccttgtactgttaatgtgaatatttgcaattatatatgtctccttctggtagagtgggatattatgccctagtatcccctttgcattactgcaggggctgctgactactcaaaacttctcctgggactgttaataggcacaatggcagttatcaatggttttctccctccctgaccttgttaagcaagcgccccaccccacccttagtttcccatggcataataaagtataagcattggagtattccatgcacttgtctatcaaacagtggtccatactcccaacccttttgcattgcgccagtgtgtaaaatcacaggtagccatggtgtcatgctttatatacgaagtcttccctctctctgccccttgtgtgcccttggcccctttttacagactattgctcacaatctcaggtgtccatatttgcagctattaggtaagattgtgctgtctccctcttcccttccctctgccctgccccttttgcctctttgctgggtaatgttgaccagacaaggccctttctcttggacttaaacaattctcagttgcactttccttggtcccacccattatacatgaacccctctacttcctttcgcattgcttctgagtatgctgactacccaaagccccttctgtgttattaataaacacagtactgattgtcccatttttcagcccatcagtccaagatctccctaccactttggtgtgttggtgcagtgttgactatgaaaagcaggcctgaactaggtggataagccttcactcattttctttcatttattaatgatcctagtttcaattattgtcagattctggggacaagaaccattcttgcccacctgtgttactgctttactgtgcaaaatactgaaggcaagtcagacccagggagctggattgccatcctttattttgtgtttccagtgtacactataaaattgtctccccaggaaggaaggttggcactttctctgcattcttctttccagagcagattgcctggttaagaatctcttgttgtcccctttgtatattgttattgtaaagtgccaaatgccaggatacagccagaaaaattgcttattattattaaaaaaatttttttaagaaagacatctggattgtagggtggactcgataacctggtcattatttttttgaagccaaaatatccatttatactatgtacctggtgaccagtgtctctcattttaactgagggtggtgggtctgtggatagaacactgactcttgctattttaatatcaaagatattctagagtggaactcttaagaccagtatctttgtgtgggctttaccagcattcacttttagaaaaactacctaaattttataatcctttaatttcttcatctggagcacctgcccctacttatttcaagaagattgcagtaaaacgattaaatgagggaacatatgcagaggtgcttttaaaaagcatatgccaccttttttattaattattatataaaatgaagcatttaattatagtaataatttgaagtagtttgaagtaccacactgaggtgaggacttaaaaatgataagacgagttccctattttataagaaaaataagccaaaattaaatattcttttggatataaatttcaacagtgagatagctgcctagtggaaatgaataatatcccagccactagtgtacagggtgttttgtggcacaggattatgtaatatggaactgctcaagcaaataactagtcatcacaacagcagttctttgtaataactgaaaaagaatattgtttctcggagaaggatgtcaaaagatcggcccagctcagggagcagtttgccctactagctcctcggacagctgtaaagaagagtctctggctctttagaatactgatcccattgaagataccacgctgcatgtgtccttagtagtcatgtctccttaggctcctcttggacattctgagcatgtgagacctgaggactgcaaacagctataagaggctccaaattaatcatatctttccctttgagaatctggccaagctccagctaatctacttggatgggttgccagctatctggagaaaaagatcttcctcagaagaataggcttgttgttttacagtgttagtgatccattccctttgacgatccctaggtggagatggggcatgaggatcctccaggggaaaagctcactaccactgggcaacaaccctaggtcaggaggttctgtcaagatactttcctggtcccagataggaagataaagtctcaaaaacaaccaccacacgtcaagctcttcattgttcctatctgccaaatcattatacttcctacaagcagtgcagagagctgagtcttcagcaggtccaagaaatttgaacacactgaaggaagtcagccttcccacctgaagatcaacatgcctggcactctagcacttgaggatagctgaatgaatgtgtatttctttgtctctttctttcttgtctttgctctttgttctctatctaaagtgtgtcttacccatttccatgtttctcttgctaatttctttcgtgtgtgcctttgcctcattttctctttttgttcacaagagtggtctgtgtcttgtcttagacatatctctcatttttcattttgttgctatttctctttgctctcctagatgtggctcttctttcacgctttatttcatgtctcctttttgggtcacatgctgtgtgctttttgtccttttcttgttctgtctacctctcctttctctgcctacctctcttttctctttgtgaactgtgattatttgttaccccttccccttctcgttcgttttaaatttcaccttttttctgagtctggcctcctttctgctgtttctactttttatctcacatttctcatttctgcatttcctttctgcctctcttgggctattctctctctcctcccctgcgtgcctcagcatctcttgctgtttgtgattttctatttcagtattaatctctgttggcttgtatttgttctctgcttcttccctttctactcacctttgagtatttcagcctcttcatgaatctatctccctctctttgatttcatgtaatctctccttaaatatttctttgcatatgtgggcaagtgtacgtgtgtgtgtgtcatgtgtggcagaggggcttcctaacccctgcctgataggtgcagaacgtcggctatcagagcaagcattgtggagcggttccttatgccaggctgccatgtgagatgatccaagaccaaaacaaggccctagactgcagtaaaacccagaactcaagtagggcagaaggtggaaggctcatatggatagaaggcccaaagtataagacagatggtttgagacttgagacccgaggactaagatggaaagcccatgttccaagatagatagaagcctcaggcctgaaaccaacaaaagcctcaagagccaagaaaacagagggtggcctgaattggaccgaaggcctgagttggatggaagtctcaaggcttgagttagaagtcttaagacctgggacaggacacatggaaggcctaagaactgagacttgtgacacaaggccaacgacctaagattagcccagggttgtagctggaagacctacaacccaaggatggaaggcccctgtcacaaagcctacctagatggatagaggacccaagcgaaaaaggtatctcaagactaacggccggaatctggaggcccatgacccagaacccaggaaggatagaagcttgaagacctggggaaatcccaagatgagaaccctaaaccctacctcttttctattgtttacacttcttactcttagatatttccagttctcctgtttatctttaagcctgattcttttgagatgtactttttgatgttgccggttacctttagattgacagtattatgcctgggccagtcttgagccagctttaaatcacagcttttacctatttgttaggctatagtgttttgtaaacttctgtttctattcacatcttctccacttgagagagacaccaaaatccagtcagtatctaatctggcttttgttaacttccctcaggagcagacattcatataggtgatactgtatttcagtcctttcttttgaccccagaagccctagactgagaagataaaatggtcaggttgttggggaaaaaaaagtgccaggctctctagagaaaaatgtgaagagatgctccaggccaatgagaagaattagacaagaaatacacagatgtgccagacttctgagaagcacctgccagcaacagcttccttctttgagcttaggtgagcaggattctggggtttgggatttctagtgatggttatggaaagggtgactgtgcctgggacaaagcgaggtcccaaggggacagcctgaactccctgctcatagtagtggccaaataatttggtggactgtgccaacgctactcctgggtttaatacccatctctaggcttaaagatgagagaacctgggactgttgagcatgtttaatactttccttgatttttttcttcctgtttatgtgggaagttgatttaaatgactgataatgtgtatgaaagcactgtaaaacataagagaaaaaccaattagtgtattggcaatcatgcagttaacatttgaaagtgcagtgtaaattgtgaagcattatgtaaatcaggggtccacagtttttctgtaaggggtcaaatcataaatactttagactgtgggccatatggtttctgttacatatttgttttttaaacaacgtttttataaggtcaaaatcattcttagtttttgagccaattggatttggcctgctgttcatagcttaccaccccctgatgtattatttgttattcagagaaaatttctgaatactactagtttccttttctgtgcctgtccctgtgctaggcactaaaaatgcaatgattattgatatctaggtgacctgaaaaaaaatagtgaatgtgctttgtaaactgtaaagcacttgtattctactgtgataagcgttgtggatacaaagaaaggagcaagcataaaaaagtgctctttcaaaaggatatagtactatgcagacacaaggaattgtttgataaatgaataaattatatgtatatttgaggccaatttgtgtttgctgctctggtaattttgagtaaaaatgcagtattccaggtatcagaaacgaaaacacatggaaactgcttttaaactttaaaatatactgaaaacataagggactaagcttgttgtggtcacctataatgtgccagataccatgctgggtgctagagctaccaaagggggaaaagtattctcatagaacaaaaaatttcagaaaggtgcatattaaagtgctttgtaaactaaagcatgatacaaatgtcaatgggctacatatttatgaatgaatgaatggatgaatgaatattaagtgcctcttacataccagctattttgggtactgtaaaatacaagattaattctcctatgtaataagaggaaagtttatcctctatactattcagatgtaaggaatgatatattgcttaattttaaacaatcaagactttactggtgaggttaagttaaattattactgatacatttttccaggtaaccaggaaagagctagtatgaggaaatgaagtaatagatgtgagatccagaccgaaagtcacttaattcagcttgcgaatgtgctttctaaattataaagcacttgtaaatgaaaaatttgatgctttctgtatgaataaaactttctgtaagctaggtattgtctctacaaaattctcattgtatagttaaaccacagtgagaagggttctataagtagttatacaaaccaagggtttaaatacctgttaaatagatcaattttgattgcctactatgtgaactcactgttaaaggcactgaaaatttatcatatttcatttagccacagccaaaaataaggcaatacctatgttagcattttgtgaactctaaggcaccatataaatgtaactgttgattttctcacttggtgctgggtactaggtttataaaattgtatgatagttattatattgtgcaaataaagtaggaaaatttgaataacaatgattatcttttgaatacgcatacgcaagggattggttgtctgaagaatgccactatagtagttatctattgtgtgccaatctcattgctaggcattggggatgcaaagataaaccatctttattgtgtcttgggtagcagaagaaaatatgtgtaaaatcaatttataatttgtaaactgccacccatatataagctatatctgctgaatgatcattgattactcttatccttagagataacaactgggggcacaaacatttattatcattattgaacctacaacagagatctatgtgtagatttacaaagcctacagttctatacagataggaatgaactattggcttactgaatggtgattactttctgtggggctcggaactacatgccctaggatataaaaatgatgttatcattatagagtgctcacagaaggaaatgaagtaatataggtgtgagatccagaccaaaagtcatttaacaagtttattcagtgatgaaaacatgggacaaatggactaatataaggcagtgtactaagctgagtagagagataaagtcctgtccagaagatacatgcttcctggcctgattgaggagatggaaaatttttgcaaaaaacaaggtgttgtggtcttccatccagtttcttaagtgctgatgataaaagtgaattagacccaccttgacctggcctacagaagtaaaggagtaaaaataaatgcctcaggcgtgctttttgattcatttgataaacaaagcatcttttatgtggaatataccattctgggtcctgaggataagagagatgagggcattagatcactgacagctgaagatagaagaacatctttggtttgattgtttaaataatatttcaatgcctattctctgcaaggtactatgtttcgtaaattaaataggtctggcccagaagacccactcaattgcctttgagattaaaaaaaaaaaaaaaaagaaagaaaaatgcaagtttctttcaaaataaagagacatttttcctagtttcaggaatcccccaaatcacttcctcattggcttagtttaaagccaggagactgataaaagggctcagggtttgttctttaattcattaactaaacattctgcttttattacagttaaatggttcaagatgtaacaactagttttaaaggtatttgctcattggtctggcttagagacaggaagacatatgagcaataaaaaaaagattcttttgcatttaccaatttagtaaaaatttattaaaactgaataaagtgctgttcttaagtgcttgaaagacgtaaaccaaagtgcactttatctcatttatcttatggtggaaacacaggaacaaattctctaagagactgtgtttctttagttgagaagaaacttcattgagtagctgtgatatgttcgatactaaggaaaaactaaacagatcacctttgacatgcgttgtagagtgggaataagagagggctttttattttttcgttcatacgagtattgatgaagatgatactaaatgctaaatgaaatatatctgctccaaaaggcatttattctgacttggagatgcaacaaaaacacaaaaatggaatgaagtgatactcttcatcaaacagaagtgactgttatctcaaccattttgttaaatcctaaacagaaaacaaaaaaaatcatgacgaaaagacacttgcttattaattggcttggaaagtagaatataggagaaaggttactgtttattttttttcatgtattcattcattctacaaatatattcgggtgccaataggtacttggtataaggtttttggccccagagacatgggaaaaaaatgcatgccttcccagagaatgcctaatactttccttttggcttgttttcttgttaggggcatggcttagtccctaaataacattgtgtggtttaattcctactccgtatctcttctaccactctggccactacgataagcaggtagctgggttttgtagtgagcttgctccttaagttacaggaactctccttataatagacacttcattttcctagtccatccctcatgaaaaatgactgaccactgctgggcagcaggagggatgatgaccaactaattcccaaaccccagtctcattggtaccagccttggggaaccacctacacttgagccacaattggttttgaagtgcatttacaaggtttgtctattttcagttctttactttttacatgctgacacatacatacactgcctaaatagatctctttcagaaacaatcctcagataacgcatagcaaaatggagatggagacatgatttctcatgcaacagcttctctaattataccttagaaatgttctcctttttatcatcaaatctgctcaagaagggctttttatagtagaataatatcagtggatgaaaacagcttaacattttaccatgcttaagttttaagaataaaataaaaattggaaataattggccaaaattgaaaggaaaaatttttttaaaatttctctaaatgtaggcctggctgggctttgaccttttccgtttttaaatcactcacagagggtgggacaggaggaagagtgaaggaaaaggtcaaacctgttttaagggcaacctgcctttgttctgaattggtcttaagaacattaccagctccaggtttaaattgttcagtttcatgcagttccaatagctgatcattgttgagatgaggacaaaatcctttgtcctcactagtttgctttacatttttgaaaagtattatttttgtccaagtgcttatcaactaaaccttgtgttaggtaagaatggaatttattaagtgaatcagtgtgacccttcttgtcataagattatcttaaagctgaagccaaaatatgcttcaaaagaagaggactttattgttcattgtagttcatacattcaaagcatctgaactgtagtttctatagcaagccaattacatccataagtggagaaggaaatagataaatgtcaaagtatgattggtggagggagcaaggttgaagataatctggggttgaaattttctagttttcattctgtacatttttagttagacatcagatttgaaatattaatgtttacctttcaatgtgtggtatcagctggactcagtaacacccctttcttcagctggggatggggaatggattattggaaaatggaaagaagaaagtaactaaaagccttcctttcacagtttctggcatcactaccactactgattaaacaagaataagagaacattttatcatcatctgctttattcacataaatgaagttgtgatgaataaatctgcttttatgcagacacaaggaattaagtggcttcgtcattgtccttctacctcaaagataatttattccaaaagctaagataaatggaagactcttgaacttgtgaactgatgtgaaatgcagaatctcttttgagtctttgctgtttggaagattgaaaaatattgttcagcatgggtgaccaccagaaagtaatcttaagccatctagatgtcacaattgaaacaaactggggagttggttgctattgtaaaataaaatatactgttttgaaaa

SEQ ID NO: 2095 - DNA, 552 bp, Homo sapiens
ttttttttttttttgcttgtgcttattaaatagcaagggtcatctgtcaggatgttgtggtggtgtgtgatcagagcagagggcctttcttttcctgtactgtgctctacttccttatgcatgcttggtttcaaagatgaccgccactttaaaagaaagatttcctcacagctctccagagaactatcatactaaggtgataggaaaggcttctcggatacaagccaacaagtcagttttctgattacagaaactcctctcacaggttatgtttggaaaggctgttctccattccacttataaattgaaagtgataagctactgtcttgtgatcttgcagggccagtggttgactcatctctgaaaggtaacttcgttcatatctatgtattttcaaacctggaagcttgtaaattggaagtttcagtattagctttattattctttcttggtgaggaatagaaatggcagcaaaaagaaagccaacaatctgaaaactccagtctcctctaacactggctttgttttaaatcaagatgggaagagatacat

SEQ ID NO: 2096 - DNA, 497 bp, Homo sapiens
agtcctgaaaatggaaaagcgtctggagttttgggtactcccaatgccccaattatccttttattaccctgatttacaacataacttcataggagacgttctgatgagcaaaatgacttgggtaacaaaatgatctggcaaaaccagcaactaaggcaaggacacaagaagatggctgtctacaagccaggaaaagattctgcaccaggaactggatcaactggcaccttgatcttggacttcccagcctccagaactatgagatgagaaataagtgtctattgtttaagcctcccagtctatggtattttgttatagcaacccaagatgacaaagacaacaagcctaaaatgaaaaatggcaaagtaaccaagatgtccttcaagagggctgtttgttgtccaaaaagcctttttccctaagcttgaaagcttaacttctcagaagcaggaagctgccttttgccaagagtaaatgggtgagaagtccaaaggtct

SEQ ID NO: 2097 - DNA, 509 bp, Homo sapiens
tttttaaactatacggtgggtacactggtgttcttttattgttactctttacacacaaagaacagataggtcctgaagggccctttgatagtctcgcagcactgatgagtgatcagctctcccctctttctctggaactcggtagcttcatgttggcacctatcacagacgctgaaggcatttaaattttattttaaatcaaccaagagcccaaaaacccaacccatatttcgaaaaaactccaaggtgtactactcttgtttggttctgccatcctgccaccttacagtccttttgtttttcctattcttgcaggcaagtgcaaaacagtggtttttggaaggcaattcataattactctgaagctatttcggcatattttttactgatttttttttttttttgagacagggtcttgctctgttgtccaggctttattttgaatttctgttccagatgcctctccacagcattcatcacaccttccttcacacttgaagggaaaagtc

SEQ ID NO: 2098 - DNA, 463 bp, Homo sapiens
ccttctttcagaataatgtgaaatttcttttaaggacaagaaactttagtgtctagttggtaaatgacataggtttgaatctctttctaagagttgtaattgatgataagaatattctgtggttctttacagggataaattgtttagtttaatcagagtggtggctctcactatccataagtccatgggcaaaagtgttgactaatacgatcatacagtgtacaccagccaccttacaccatgcattgttgagagttcttgctctatatttgataacacttttcaaatatgccattttccgtgattataaaattgcttaaatatctatataatctttcaaaataattttcctacaaatgtctaaatttctctagaagtacaacatatacaatcagatttacttggaatggtcttccttagtcagtcatgttttcctgcaaattaaaatggtttggacaacaca

SEQ ID NO: 2099 - DNA, 1282 bp, Homo sapiens
gacccaggtggctggggtggcagctgatcatgtcaggaggactcctctgcacaacatcacaagcacaggagagaatgctaaacttgattgggagctcacagaagacccctggaacccagagcaataagggaaatttggacccagagatacattcagagagaagatgatgtgaaggcacaggaaggatgccctgtgaacatcaggaccaatgcctgcaaacctaggagagaggtctacaacagatccttccctcgcagccctcagatcgaactgaccctgcaagtaccttgattttggacttctggcttccagaactgagcaacaataactttctgttgaagccgtccagttttgaagccacccagtctgtggtgcttggttaccgcggccctagcaaacttgcctgaggctttccaaatcacagccccgttttgtcacaggggaagaattctaagaagttctttatttggccaagtgagggatagaagaataatgagcatttccctcatcacagctctgacaactgcctcagccacacacggcttaggagattggccacttcctccgccttcagcttgcagggggcttcagtaataaatgtgtagaagtgtttggtcttctcaatgctgggaatccagggagtatggcctggcatacatggaaaccagtcccctaaagacctcattgacacaggcctcatttgggggtctcctcaggcacttcccccttggctcctgaggccagaacccgaccctgctgtgtctctcttccatgcatctttttgccatctctgctctctggaatctgcaacaatatgagggtgctcaggactttgatgttgctactgacctcagcatgccccagtccaaacctaccttcttcctcctgggcccacatccgcttctgctccccacttccccagtgtcttcattcttttcatcacatgctgaccaaagactcatctttaggcactctctatgtcccttctgctacatccactctgttgccacatctcctgaattcttctgtctgatttcttctcactcttcctttccaccctggatcagtccattggggccgcatgtcaggacaccggatgacactgtttggacacctggaaggatcgggtaaaagatacagagaagtctaaggagggatagggtgagtctgggatgggctgtggattaggcaccaggtaaagctaattggggggtgggtgaggaatggggtgagggtatctattgcatctattttatggtaataaaaggaagttgaaagttca

SEQ ID NO: 2100 - DNA, 4216 bp, Homo sapiens
tatatgtgaagtgggcggttgtaaagttagctttctcttcatttagctgtcactggacagaaaaatatgagctgtgggcagatgcccctggatgagagccagtagccagtctctggcctctctgtgccctcccctaggagcccccgaccccgccatgggtcccctcctggcctctgccagcctctcccactcttgcttcattgacctctggctcacctttattttttctcctgtctcttcccacttctggtttctttgtttgggtttatcacagatcctttcctcttccctcctttcatatttctaagccctctcaagagagaagaatcatatttttcctcaaccatcgctctatctctggcacccagcacattgccaggctgagttggcactcaaaaatgtttgtagaacaaactactctctctatacatctttctgacttggtggggaagaaggtccaaaactttgctgatgactccttggatgaagaaacttctcatacagtggtgtgagccctggagtcagaatggttggcttgagccccaatttcattactgcctggccaggtgaaggagattctgttcatcagtggcagccagggatgtctctccttcctaccctgactctcctctttctgctgggtcccctcccggatacagggctcacacctgtggacctcagagccagcgtcaagaccaagaggaaagaaatcaccaaaagccagacccttgtatagagggaaggggaaggaagggagggaagacagactcctctggggatacatgcgactgtcttggctgggaaatctgatctggtgggggactcaccccctcctctcgaatcagctcagccctgatgtgtctttgtgggcttgggtttctctgtgcctgaaagatgaggcgtggggtgggggtggccgggctgctggttgaggctgaattcttctgagcaatgtggttgtgtttactgggagggtgggagggccagacctttttcctgccttccaggcttcggagataaggcagaaagtgaggatgaaggatagaatgggtaatactctgaaaccacaagaaagagttctggcttttgtctctgccccacagctcagacatttcctggggcatctggaaggaagctgacccactcccaccaccctggggtcccagcccatggggagcacagaacctcagtgggcacccctttcttccattctacctcctttccattgtcagtttagccacaaaattattttagcttttttactgccagtcccaccctcagttttccctgccacatgagcccagccctagagctgagcttttctccctgcctcccagcacagccaaagccacagagaccctaggcaggtgacagagcccagcctggcatgcatcggccttgagggctctgctgcaggaccaccttccccttccttgctggcctctcaggggtcgtggccagcctgcatcctggacacagaccagccccaaagcaaccagtgccaagccctggggatagacagtcacctggtataaaaaacaccaccacctttattagaatgctgggcagccttttttttctctctctctccttttttttttttttaaacaaaaaaaacacaaaagtgtctgtacaaaaatggggatcaggatctcagtctgtagaaatctgttttattcttaccaacatccaatatcatttccatggcatagctctgggctggtcccgtggaagagattccaaatatgtggtgatttctggtggaatttctgcccccttggaggggaagatgactgcatggcatgctgggagtgcaggcacatggcaggagtgagggtggctggagctgaggagccagtgtgcctcagtctatgctgaccttggcctttacaccctccttagtgtcagacaccagtgcgccccctgctggtggggaggggaagcagggctgactccaccccatcatgggagactcccttttggtttccatctcatcatgaagagcttcagtccacgcggcgttctcctcccattttcctgggttccctgaacgatgagccaagtaagctgtcttagctggagagatgacaatggacttggacaaagtctggaggaagcagggcagtgtctccctgcctccagcccagagttcaggtgaggggactcagtttgtggtaggaagagtcctggctgcttcgaagccccttctcctaggcagccccaccttgttctaagagaaaagaccctgtaacgtgttccctgctgggggctgacagtgccagctgctctcgcagcctccagaaccatctggggcttggaggcagaggtgggctgggagcgactgggaatggaaaaagaggtgggcagctcattctgcaggtccatgcaaccgatcacgtggtccagttcagaaggccgggtggctccttgggctttaccctgagcgagacgaggcttggagacttatagtcaccatctgaggaaggctcaaagctgtggccccccagggtggggggaaagccatggatggagtagatgccagggtgagccgcagaaggggctggcacccccatgaagccagccacactcccatgggggtgggaatatggagacatgcatggggaggggatgccctctggagacacaaggcaggggcctccagggctcccagatcctggactggcccacagggagttctgcagctgaaaagagagggaaagaaggcccatgagcctgtagcctcaggagctgacttccctacccaggggctttctctttgtccttggggccccagaaactttccaggaaacctccacttggctcagatctaccccctctcacccccaacactggcagtggcatctcaggaggcccctgccactgttctcaaaacgaaattttcttctgtgattcctttgtgttccgcatgcgtcattcatgagacaggcaagagccccggtttgcagagaaagaagtgaagtggtgtacccactgtcatacagaacgctgacgctctccaggtttcttcaggccagacctcatattctttttggtgaccctgccaggtcctggttcaggtagggctggggtcttacctgagggtggctgtcagtacggggcagcacagagatgtcataggcagccgtgaaggggttccgcccctcctggatcttcccataacgctcgcgcttccgccacttggctctgcggttctggaaccagacctgggggcaggttgtgggggtttgagggggtgatagggcagccctgaggaaaggagcctgctagggagagctgatggttgtgtcctcttgtgggatggggagcaggctccaggatggaggatctcaactgttaatccacactgttctccaggccagggaagcctgggaggaagcctgggagaggcccaagcccacagtgggtaattggccccatgggcctccagctgtcactccccaggttgaatcactgtggtcctccagcctggctgtgtctagtaagggtgttgtgggggcatctgtgggcctcaggggccctaggtacttcctgggtatactgtgtacatgtgttgggtttctagtctccctgcctcatctccttttccaggctacccacctcatagcatccgaggaatcttagacatttctgttcaggtcatggtcctgtttaaaccctcagtgactccctggagaccttggtccagagcatagcttcttaacaaggcccctgcctctctgcacagcctcatatcctgccaggcaaacacatttattcttctggttgcctcccaagctcccgcccagctcttctgaaacactgctatcttgctccttccatcttttgcttaggttttctcttcctgggctactcatcccctcaacacatacatccacactgggcatcctccacaggacttccaaaataccctggacctctctttgtactcaccccattccattaccatgatctgttttggaatctgtttctcccatttatttgtgagcccttggcagataggggtggcacatctgtgtgttgtgcacatctgtgtacatatctgtgatgaattcgttgtttggtatatgtgctgtgactgttacatttaactgtattggtatatatgttttgtatttctatcatttaatcaacatttatgtgtcagcctctaagctaaatttaacaatgtcaaaataaaaccaaccaaacaaaacaa

SEQ ID NO: 2101 - DNA, 282 bp, Homo sapiens
aacaatgaaggcagagaagccagtggctgctttgacatgaggcttcccgtgtgggaggtgaaccagaagccaagcctggacggagactgtgccatcaagaggctctgtcacgagatgccaagatgagcacgcgtctccaaaacaacacaatctcaacatgcaaaatgatcaccaagcaagaggaaacagagtgagccctagaggtgaggaagttgcctgaattccatctgtgtgcccacatacacaaagctctgttacacaaaggagctactccagcgacta

SEQ ID NO: 2102 - DNA, 675 bp, Homo sapiens
aagaggagagagagagagagagaaagaaaaacagaaagaaacagagagaaaggcacagacaaagccctcctaccagacagcagacagctctccttcccctatccagcaaaatgcaactcgtctaatgcagcaacaggttcagtattgccagactaacagagtgaaaaaggagaagacgtatttggtttctaccagcaggaatcaaaaggaatataaaggaccatgaaggctcttttctaaaaaacaacctgagagctaaatttaaaaggaaaacaaatcttttggcttaagtgaaaaatgagaccgggcacagtggctcacaccgtaatcccagcactttgggaggccgaggcaggcagatcacaaggtcaggagttcgagaccagactggccaacatagggaaaccccctctactaaaaatacaaaaattagctgggggtggtggtgcatgcctctagtcccagctgctcaggaggctgaggcaggagaatcgcttgaacccaggaggtggaggctgcagtgaaccaagatcacaccactgcactctagccttggcaacagagcaagactccatctcaaattaaaaaaaaaaaaggtgaagaagaagaagaagaatgtacaacatctcaaaacttttcccatatctgtacattttactagattcaaagcacaat

SEQ ID NO: 2103 - DNA, 1144 bp, Homo sapiens
tgtggatctgaaaagaattttctcatctaaaccagagcttcagtctcccaggatcgtgaatgtctgagaataagcagatgcagcccttttcacagaagggcaaggtccgcagctcctcggcatcatggcattatttattcatcatgagagccgcgagtgaacatgtaccctgcagaaaaatcaaatcagtgttcggtttctcgagcagctgcgtttggcagagaaaaagcatttggatctaactttggtaactggacaattataggcgttattaaattggagatgcaaatgagtaaccatgttttcttccgagtttgttctatttcacttgtagtgcttaaattaaaaccagctcagcatttgtaaaagctgattcctgaaagcttagaaaagttctgtgcttgtctatataccagtagtttcactaaaaacatttacatattagttaaccccaaaggaccaaatttgcatttattcatgtttacaggtttcaatggttttagccctgaagtcattgtgtccttagatacctaacactgaagatttgctcacaggtggagattcagatagaaaaaaacacacaagcttagaaatgttaataagtatctctatgcattataaaaatacctacagataatttaaagcctgagtaatttgtttatatatttcccgatttgtggaatagactaatattacatcatagtccgagaactttttataaattgcctagtttttaatttcaattcttccatttacaaactctgggaccttgaacaaattattttacctcagtctcctcactataaaatggagacaataatagtggtacctcttaagttgttgaaagcgttaaacaaatcagtacatgttaaataaattaatatacatgcttaggataatgcctgacagtaattgcaattctgtagatgtgtgtgcatatgtatagattgaatgtagttttatcaaacagtaaattggcatataataataatccctcattatctgtctacctttccctccatatttcagttcaatagaattattgttttattcactttgtagtccacaacgcttatcgatttgtgttgctgcaacatgctagtgtacattttataataaatattgtggcttttagactgttcaa

SEQ ID NO: 2104 - DNA, 593 bp, Homo sapiens
ctggtgcaaacaaccttgaagcgggacgcagccaaagaacacgagatgccatttctcagcccaattggaaagaggccgggagcaccagttccctgaccccctcagccccaccgcctgccgccccctggtactgaccagctccttcttcctcttctcctctttcacgtcggtcttcttgatctctgccttgaaggcctccgcctcgccattctggtcgtccttggccagcaggtccatgagggacaccagtccctacgaagaccttgggcgattttgaagtgcgggcacctcgattccccgaatctgtagtgtggctggtatcggtgttcccctggtttaactagcctgtttgaaggcacagatcattcatggggatgtataaccgaaaccagtcctctccaccgcctggggatcttcactttcgcagtctacgactgcctgtgactccagaaagacaaactgcagattggccaagctgcctgaagacccagcccgacagcgatgcctgtcagcccgcgtcgcccaccagggcagctgctctcccaactcgcatggggggcaccaccccgcctcggtgccctagagctgagcgc

SEQ ID NO: 2105 - DNA, 3108 bp, Homo sapiens
gcccagcgcagccccggccgctgggcgcacccgtcccgttcgtccccggacgttgctctctaccccgggaacgtcgagactggagcgcccgaactgagccaccttcgcggaccccgagagcggcggcgcgactcaccgcggaggcgcccggacgcgtcaagtgcgtactttcaaccgtaaatgggtgctgagcgtttaggggtgcggggcaactccctaactcgtggggccctggccggccctgccgcggcgtccgagaccttctgatccctcgctgcgcgcggcgcggggttggcgacttgggctcaggggcggcggggcggggaggtgccttgacctagggacccagaggccgggagcaagtctcctttcgccttggactgcagtgtcccccagggcaaggcctgaaccaggtcgcgagggtctgtctcccgtctggggagctgaactgcccgagacactgtcgcagtcgcggggacttgtctggagcggcggggtctgagcccaagtcggaagccgccgccgccgccagcgtcccgtgcgcctgccgccccgggaccagccgcgaaacttcttctcgggacggagacagcgctcgccgcccgggccgaggtaggagctggctgggctcggtagagcgcgggcgaatcgctttcggcagcgaaggaacgtgtcgggagaagccaactgcaggaccagggccccagcgggcgcgcagagacgcctgccttgggcggaggtccccccctccggttttcgtggctctggtagggccctctgtcccgtgagctcctcactggacctgaggctacaggcttcagcaggtcaagcgcccgagtgtgcctggaggattggcggcggggtggcatgagaaggtggcccctcttctccatctcccagtcaggcgatttctctgctgtctggggcaggggcgcacaccccaggaacttactacgtagagggaagccagcctggtctctcccccttgcgtcagtgctcctaagctgcccctcaccactctgggtaggggtctttcaggtgggctagggaattctccttggaagtccccttgtttgctcccctccatcagggcacctctgagttagccaatcatcctcttttctggcctcttttttgcggggaggagagtagagagagaagcctcctactcggcaggtctctgagaggaggtttgggggggcttctgaggttgctcctcctgggcagagtcaaggggtgttgagggttccaacttttactggacaatctctcaagctctgattccctgatttctgggaggtgtcagtgtagggcttgtgtcctgccccacccacacagcatttggtgcaggcacatgggatggttccccaagcccttttcccacagttagtttcagaaaatgcataagccacctaaggctgggagagcctttctgtgctggctgagatctggtggcatgtgcatgcatatgtgtgcaagtgtgtgtgtgtgtgtgcaagtgtgtgtgcgcatgtgcatgtgtgtggaaagtatggtctgggtggctgtaagactggcccctcttgtcccctctgcaggcccagcccaataggaagcacctgatccacactctttctagccccagggatgctcaggaaagcagcctttctttagggctgtcatctgttctggggatctgttgctgtttcttgggcccacagaatacactccacacctcgggactccataatattggacaaggctggaaggcccatttggctcctgcagcctcttatgcaggtgaggacagacccaaggtccaggcaatgctggcctttggaacacagaacctggctcactgactcccactccagttgtcttttccctctgcctctggagcaaccctctctcctccagagcaacccctgtccctccttcctacctctctctagggctgcacccccagctcaccttagacctggcccttcctacctgttgcccctactgtcttgtcccatcccagtggtcaggagggagagtactggccaaaggcccagctccacctgtgacttaggggagtgccaggcatcacccagaggtcccggccctcgggggcctggcaggctctgctgtgggggaagcagagttagaactggggctgcttctcctgtcccccagcctggctgggcctcccccacctccctttctgcctgccctcttacaactccagcagggggcgggcaggggaaagaaaaggagggacaagttggatggggtccatttggtgtccaggaacaacttggagagaggcggggaggggacaggcagcagggccctggcagagccaggggagggctggcctttggatggccttctgatcccaagcccatcctcctggggcagtcttcccttgaaagggagggtttggtgaaccctggtgcggacccccccgccggacctcactgccccagtgcggggcgtggtaggcgggtttgcaatgggtacagcctctctctccattccagtagagcagctcccagggcccagagaggctgtcactgagacttccctctggggtggggtgggttctggtggccctgtgttcccctgcaggaggacctcctgaggcttcgggcaggagctggtgcacacctggaggagagtgctggtgaatggcaggtgtgtgcctcagtgtccttgctgccagggtgtcagccctgcttcaccactggccgtttgtctctgtcccctccactggcctcttgaagcacagagaccctccgggtactttccttcctctgggcttccactcatgctattccctgctccctttttctacctggagacccccattcctcctcctcctctgctgccctcacctccacctgggccctcccagctcccgggagatggctgaaccccactccccacccgctagtcatcctcttcagcggtcctcccagagctgtcctcagcatggcagcctccacagcccctgggtgtcacccccggtttcgtgtctgcctcggactccagacctgcccctcccaggctggcccagatggatcctctacagtgactaacccaaaccagcaccaggcagggacccaataaacctttgtgaatgga

SEQ ID NO: 2106 - DNA, 594 bp, Homo sapiens
gcacatgttgatgtggttgatgtgtaaaaaagccaactcatacaaggttctggcttcatctttataaaatagtccggaaatttcagagaaagatgaatctgattttccaagagaggacagctgtggactatctggcactggagactaacaggacaaaataaagaaaacagactcttcagcagtataaagttttcatcaagtcaaatatattcactttaaagtgactgtgctttattctgataccatgtccttcctaatttggggggcacagctggagaaaattcactggcaatggaatatttaaaattagagcttgcttagtgtgctgcttctgatcactacttgatcccacttcgtgctttcatgttaattggcccaattggactctacagttggaaggtgaaaacttactatttcaacttgagtcacgtatgtattcttatcatatacttcttaaaggtactattttttttcttctgatagtcaccacaccaagcacttccagccaccctgccacagacttcctttgtaatcactgttgaaggacatgatgtttttatgacttcccgaaatgaaaaccctatcttgttttta

SEQ ID NO: 2107 - DNA, 1419 bp, Homo sapiens
ccgccctcctcccgaaaccggccggggcgagtggctgcaagaagctgcggtttggcccgcgggagaggggggcttccccgctggggttgtctgacgcgaacgccttcctggccccagccaggcgccctgagagagctaatgctggcagctgttgggatgtcctcttccaggaatggtgatgagtttccctggatccagccctggcttggctgagatgatgaaggtttaagaagcagcatcatcagcgaactgtgttttgaagatttgagggaagggctgacctcaggattttatactaggtatttgatgcaatgcagactggaatcctccccacaaggatgccctggcctgagtggcacagagatcaatgcagcagtcatttcctgggcggggaaagcccatccacagtggccctggaatgatgctggtcttaccttctattcctaggaaggccctatctcaagtggctctggtccatgcaaacagatggaaacgggtgtggggaagcacaggcctcctactcatgttaagagagctgctcagaggcaggaatccagaaccaggaatgtccccagtggctgcccaaggtacaagtggcaggcagcggggagaatggcatgtgaagtcatttgtaacctggccccagcttggtttccaagtctcagaggagattatggatatggtagtgcctggctcagtgcttaaaatccattctcctgctatttccctcacctacactcagccccacaagccgagatgtttgctggacatttcaggcactgccacccagttctgtctaccttacctgctaacacctgttgaccatccttcatgtgaaggcttccccaaatacttcccaatcaaaacactaaaaggcagacctgaaattaataaaaatgttaattaaatctgtacaacagaaagcataatgccagtctttttaattatgaaatgtagcattcatataaatttcattgcttttgaaaacaatctatggctagattctcctgggtttgtatgatgattactgaaaactgtagaaaatctaaaatcaagcaagttgtttataggcaattactttcagaagcaaaaattataaaagaaccatgagatttttaaagagaaaaaattacatttgatatgagataatcatgcattttaagatgtttaaaatgacatggagtggggtccccagaccaggagagctgagggcttatgaaggacctaagggagtgagacctgttatgtaataagcccccattctgggggcagcaccacagaggcgggaccccagaagtagaagaagagccctcctgcactgggtggtgaagttggtatcagcccctagtttgtgaccctggacagatttctctgctctccagccctcagagtcctcaataaaacaaaaacatatgcaaa

SEQ ID NO: 2108 - DNA, 412 bp, Homo sapiens
tgcagaccccgaagaaggactggctcctcggtgctgatggctgtccttctaaaccagaggggagtccaaaagcttcagtgcaggaggaaggcagtgagtgttagccctgacctgcgctgagccctgagaagaaagcttccttcgcccgcgtcctcccgctggctgagtcagccaggaccctgctgtgcgaggtccatatggggcaggtgcatctgccaacacggccaaactgaaggttcgctcgcaccaggaccagtcgtgggtgaactctttgcacgctcttgacgtcaggtctttgtggactcagtgggaactgagaacaattccatccgtacgacgtccagatgaaccttgctggtcggagaggaaacttctgaccaccccgagctgagctttgtgttcctcaggcccc

SEQ ID NO: 2109 - DNA, 1991 bp, Homo sapiens
ttgtcaaaatgttaccattattgctgggattctaagaaatctctacaaatgcctctgatgacatcagaaacaattggttctaatcctgtgaactctcttgtgaagaaagcatgagactccttcggtttagaagccatatctttcaggtcatccagaggtgcccaagccacaccaacagagaagatagtgattcctacaatgaaaacattttaaagtgaattgaaaatcaggtctagctaatatatggaattatgtctatatgttttccatacactgttacatagttgcagcgaaaactgcttactaatttctggacaattaaatcccctgaacaaattaagttttcacagtcattgtgacgagagtggcaaaagagtggtccaaaccagaaactctgctatatctgtaattcgccacattaacagtaaatgcggatggtgaaaattttccgtatgaggttggcctgcatcaaacagtatactggagtcagagtcacaatccattaaagcaaggaagaatggcacaagagatgggataaaacaaggaccttacctgcatcatgtgcagcagctgcagggccttggacatcatcataggactgcccatctgtgacaattactaggaagttcttgttggggctctcccttatagggccaaacacatttctaacagtgaaggaaatggcatcaccagtagctgttccaccactcatatagcggatgtttctgatgacagctaggacattctctttggtgctatagtcagtgaaactgaactccgtgcgctgatcataagtaaactgtacagcagctatcttggcaccaatgtccgagatttcaaaagtcttggctatgttggaaacaaattcaagcatgaggcggaaattgctatctccaacactgctggagccatcaattagaaaggcaatgttcactgagttataacaggtcttgctgcacatcatttgttcatgagtgcacagcttctgtaccagaggctttacgtattttgtggtgccaaaccagttgggcatgtggtaagagaagaagccattattccgacagacagcctaatgggggagacacataaaagatatccaaaaggatcaaaagttgtttcttcttaaaaactggaaaatcctgaatgtttcaagttaatctagataagaggcagtcagcactgcacttagaggtccaaaatggaatacccatcactgtaacagaagataaccctcaccactttaccttgtcaacaaatgtgacatcctgaaccatccccagttcttcagggataggcttggccacagaaactataaatacattgacaccaaactctctggccacaatgcctgcttcctcgatgtcatcagaaggccaaccatcaataaataccaccaccactttggggatcccttttcttactccagcatctaccgtgaagaatttctgagcagtatcaaagtctacttacctgtattggaattaccccctctgaaacctacttcctttatggcaaacaaaacatctttggctgatgtaaagtttttcaagtaaaattctattttgggatgttcactgagtggaagaaagaaaatgttattcagggagaattaaaaagatgagaaaattaaagccgtggggttaatttgcccaaacaacattctacaactcccgaaggacagaaaacagaaaagtgaatcccttcagaatacagcatttttatcttaattgaacctgattatttctgctccagatctgtccagtgagatttatcaagcagcggatgcatttttagaaagcactgttaatattctcaagttttacactgtcaacctaacaaagaatcagtttttactataaatgatgctaggaagagacaagctcttggcaacaagtaacaagataacataatacaacatgttaatttgtgaatttactgtcgatactaaattgagattaatgttattaaatgctatttttcaaacatgggaa

SEQ ID NO: 2110 - DNA, 2232 bp, Homo sapiens
gtgcagagcccaggcgcgtgggtcggtgtcgggtgtgtgtgtacgtctgtgtgtgtaatgaaactggacgccttccttcccggcgatcttgacttaacctgtcagcagagggcttgaggttagaccacaggttgaacctaggtggctgctggagagaaacactctgtcttcctgctttgaggacagctgaagtcttgccacttcttctggatgctctgaccatcagtaagccacctcagtctcaccctccgcagaatgcaggcccactccgttgctgaagggcctcctccttgggccagggcgcctgcttctgccagtggcatcatcaccccactcctcagccgccagtcatcagagacacggtctgactttgttaccccggctggagtgcagtggtgcaatcatggctcactgcagccttaacctcctgggctcaagtgatcctctcgccaaggctaggataagtagctaggactacagatgcgccccatcacgcccagctaattttacaacttctgtagagatggagtgttgctgggttgcccaggctggtcttgaattcctgggctcaagcgatcctcctgtgtccggaattggtgggttcttggtctcactgacttcaagaatgaagccgcggaccctcgcgagtctgtatccaccagctactcttccagattcatgaggcaaggcctgcctgctcacctggctggccccaagcacctcttcaacctgttgccaccgtcctgccttgctgcccttctcagctcatccagcagggtctccaagtcgtggaaacagaagcacatatacacacatgctcatatgtacatgcccacagtcacataagcacaccgagaaacaccatcgcagacatgttctcacaagcacatgtgcataacactcactacccctcacgcgtatacacattaatacacacactcatgcacactcagtcttacacacacagacacacagccataatcactgttgttggttgaattgtgcccccccatccccaccaaaaagataagttggagtcctaacccccagtacctggggatgtgaccgtagttggaaatagggtgtttgtagatgtaatcaaattaagatgagatcttactggattagagtgggccttaaatccagtgactggtgtccttataaggagaaaaagatttgaaaacagagacatggagacacagagcagaaggccatgtgatgatggagtcagagattggagtgatgcagctatgagccgagaaataccaaggtgctggcagcccccagaagcaaggagagaggcaaggaacaatctccatcagagcctctggaagaaacagactctgccaacaccttgatttcagacttttggcctccttcactgtgcgagaatacgtttctgttgttttaaactactgagtcaccaagtctgtggtactgtgttatggcagccccggcaacaaatccaatcacacacacacacacacacacacacacacacacacacacacacacacacacagctggctccaggctcagtgatgagctcagaggagttccccttgggagctgctctttctctgtcttccttccttagtgattggtccagtggatccacaaaagctcatggcccagagcaggagcccagtcatttttaattcctcttccctggagttcttaaccatgcgttgccctcaaaatctgctctcaagatttgggttgccatatttaggagcaccagaaaacatacaggaatgctgtgtctgcttgcatcatattaattaaaaactggaaataacctaaatgtcccagaataggtacataaactgtggcatatccacttaatggaatactactcagcaatacaaaaggaaaacctagtgttacttgagcaacatggatgaacttcacagacataatattgcacagcacgaggcagacacaaaagtgtgcatatgctatgattccatttacatgagattcaagaacaggcaaagcagatctatggggatagaagtcagaatagtggttacctctggaaggtggaattgactgggaggggcttcagggaacctcctggggtgctgaaaacattctgtgcttgcaccgggtggtggttatgtgggcattacataaaattcaccaagctgcacccttaatgatttgtacaatttgatgcacaaatctaacatctcaagaagaataaattttacaaagtacctaagaagcaaa

SEQ ID NO: 2111 - DNA, 665 bp, Homo sapiens
agctatgcgcctcgtgcctgggagccttagggccacacggaagggtagaaatcagtttcaggtcaggaggtctggaacagctttgttaaacccagtttttttcctatgaaaatggctgcagacactgggggagggagagggtggccctgatcccgatgactctgaaacatgcttggccttccccagagattcctgctcccagcccaggcccagacggcaacagaagctcatggaatggcagactctggacatgctcctagagatgggaggtcaaaatgatcaacgttcagggtcccttcatctcagagggtctcgagtcacctcatttaaagtgtggcctgggacacctcctatccagccatacgccgcccaggactggctcaacagctccaccctccactgctgttcacccatgacacgtcacttcccacccgccactgctggctcacctgtgacaccccaggcagctcagatgcccggcaggtcctgctggtgtgtgttagccggggtctccaaagaaccagagccagcaggggacacacccatctctgtatctggagaaaaagatcgatgagaaggaatctgctcctgtgatgatggaggctgacaagtcccgagagccacggttggcaccctggagacccctgagggtgataccaccactc

SEQ ID NO: 2112 - DNA, 152 bp, Homo sapiens
gcccagggtatgttcacggggcgatgctgccctcccagctggcccatgggtgaccctgggaacattaactgcctcacaacgtttgtgcctcagttacccgtagatgtagtgagggtaacaatacttactctcgttggtgataaggaacagct

SEQ ID NO: 2113 - DNA, 5444 bp, Homo sapiens
taggagatgataaaaatacatattaagtaatttgtaccctgatatgctttgtatgtagattgcttacaactaacatgaaatgagcatttcattccttaagcatgctgttgggggaaaatgggagccaggctggatgcacaaatttacaccagatgctctgtatccaggtagcagaaatgactaacagcactggtatccatcagtcccagagcaaaagcgtctccagaggaggacatctgtaaatcccaaatctgatctccttcatcatcattaggcaacagataggataagacttcatgaagagaattttggtggctttagattgttgagaaagtatatataggaaaaaactggaaattatgtccaagattttttgtctaactccttatcctgatattgttaacatttcacaactaaaataattttaacagacaattagtttttaaaaatgtattttcatgacctgagactacagaaattgccattttcttaggacgtagtttacatttgactctgcttactgtgtccagggcatccccaaattgggagagattgccaagtcagttgccattttgccttacttttaccaaggactagcctacaggttcagttttgctcttgactttggccctgaattgagaactgagtcaagagaacagagtggaagtatggagacaaagccagcagctttactcaaaaaatatatatgagtctagtattttttttgtttttgaaagacatgttactgagcccaacccagtcagggatcactgaatattgggttaaataaaacaataatgttattcatgtgtttgaaattaatgttttaaagaaccacgcacacactttaaaatgtaactggatttgctatataggccagagaaatatggctgttacgatgaaggcgtaacttctctggttcttgattatttacaccattagagaagaatgcaaatatgaatagctcagagtagtttaactttgaagtgagagtttatatgcacctttatatgtgggataactgatgtctttggaatagacttcaaatgaatgataaaaacacctgtaaagtgataggacctctactttttctcatgtccaatgttcagtttcttataaaccaggcatgaagagaaacaaaaagtaattaattctccagatcatgaagttgtcttcaacctaagcacagaggtataataattacatttctcagaagttccccctctgttttgagtctcaagggcaattgagatgtcagtgaggctgtgattaaatgtattggatattagaggattttaaatacaaacaagtattataggtgttaccactgaccccgaaggtaagatttactgtgaaaatttataatgcaaggaagaatgatcaagttggctgtcagaacaacaaaatattacaaaccaggatgtctaagagcagaagtccgtggttgccacctctcaagcctcttagcttaatccaatctaggatgcatttccactctgcaacaaacagtatttatttttgccttatttgcagataacagttttaatgcaggtactgcccatggattagctttgagcagtgtctttttgctttggtttttttatttgtttggtttgttttgagactgagtctcagtcctccaggctggagtgcagtggtgtgactttggctcactgcaacctctgcctcccgggttcaagcgagtctcctgcctcagcctcccaagtagctgagtctacaggcgtgagccaccatccccggccaagcagtatctttttgctttgaaagtgacttacatgtacatttgttttccttgtgaatgtttctttttaactgcaaactaagaaacattgagcccagcattcatatatttgcaaactctgtcttacttaatttctcagtttttttcctcagaaaaaatgaaattccttttcttttttaaatttattttttctttatttttctttataaagtgaagagtaggtagcatgaattcctcttgccctttgctatttcagtctggcatcagtagcaattgttgctatgtccagttttcattcatggatttttctgggattgaagatgagttcaatgttgattatttaattgggcagtataagtaaattcattggctctccttccagtttagtgaatactaaatatcatccatgatattttatacttcttacacttctggaatctaacctgaaaatagaagttgtaagtcagggacggtggtatgtgcctctagtctcagctagttgggaggctgaggcttgagcccaggccttcaaggctgtagtgcacaatgactgtacttgtgaatagccactgcactccagcctgggcaacatagcaagactcccaccccttaagaaaaaagaagagagaaaaaaatagaagttgtggagagggaggaggatgcttgaatactttgaccgtacttggcataatagacattttgagggtttttttgttttcttaaaattcctctggatcagttttcattgtttctagtaattatatttatcgttaatgaattcatattctgctctagcccctaaagatagtttgatatgctaacttttgttttgcctttctagctgctaagatagataatggttattgcaaaatgcacgtttttaaatggtctccagtgtggattgcttctgagctgctgatggattgaatacattgagaaggaatgtgtcatttggaatccaggaccagtcagcaaggataactgcctgattttatggtcagaatgctctaactcttatggcatactgatgactttttcttccattttccaaaaaagcaagttttgtcagtctcagtgtttctctgatctagctactcacaattccattcccaaagtagtgacctagttctgtcacttgggtttcaaagggagttgaagtgtcactgagtgagtacagcaaacctgtttaatgatttataggaagcaaataaaaagaattttgtttgctaacctagaagtatatcagattttggtttcaatttataattttgcaaaatataaagacatttcctggctaactccatccagatgaattattcagtattttttctcctatcttaatgaagttaatttgaatgctaatttcctataaccaagaaaacagttgaattaaataacccttatcttttaaacttaaagcttatactactaataatcatttaacattcacttccttttttctgacttaattggtaggtaaataaaatacttcaaatttgattggcaaattggaaaatcacttagaacaatctgctagtattttttattccctttgttttttcctttacacatttgtactgcaaaataaatcaaggacaaagactcacactgaattgatcaacttgtgtttggtcttcatgggaattacatcttttttcccctcaacatttattaaaggaacatacagaatttcagactatagcaaactaatacctttagcttgactaagagttgattttcgttaaggaacagaacttgtaatttatttcgacatactttaatgtatgactcatccctgttaaagttgtgagactcaaaactacgcccaaatcacttaattttatgtccttccctgtttactgtgtctgaccttcaagatttcgtgactgatgctgaaatggaagccaaccactgcagaaatttgggggaaaatgagatctgaagaatacaaggggaagtaggaattcatttctagcatttccaaacctgcttaatcgtgtctgctccaccacagtcagaggaaaagactgagttcatggaaattaccagctaagccttacatctgtctttaatgtttttaggaagtatactgaaaaggtaagtgagatgtctgttttgaagaaagactcttactgggtaccttaaaacccgttgtttcctattagtaaagatgggcagcttctttattcctagcttcaaaaagccttgcccctgtttggtgtgtttctcagtattgtggagaaggtagtttctgagcaaggtggtgcttttcctctgcttctcagcagctaagacagaaattgcaccgaagtgtacaaagggccaatttttgttgtcctgttgtgctcaaatccttttttttaaaaaagttatttcaatcaagtcttagttttattcctcactatataggaaaaaaatctttaatgcctcaaaagttccattcagcattacatttgcattactcttatttgcagcaaatatgagtaaaattataggtttttaaaggtctctaataacatccacttatattggttttgtagataatccataaattaccagaaataaattattccacatttattacacacccatgtaatagatgtcgtgccaggccctggaatatactaatggcatcacctcatgtggtaaaaagacacattccgccatcctggagtatacaaaggtagactagcatatagttcatgtgctcaaggagttcatttttattgacatgatacagatagaattgtagtttagggaatcaaaatctaataaaatgaggctaattccattttcccattaacactaataactagtgtgtaaatctgaatatgacacattctatatgaaagaagctctgtgtgcatctacactaaatactcgtgtgtgccaggtactgttttaaactacgtatatttttttaattctcataactgttctctgaggtatgtactaatactaaagcttattgttaaaggaaggcagaaaaattaagtaacttggcctaagtttgcataactgtgatctgggatcaatatttgaacccatacaggctgattgcagagcctgcactcttaatttgagtgtgatatttatgtgcagtacctggctataagtacccacaaaacgtttcaaattctttataaaatttgcttagttaaaaaagtaccaattgcataatatggttataagtctggtagaagttaggctttttacaagacatgctgcttactgcaccaaggaggcaagaaggctttttagagagcccagaatttcctttcctcaactcctgcttccaagacagtcattttgcatgataaccgtttccccaaaaaacacagacacaaaatttaaagaactggaacagaggaagcagagcttatcatagtatatatgtttagtaccctgtcacttaggtccacccctctttctttgtggattgtggacattttgtttaactgctaaatcatgagaatatatgactgctgagacttttccaaggattttttaaaaaacacattaggctttgtgcagaagtaaagaaaaagtgctgtgagaaccccaggtaggtaatttactttctattgtactcatagtttgtttgaaacctcttcacctctatcccttattgttttatactctgtaaatctgattttacctttaataaacttttctgaagtga

SEQ ID NO: 2114 - DNA, 483 bp, Homo sapiens
ctcgctcctctgacacatcgggagctcctgtgtgcagggccctgtctcccaccttgggctgaggcttctaacggcagggcgtctcttccctccaactagggcacctgaagggctaagtgttccaagacagcagtgtcagcaaaggctgcgcagatttgaggagtgggaccggcagagctggatgaaacctgactatgctgaaggggaaatggagaccccgggaggggcagggacctgctgagtgcctcccccaggcagtagctgacctggaccgcatcccggtactcctgctgagagatcctgactaatacgccaaggcccagggctgcatgcccaggactcaggaagagtctcgaagaatcctctgcacacaagaacactgctatccgccgaagctgatgtcagctattccctgcagactggcctggtccagcagagccagctctgctaaactaccacaggcaggaagaaaatgagccacca

SEQ ID NO: 2115 - DNA, 545 bp, Homo sapiens
ccacagccatagttggcacctgcccaaggaaaaataaccacttatctgcaaaaacccaacagaccccctacctatccccgtaaccccaacctccagaggtagggagctatctctcttcctagaatgtttaatgagaaatttacaaagaatgagaaggtaaaatgctcagcaaaattccaggaaaattaaggagggaaggacagcttgagacacttaattctccaagtgaggtgtcagtgcagttcccaaagcaactccagccttgtcaccatgcctgccaatacctcagctagcagaattcgtcgaaaagcattggcaatggctgcgtcaattcccaccatgtcaaactccagtgagttttcatccatgtgtactacatccacacggaaattctagagggacaggaaaaaacatttaagtgaaatctgctctctgtgtaatatctcttcatacctcccccttagataattccctcaagtattatcctctcatccaaaaacctccctttgcccaaatgtctcttattaaatattctatctcgccca

SEQ ID NO: 2116 - DNA, 496 bp, Homo sapiens
aactccccactccttcctgctcctcagccagggaacttggagaatctagccagatgcagtgacaaggcgccatcttggaagacaacagctctcaccagacaccggacctgctggagccccggtcttggacttcccagtctccagaactgtggagaagagaagagcagcacacgcagtttcaaatagtgaatgactttcatctggaaatgaggccacaagatggagacggagcgggttgctcacccaagttcatgcagcgcccatctgacgttcccccgggaggagctgcagggccttctttcgaggaggtggcagaggggcttcctgcgtgcaaaggagggtcccaccagcccttttggaacctcagcctggtcctccagaatttcacctcaaactactggagtctaggaaaaccattaaaggaagaaattgaagcttagagaagttctgtaagatgctgaggtcacacagtaataaagagataaatgtgtgttct

SEQ ID NO: 2117 - DNA, 3472 bp, Homo sapiens
ggtagggttttgccgatgcttcccctaacctgtggaggcaagtacccctgagaactagggatgccctggggcagagtcctggagacaagtgttggaggagatggtaccgcactggctgaaaatgggaacggcagagagcaggtagtgtgacgtgatggaggagatggtaccgcactcactgaaaatgggaacagcagagagcaggtagtgtgacgtgatggaggagatggtaccgcactcactgaaaatgggaacagcagagagtggcactgggattcagtttctatttccctgagtattagtgaaatgcctgttcaaatcctttgccgatttttttcgaatgtgctttccaacatattatctttttttaaatcttaaaagtaatagtttattctgaatactaatgcttgctaaataatattaatatattttccaggctgtggtttatttgaaactttgtttaaggtgtctttcatttaaccagttattcttttttattgtgagctacgtagaacagaaaagtaccctaaatatattgacaggcctaaagtgaacacacctgctctagagagcccactgcctggaactcctcctgtcaccttcttcctgtcccagaagcaactgccagcctgacttgtgtggtcaccattttcttgcctttctcaatagttttgccacctagagtatatccctaaacagtatattttgccctctttgaatgtttatagaatcatgttggatgtcatctttcgtaacttggtttccatcactattggaagactcttcttgttgcctgtggctgttgttcactttcatggcaatgtagtgttacacagcatagaggggccaaaatttacccgtcttcggtgaacatgtattagggatgtttccagtttggggctactatggaagagggttttatgaacagcagtgcacatcaactaagatttctgtagtgtttttcaactggcccctcatctgaaccacagaacggaagtgatttgaataactgttttctcagttctttcaagaatggtgtgtaactagtgccatcctagacacatatgacagagttagcttatttcgtatgtcagatgcctcagtgcagtaggttctcaaacttgaaggcagaatcatggagagggtttgttgaaacacgtgttactaggcctcacacccagagattctgattcagtaggtctggggtggggccctggattttgcatttctgacaagttcctagatgctgctgaagctgctaggccatagggcacacttcgagaatctctgcctgaggcattagggctttaactctgcagaaccagttcagctgtgaaggaaggaagagttgaattgcaggcttctaggttctagtatcttcaacttttaataagtaaatgccaaataatttttaaatggttgtaccaatttatactcctctcagccatacatgagagtttctgttacttcatatcttcaccaaaacttgatattgtcaagctttttaatttttgccagtatggaaggttaataatggtatctcattgtggtatcagttagtatttcccaaactattaatgcgattaagcacttctccatatatttattggcatttttaatttcctcttttgtgaagttcctgttcaaatcttttgaccatttttttttctattgggttgtctatttttctttttggttagtagttctttattttggatattagttcattatatgttaaacgtgttgcaaagaacttttcccattccttctggctttttcattttggtgtcttttgatgcaccaaagttcaccattttaatttagctgactttatcggtctccctctttaaagctaggggggtgtgtgtgtgtgtgtgtgtgtgtgtgtgtgtgtgtgtgtgtgtcatgcataagaaatccttttccactgtgaggtcgtaaagacagtctcctaaagtatcttctgaaagcatttgaggcagggcatggtggcttatgcctgtaattccagcactttgggaggctgaggcgggaggattgcttgaagctaggagttcgagaccagcctgggcaacataacaagaaccccatctctatttttaaaatatttaaataaataaataaaagcattagggttgtgccttccacatttagctctttaattctcacctgaaattgatttctggggtagttttagataggaatccagtttcatttgtccccatacatattcctaattccccagcactgtttattgaaaagtccatccttgccacattgatttgcagttccactcggttgtatatcaagtctgtagtcctgaataaatctgtttctgagccttctgttctttttctttggttatttatctatctttgggccaacaccttaccttactgcctctgttacagaggcattaaaatgaagtgttgatatcaggtagggcaagtctttctgtcttgttcttgggtctggtctcatcttggctagtttttgcttttgcaattccatacaaattgtagaattatcttgttaggttctattacacttgattggaattacaatgactcttggggaagagttgacagatgtacaataacaaatcttccaaaccacggagagatggcagtttctctatctatttatatccttttaaacatctctcaaataagttttaaaattttctccgtacaactcttacatattttatgtcagctataggcctaagtattccatatatttgatgcaattatcaatggtgtcttttattttaaaaataattttctgcttgctgctgttatattcaaatacagttaatttttaaatcttgatttttgtatctagcaactttgtaattcatttacaaattcttggggattttctgtctatacaagcaggtcatctgggatgatactagaggcagcgcagtatagactggggaacagcaccggcagggtctggacctcagcgctgccacagatgagtcatgtgtctttagacacgttccatgaactgtaaaataaggtgaataatagtacctgcctcatagggttgctgtgagaattgagacagtaaatgtaaagcaggttgtaagtgttacataagtgtatgctattattgtaattacttttctttcctttccagtcatactttgtatttcttttccttactgcactggctagaacctaaaggacagaggtcaagaaagctggcatccctgacctcctgatctgaaaagaaaagctttcagtcattcatcactaagcattttgtccactgtgtgtttgtcttaagattgcctttatcagattaaggaatgtccattttattcctagtttgccgagaatttttattgtcataggatgtttaatttggccacatctttttctgcatctgttgaagtaatcaaattattttatcttataatctcttaatatgatgaattacattgggttttataatgataaaccaa

SEQ ID NO: 2118 - DNA, 1063 bp, Homo sapiens
tggcagaaccacttctggacctgtccctctgcaccccccattcctgcgccctcatttaacctccctgactctgacctgggcttggtctatcttggggcctggctgccgtcctgggacgggaaggggagcagatcagaactcagcctgcggctccaggccgctgggcgctggctgggcctcacgttctcctggaaggaccacctcccttgccctccacggggtctgcctttgctcccaaggctccgccctggacggagcgtccttcttgcctgggcgtcttcagaccttcatctgtgacaccgggggccatgtggctcaccccgaggaagagacgaggactcgctgtgttggctgttcttgagcttctgggctcaagcaatcctccctcctgagcttcccagagtgctaggattacagtgaagactaagggccaagcatgagcctttcttcctgctcttttacccttgaggcagcaggagaggatattcacctcctgacatgacagattctgacgctatctgctcctctgtgactttgggaagcggggtatgtgctgctcctgggctgatgggggaaagtgcctctcccagcaatgctggtgccacttggtgtgctacggccccccagggcagtgcggagccatctgggacagttagacaatgagagacgtgaagccatttcaaggtgcttccttgaaaatgctccagaaaaacagcagaggcggcctctctggggatccggtccagcccttgaaaagaatctgtttgtttcaccactgaactcaaataagccaacagattgaaggaagggagtttccacgcgcccctccccaccaagcagttacctgagttccagagtccagtccgatggatcccattttaccctggtttaaattgtttccttagaaaaaaataaacagaacctcttctctcactctccagtggaaagtatagaatcaaacgtaaatgaaaatgacagtttctaacatgcgcgacctggacacgcggctgaactccgagcctcagctgcagagtggggtcaatgcacctaccttgcagcgtca

SEQ ID NO: 2119 - DNA, 622 bp, Homo sapiens
agacagcacaaccgaacccaacaccggggcccaacggcaggggcttgggcaggagcaaggtccgagggctgccaggtccacgctgcttttatgagctgtaacactcaccgcgaagatctgcagcttcactcctgagcccagcgagaccacgagcccaccgggaggaacaaacaactccagacgcgctgccttaagagctgtaacacttgccgtgaaggtctgcagcttcactcctgagccagcgagaccacgaacccaccagaaggaagaaactccgaacacatctcaacatcagaacggacagactccagacgcaccaccttaagagctgtaacactcaccgcgaggttccgcggcttcattcttgaagtcagtaagaccaagaacccaccaattccggacacagtagcatttgggaataataagaattgtagctgggcatggtggtacacgcctgtagacccctagcagctgccatcatcctcaccatccgcatattattgatatattaactctttgatggcaaccatagcttatcccccttatctccctatgccctacagcagggcagtggaatggttaagaggctttgaagtctaagagtgctggcttaaaaccctaa

SEQ ID NO: 2120 - DNA, 335 bp, Homo sapiens
cgcgccctttgagtatcagttgccatctctaaattgaaccgtgtttgtatttacaccggtgaaaatgagtatactgtcattaaaatagaactctttaagaataattgtggtctcttgtggatcaaggaataaactgcttacagcaaaagagtagcaaggtcttcctggcaagatgatgcctttctggtgttcttcctaccaacagagtaacctcctgatctctagaaggaatcctgaagcatgtgccagagacgcagttcctaaagtctttttttctctatggttagagtgactggccaacatccccacaaatctattaaagcaggtttttgtgt

SEQ ID NO: 2121 - DNA, 704 bp, Homo sapiens
ggttgtgatgcagggacagaaaattcagaatgccacatgcttggcctcatttctctgggtggcctacccaagagcttcaagaaaaacagtttaagaaaatgctaacttcagcaatattggcaagacaaagccccttacactccttagttctttattcagcattgttctgctctcatttattaaaaattccaagtaccattgtcagtattcttcagaaaatcttatagtgctgtctcatttctcttggcaaaagaaagcctgttgtgcaacccaatgaatttaattttttttttttaaagaatcgtgccactgcactccagcctgggcgacagaacgaggctccgtcccccaaaaaagaactgaagcatttagaatcatagtggcagtggtggtggtggtgatggtgatggtgatggtgataatgatggtgatgggatggtgacggtcatggtgattttggtagtgggagtattggtgtggcatttcagcaaatgttgttttcatttgttttaaccatcagccaaggaacaaagcaatctgtctcttcaatatagttacacaggtgactaagtgtcacccgcttccaccttctctaatcaaggaaatggtgacgatcaggttactatagattccttataaggtgccttcataatggataactgtagccattttatgtaagcattgtcctgtgattaaaaaaaaaa

SEQ ID NO: 2122 - DNA, 754 bp, Homo sapiens
ggaagagaagattaagacacagagataccagagaggtcgttcacagaggaaagaccatgtgaagacgcagtgagaaggtggccatattcaagctgaggagagagacctcagaagaaaccaatactgccaacgccttggtcttggacttccagcctccagaactgtcctggatcagaagatgcctgacaagaggccactatcagcagcaacagcacagtggggacaaacctgagaccttgatggaccgtggacaccagcaggagagacagaggaacttgaagtctaaatgggcagacaagaccaacatacacaaagcagagagtggcacaagagccatgtctgatgcaacagtgactcaggaggatcactctgactcagaatggccaagcaaaggtattgggaggaagtgggatagaactgagctttgaagaccgtgctaaaatatttacagactccccaggttatctcaagttctctccaggaattagcttcacctctttgtgctttggctccacatcagttaaatagtggtaacgtttgatcgttaagaaccatgtagagatgaaacaattttcaaagttttttaattaagtgtactcattgccactcaaagacaaataccatataaatataataataatcatattgagaaacaaaatagcaatgatgcagatactcatgtactgtttcatgtttgtggtctttgaggggagtttttactcaaatatccctagatgaataaatacatatggtc

SEQ ID NO: 2123 - DNA, 532 bp, Homo sapiens
aagcagtcagcagtgagcaggggaggaggccagggctgctgggggtcggcgctgaggaagccaggattttccgagggccaatgccgggagccacgccaacgccaggagccacaccaactccaggagccacgccaactccaggagccaagccaactccaggagccacaccgacaccaggagccacgccaactccaggagccacgccgacaccaggaactaaccctgcaagattgagaagagctgatcattaaccaagacctgatcaaagaggacagaagcttatggaaagagggctggagcctcggccctggcatagatttgctgtgtgaccctggatcagttactttcccttgctgggcctcagcttcctcctccctaatatgaagtgtgtgcaggctcaggagttcataactttgtttttttggagacagagtctcactctatcgcccaggctggagtgcaatggcgtgatctcgactcactgcaaccaccacctcccgagttcaagtgagtctcctgcctcagcctcctg

SEQ ID NO: 2124 - DNA, 547 bp, Homo sapiens
ataaactggcatgttctgaaagaatcactctggatgctgtgtggagaaaacactgaaaagcacctgttgtttcctgactttttaatgatcgccattctaactggtgtgagatgatatctcattgtggttttgatttgcatttctctgatggccagtgatgatgagcattttttcatgtgtctgttggctgcataaatgaatagactaagatttcagtgattgagtctcatggcatgtgataaagagttagtgataaagatttaaatggcacataacatcatcccaattgaatgcatcggggggtcatgatgctgtgtgggtttgaaatggaaattacaagcgcaatattacagaagtgtggattttagttacaatgtctctatgagaaagtctaaaagttaaacataagcaaaacaacaaaaacatctaaataccagacactatcctcagaaattagatttgaaaaatgagcttcattttcgaagaacatattgaatttgttatctcgattatggagggcgacaagtcccacagtctgccatctgca

SEQ ID NO: 2125 - DNA, 829 bp, Homo sapiens
aagtcgtcgtaggtgaggcagtcggcgctggcaaagagctgctgcgcggggagccagttatcgggcacatagtcggtgccgcccctgatcagccatgtgaagaccatgattgctttcccttcagccttccacctttgtaagtttcctgaggcctccccagaagcagaatcctgcatagtctgcagaactgattttagaatgccaagctgacattttgagtttttatgagaaaccagaaaatttggtgtgaagaccctaagtggtgtgtctgacttacagcaggcccacagtacctgttattgagtgagataagcaaatggtatttcaggaccaaaacatctgtttcctgaagagttgctcctttaattgtgtatctacctacctgtctatgtaactcttggcaaatacattggagacttctcaactttctgcttctgatgatctcaacttgtggtatggcaaaaggagagcaaaatgttcacccaggggtctgagtttggttcaagagaggaactacagctgttggtgactacaaccatctgcccagatgacatcgtgatcaactcctctgaatcactctaaaggaacgagaagtcctggcagctgagtcatgatcccccaggagccattaagaagttaatcttcagtcacttccatccaaacagaagaaaacccatgaaggatgagaactatgggtcctgagaatgacaggtattgaagacaggatttatcttctctacttcttcttttagaagcagatcaagaaactggcgattgaagagtaactgaaagaaacgcaatctgatcttactagcagtgaaagagcgag

SEQ ID NO: 2126 - DNA, 1974 bp, Homo sapiens
aacttcaattttaatctggataacgccaaagcttttcctcaaattcacccctggagtcagctcatagatgctctgattttgtctaccattgctcctccttaatatctctcgcacaggtgccattgacctttagatgggctgtacggtgtggggttcggtgccatggatctgcttctccagggaccaggatcttgagatcttcaggctgggtttccatggaggcatggagctgcttttcctccttcataactgcactcaaaacagccctgttgctctagaatggagacttgggcaactccttctggcacagatttgttcacctcaggtgaaattcagatagaagcaagctgcaggcagtttcacctctaagtccatgggttctcaactggtaacgtcctcttatggatgttagcccatgaggtcaatcctgtagcaatctaaggcttgagaaaaattaatcttctggaaaattccaagaatacatcttagggaaactggctctacctttatgacttggatcacacaaggatatgcttttcatcttggactagaactgagagccaatggatgtgttatctaaaactatcccagtgtgttcactatacagaggaagattctgagattcaagactcaagactgaagaagatcattatttttattattttagtcttatgcacaaaatgatatctactgaataagcaggtttttaataggtgacttatatatgttagcaaaaataaacactttgtcttttagatctattctagtttttcagtagctgtagacttaagtgctaacttttagcccataggataagaagaaaccaagtcctaaaagtaggccagcaccagggttcaggcctctgacttcaagccaagggctcatcatcttgaattgcgcacgaatttttacacagcgccaaaggaaactgcctgtacttactgttgtaggtgctttgctggattcaggatgcagacaaggtccacgcattgtggttggaacaatgactagatctttacctggtccacagccctccccagtctggctgcaacctctcatgaggctgagctcaccatgaacccctgctctaggcgtctgcatagtgttctgtttgtccccgtgactgtccacctcttctttggcctgttggcatgcgcttatcctccagacctcagtccaaagttcagtcccggagcagacacaaccctgtttgcagagagccaacattctaattgacagtgcgtggtgggaaacagtgaaccgagggaaagagtgccagtgttagagagccacagtgcagtgaagaagagaaggcaagaggatgtgatgcaaaatcacaggacctggcttccagaccattctgcttccatgagaacatttcagttgagaaccggatggcatgaaactttattgaagtatcagagaatcattttcttaagagatggtaatggaatccatgcatttgaaataaatcaacagaaaaaaatgattcagaagagagggaactagcctaaggacaactgtgatattgtgaaatatatatatgggtcttcatcctgtgtcctggcatacctaaaacccttggaatatccaaaggcatgcttttcatgtgcaaatgattgactgatgtcttcaggatggagccaatcaccagaaatgtcaaagcataattagagtgttgggactttcagccataccccacacccctgacctttggggaggagagacgggcagaaggttaagtccatcaacaatggccagtgatgtaatcagtcatgcctatgtaatgaagcttccataaaaatcccaaaggactgggtctggagagcttctggatatctgagcacatggaggttcctggagggtggtgcctggggcagtcatggaagcatctcatcccttcccacatgccttgccctatgcatctcttcatctgtatcctttaaaatatctttgtaataaactgctaagcat

SEQ ID NO: 2127 - DNA, 404 bp, Homo sapiens
tttcaaaaaaagatgagtctcttgtcaggcaacacaagtcagggcaggggtgggtgcagaccccagagcagcttcgcagtctggatgggggtgctcccccgtcacgccacagggccagcttttccacagtgcaggctggtcagtttccaggtagggatgcggtggggcacgttttctgcccggggagttgtgcctgtcaggggagacagccccatgacactgctgtgcctccggggaggccaggagggacaaggagcggttcctttgggtgagggtctgtggtgaggcaccaggagggccattgtctgctggggggctggaggatgaccagccagttggcatagaggctggggcaggatggtgagtcctccagcagcagtgggtgggtggagcagttcacacgg

SEQ ID NO: 2128 - DNA, 3754 bp, Homo sapiens
cacaggcagtaatgaccaaacagagaccaaggtggagctcaagagaaagtaagcatcaaacagcactcagcctgaatccaggcacgttcttcagtccaaaaagcaaaggggatgtaaatacttaagttcatcttactcagatcgcaagaataaaacaccacatagggacttgggaccaacaaaatgctaaccagtgaaataagttgtagagcctctagtgtctctactcattgtgtatttcttgtatctgtctaattcaggtgtggggattcaggatccttttcatctttaatactaaagtcaaaattaacaaaattatatgactataacctattaactttctaatttgcaccacatcttctttctgattgggttaatatgggtgcttcctcagcaaccttcctgctagtctggactctattgttcatctttctcctaggtgctcctcaggttccacattttcttgcctttctgccatctctgccccatcaaagtcaattaggccactcacttctctttacttgtcttctggatgactgtaaaaagtttaaaacaatgcttattcattgtctgcaacctcaatctagacataagtgctgcacagctctctcttttcatgtccctggggacagaggaatcttcccactttcaggctaagatttattccttcatttgatgtttttaaaccactttattctgactttaacaggatgtcttaattatcctttttctttactgactttaccctttttcacaaatgtgctcaagttttcaatttcccatttgcttcatcacttctgtttctcaaaatagtaatgtatactccctattttcatgcttcttctcctccttatttcttattcttttgcaatttggcttccaataaaatttttctcattatcaatgacatctttagtagctcatcgtctctgccatagtcattgaatctctgaccaatgtggaaattaaaaggtgatgatgattcagaggactcagattaacctaaaataaaatttaatgtttttatatttttaattgatactagtatgacagagtatcactgaataatatagtatttttcaactatatagaatcgacatatatcaagaaaacgtcagctttctctctagtatagaacttccataatgtatggatatgtccttgctctatgaccacagtctccccgtaatgtttgcttgctatgtactcagatcctatagtgctcatttctttataggagtggttgtcacatatctgggcaccaacacagagcctagacattcatagatgggcaagattactttgtgatgttgtaaagttctgtgttccattctactcttggataaatgttagtgatatcacttgttcctctcaacagcagccatatatgtgtaaaatcccagtcttgctctacttctctgaattatacctaaacaaatatatctacccgaaatagagtggatcatttttgtatattttattagcttactcaatgacatttaatctggttcaccatggaatctttttgatatgcttcatttgccttcctttttcttccagatgttttttatttagtgagttcttgtttgtttctctctgacacctcctcactaacctaagactggttcctccttgtctacctctccactaaatttcatggttccctgggtttccattctcattcctctcctctaatctctctctccagatgacttcctccactcccacatcagcaactatattcctatggcgaatctcatatcttgatctctagcccaggagtcactcctcattatctgacctattggatagttgaacatggattgctcgaagaatcttaaaattcaatgttctaatactaaatccaatgcataatcccattttcaaacctgcttttccttatatgctacagatttcagatcatggtagcactgattttccactgaccttaaatcaaaatttttggagcccttttagctgttacctcttcctctgatttgtgtgtttgtttgttttttggtcaatcgattctaattcttcactactgaaactgttcacttctttttatctgcactccaacccttaaatcattacttatctattattatgcaatggcctgctcagcatgacctgcctcatccagcactctttctagccatcttgccaccagatgtattgctctgatacatgattttgatcatgtatctctcctaattaaaaaatccttaagtttagccagacaaactttacggtataagtaccacattgtatttgtgtataactccttgctctgtgttagcttttatcctgttcctaaaatgtgcttcatgcttgtgggcaaagtctcattgatcctttcagactaagcctcatttcatccttttcggtagtctttctgactcatctccattcccgagccctaccctaggaaatcagccattctatactccttgctctctaacaatttatccacaaatggatctctatatcatagctatttatttgcatgcatatctctccaccttgagtgtgagctttttgagggcatcaactccgttttattcatctttgtatactcactgtttatctatgtaggttattgctaatcagtacaaacatcagtagatatttgtaaataaataatatctgccctcctgaagctcataatgaagttaagagagagaatctacacatagatcgattagggaaaatgcaattcagagataaaattcatggttgaaaatagtgacgtctcaagaatattgcattgcagaggataaaaacttaattcctatcaccattttttttagtttatacaagagtaactattttaaaatttctattgcaaactggtgtgctgcatttgtacacacacacacacacacacacgcacaaagatttgataagacatagagaaatgagatgtccaataggacaacacgtaactagatgggcaaattaaggtaagccatccagctaaataagcctttggtaaatttatttctgggaattctgtagcaggaattatcttcagtttgctggaattaagatgagccaaaagggggttatatcttactcttttggcctaagcaatacattgttcagagaggaggatctccaggaaggatcttgcaggccttgaacaaaagttcactggagtttctgagaatatgccttacagaaatgcactcaaacagcctaaagaaatgagagttctaataacaatagaataaacctcagtgtcaggaattcacagaaaaaagggggaaaaattgtagaaagggattaagaaacacatttttatatactcaagaaagaaagctcactgatatacatgtatagaaccttaaagaccttttcctgaatagtgttatcttttaaaaaaacactggtaataaaattaactttggagatctaacaagactaaagaagtactgtgaacttttggactctgaaactaagaaaaagactgacaaaggtgatgatgtaggttactgctaatagaacatgtttaaactttggctgccatgattcattttacaccttgtttgagtaggatggtgtgactattatgactgtcctgttgaatttctaagttttcttttatcccatatcctctttgaaattcacaagccaagatataatcatgaagttttaagggtaaaaaaacctattctgccttctcagatagtcctaaatacaattcaacaaatcatcaaatttgtctaggaaataaaatttgagcatttactaa

SEQ ID NO: 2129 - DNA, 611 bp, Homo sapiens
ctagtccataggtaaagagcatacaaaacagacgccgaggtgatcagtgattccaaaggctgacgctcagcagcgccacctccatgccagccaactaggctacgggatggaggggcggtctgtgaaacaccagccatcccgtgaaagctcagcttgccactgtcatgtaacagggtgggtggtggcacagcagaggctcacacttgtcaccttcagcctctagaagctccccgtggggcacgaaggctggggacagagtgtcctgaggttttgttacaaggctagactttaaaatacctttcaaagtttcatcccgcctcatgtcgcaggactgctgtgtttgtgaaagcgcgtttgtttccacaagacaagctccgtgtagtcgccagcgggtgcctggcccaggagctgccctgtggagccagcgttgtccccgagctgctcgcctgtggccgtggctccttttctgaggctcctgactccattcttgcagattctggtggatcaggagcttacattctaaatgctacatagaggtgttgaagaaaatttcataggttctgtaatagtggatgggattaaaagaaaaaatgttaaattatatatatata

SEQ ID NO: 2130 - DNA, 2298 bp, Homo sapiens
gctagctgggttagtaagcggcgcgagcgtgcgagtttctgacgcgcccgcgtcgtcccagctccctggactaccagtattgtcgcccacgtgggcttctctttcgtccgctcaggcctcacttttctccgtaaacaccccggcacgatggagcggccccagcgttcgggagcggcccgggagcggaaagcggcagtgtcctgggagcctcgaaagccgcaggggcggcagctcgcctcggaatgacctctgacggaagaaataaaacggggcctgggacgcttgcacgaaagaacccgacaaaaaccagagcccgcactcactctcgtactggggaggtggacttcagggagggttatctggaggaggaatctctcaaagtacaacacaggagaaagacagtatcgcaatacagaaattttattttttattttattattattttcctgagaccggagtctcgctctgtcgcccaggctggagtgcagtggcgcgatctcggctcactgcaaactccgcctcccgggttcacgccattcggctgcctcaccctccacagtagctgggactacaagcgcccgccaccacgcccggctaatttgcaatacggaaattttaatagctgacgtgaaaaggggttgtctccataaaggatgcgggccttcaggggcagcattattctgcaggtctcctgcttcctgatggcacaaggactccacatcacccagtcctaccttaaatccaatcggacaccagtccacaaactggttggtgtgcttgctcttgatggtggcgacagccgcactgacatctttcaggaccacatcccctctgtacaacatgcagcaggccatgtacttgccatggtgagggtcacacttgaccatctgattggctggctcgaagcgggcactggcgatcttggccacggacagctgctcatggtaggccttcttggctgagatgaccagggcgtaggtggccagggggaggtggatgtgggggtatggcaccaagttggtttggaattctgtcaagtacacattcagggccccatcgaatcacagggaggccgtgatggaggacacgatctgcccagacgactgaggttggtgtacatgggacactcgatgtccaggttgtgctgacatgtcataggtggctttgctgtcgactatgaaggcacagtcagaatgttccagggtcgtgtaggtggtcaggatggagttgtagggctccgtcatggccatggagacctggggggctgggcaaatggcaaactccagcttggacttcttcccgtagtccaccgagagccgcttcatgagcagagacacgaacccagagccagtgccgcccccaaagctgtggaagatgaggaagccctgcagtcccatgcacagatctgcctgagagaaaccagacaacgtaagccaatgcccgtgggagccacaccaccaacctccaccaagccggggccacttctctttgcctctgagagttgatacggattcagaccatccataatgaacacgcatcacactttgaagcagagaaaagcagacaatacagatctatgcacaaatcaccacgcacacttcacagtaagacgttgcagaggtctaggaaggctggtttgaagaaatacacagaagaaaaacggatggactaaccagagcgctcagccagcctgctggactggcacccgtggctacagacactcttgtttagcaccatggagagctccctgcacagaagcaaggactcagggcattgccccctctctacctgagaactagactcagcgcccagcactggatttgataatacaggtactcaaatacatgtgctttcctctttactcagacacttctagggctggcagggtcagacagtaatcccccactttgtggggaggccctgtttttgctgaacagctcaagggcaggaagattctttcttccacacacccctgcaactgccaatacttgttctgtgtgacccttgcagccatcctatgcggtaggtgctaccattgccatggatcaagtggggacgcacagatccaagctccttcacctctcaagggagttgggccctcccacagatctcttggaggaaaaaaatggccttgctgggcctgtcgatttccagtccccacccacctccctcatgtacatgtgtctgtttgtgaaaccttcatagcaccttagcttccaggccctccatcccggctgcctctctggcacttgcccttttactgtgcgggtccaaagagacacctatgttcagtttgtc

SEQ ID NO: 2131 - DNA, 1437 bp, Homo sapiens
gggcagcccatgcctggattttttggtgaatgagtctgaaaagcagtgaccaggtgtgttgagggcctccccttgcctgcacctttttatctctgagtgactgagggctgccaaggccagacaacgcacatgtgtcctggatcctcccctggcctggggcagcagcagcagcagcagctgggcttggggtgagtaggctggcttgaggaaggggctgcccacaagcagggctcatttcctgggtcagggcctgtcagactcaaagtcagctcttcagcattctgtttagaaaatgatgatgcagttcagtgagaaagaaagctcaggataaaatatgttttctggaggggaaatactcaagtgttctaagccaggaacagagactctcaagagaggaattctctggcattctctgccttggataaatcatggattaaacatgagcatccttagaataattttatttttgtatttcactttacactgtaatgcaaacagcttttatgttttctttgacgaagaatcataattgagtcactttaggtcttttagctggaagcatttcaccctaaatgaaaagttaatgcattttttacaaggattaacatgctaactacaacttgccctttcagcagatgacaataagggattctgaaaagtttggactgtctttttctttttgtatacaaataaagcagcagatcctttctctgtgaaggttgttgcagagctcccgtaccagcttataaaatgcggctgtttaagcaggacttgggtgggcagcagaattctgcacatgacgagtggctgcagcttagaaagcaaatttcatctgattccagtactgtgattttaaggaaacggtaaaactcaaagtgccagtaatgccatcaaggctcagtaacatgccatttcctcagcagctaaagacaaaaagaattattttggtgaggggatagaaatcctttcgctttgcagtgacacccactttttcttagcttggcttgggagtaaggagattggagtgtggggggacattagaaactcatttaaggcaaactgaaatctccttcatcagcagtcttcctgctggtgtagccacagcagaactccgaggcttgcaggctgggctgtctccttgctgcctggcttgggtgtttatttgggcaatgcaagctgacattgtgaggtgttgccgatgcccaggccagctagcagggagccctcccagggctggtagaaacctatgtgtatatatattctcaaatttaaatagattgtacatagtgaaatgtaaatgacatgtaaaacagcaatctctatttttcttaactattatatagcagtatatatttgttgaacatgcttgtatactcttcattaaccattttaatattttgtacagataagttgattaaatattttattcataaaacc

SEQ ID NO: 2132 - DNA, 2773 bp, Homo sapiens
cccactgaatttcagcagggatagaagccagagttggtttgccatcaacccacttccaaaaggaaatggcaggagtccagcagcatcatgtagttacaatctcccatgccaggaagaaacatctcccaagctcaaattctacccactttgacacttgaaaagtaaaacatcttcatacgaatgaatggggagatgggtgtgattgctggcagtgcaacaatgagttgaagcttgattgtttattaactgttgtaaacaaattatgaatttgtgccagtagccaaaatagagacaactgggcataataaatattaattctcaaggagatcatctaacaaactacctaaaagatcctttgtggactccaagggtgttaattatatgagactttattctctattcattaattcattcaagattttgttgagtgaatgtcagcctgctacagtacagggctggcaaattgtttccatctctagtgctaattgtggttatagctgctcagtgggctgtattgaaaaagactgagtccaaatctgggcttcatgagaaagagtatcatgaagatactcttcatgatactctacattagaggtgtcttctgtgaaagtggaacaaaggagtgtctgaggtatttgtcattcctgcaagttggaaaaggccttatctggcatgagaaggagtagatttggggtaaatcgtttccatcttatgtgtctttatttccttaaattggtaaatcgaggaagttcatctaataatttttaaggttcttccttcctactcttatttatttatccattattttatctgtccttgcatttgaggtgatttctcaccttgtgaatgcattcctccctagcataaaaaccaaaatctcattttcctagcctcctatgtagtaagaatacagcaatgggatctaggtccatcagtcagatacatctgtcctacatttgtttagaatattatgtaggagatgagactatttcaccccaaaatatggctgtaggtggccagaatgtgtaccccaaatatgcctctttaaaataaggatcactttgagctgattatttggggagacagtagacacaggagaagctctgaaaacagagtagaagttaagcttttgtaagagaaatttgcatctataaaggaaatctccatcgtaagggtgtctcatctctgtagaagaaaaagaatgagtctaagttactaaaaactcttatcaatagagaaggcaacttaaacacaagtaaggttttttttttgtatagttacccttgtttaaggtgcttttcctccctctaactgggtaggaactttctttgtttcagagaatagtatttaagcttgaagtcaaagctatgatacttctgagatttattcaaaagctttgagatatttcctgtattatttcatttatgttgctataaaggaatacctgaggctgggtaattcataaagaaaagaggtttgtttggctcacagttctgcaggctgcacaagaagcatggcaccagcacttgcttctggtgagggtctcaggctgcttcaactcatggtggaaggggaagggaagctggcacgtgcagaaatcacatggtgagggaggaagcaatgggggtgggggaggtaccaggctctttttaacaaccagttctcgagggaactaatgagcaagaactcacttattatgacaaagatggcaccaagccattcatgagggatctaccccatgactcaaacacctcccattaatccctacctccaacattgggatcaaatttcaacatgaggtttggaggcaatacacattcaaactatagcattccccctgaaggatcccagggaatttcacaccacagtatggcattctgatatgctgattgtaaaaaattaaagtaaaatgctgggagatacttcacactgatattgacttatttaccttaagaccagccctgccaaatagaatacaatcaccttccattacccttccctgaatttgattatctatcataggtagaagactgaagaatctacatctggatgaacttcttcacaagataatatctaattttgaagacaatcatttacaagctaatttctgtcccttggttcattcattttccctaagaaacattttactactcctcaaaagaaattcctaccattttccatccctcctctcccccttatgaagaagggtgtgtaatcatctggacctcattaggtatttgggtaatcactctcctgtgattttcccttgtgcattttaaaattaaatttgtattcttttgctcctactaatctccttcttatcagttcactttcagtgaaccttcggagggcgaaggggaagctttccttctttgaccctacacctgaatatctcccatgtgtacatacatgaggtatacatgttattaaactttgtttttctctcattttgttacagcagtccattccaaccaagagctcagaaaggggagagaaaaaattaattttttcctccttacactagtgatggtgcacagagtccatctggcaaggataaaggcagagacattctgttcattaaagcagcagtgatagggccagctctggtggctgtcccaagcagggggcaatgatgacttcactgagcagctctgcagcacaggttggggcactgttcctgtctgctagcctctaatcttttgtctctgggcctcccttggagcccttcagctgtttaattctttttgaaataaactcattttactgctgaaat

SEQ ID NO: 2133 - DNA, 429 bp, Homo sapiens
acctccgaaagccaatcctttcctccatttcttctccaaggtaacaacttttaaacattcacgtgacggaccaccttccctcagccaaacaacttccctgaaaggcgcccgaaggagccttcccatccaccgcgggtgcccaggaaaggcctgtggggctctcctccccgcgctccacacgccctcgcatcccaccgaggggccagcttctgcctgcacgttgctgaaactggcctggaggttctgacaagaattagagcggcggccgttgccccggggatgacctggaagcgaaagagaccggcacgaattctagagtttcggggtttccgcgggttgagattgtacgggaaacaatgcattaaccaaacctaaaaatcaaacaaacacgtctggtagaacctaccattaaaaagcttctttcctata

SEQ ID NO: 2134 - DNA, 12400 bp, Homo sapiens
atcttccgcccggccatcgggccgcgggcgctcggaaccgacctgggagctggcgggaccgtcctcccccgccacgccctcccatcgggctttgggcgccggactctggccaccgctcggcacctgcctccgcctcgccttggggtataggagtcctgtaccgacccctggcttgcccagaggacaggttctcgcccgggccagaagcaaactgcggcgaaatcgagacaacagaactcagagtcactctgtcacccaggctggagtgcagtggcaccatcacagctccctgcagccttgacttacagggctccagtgatcctccaccctcagcctcctgagtatctgagaccacaggtgcaagccaccatgcccagttgtagcaaggaaaccaaaaggtataaacattcactgattgaaaaacaatgtcataaagtcatcccagtatctgtgaggagttggttccaggacccctgaggacaccaaaatcctcagatgctcaagtccctgataaaaaaataaaagcagtggtgccctcgggttcaaaaacctgaacggtggtcttcagttgttcccccaagctcctctatcagaggcccagacactccaagaggctgggaagaggcaagtggctttccctgactggcatcagactcctggatggctgtgtttctgcatactccaccatcaacaatcagaagggcactgctttcttcaagaaggggaccttgcaaagaactgtctcagatggactatctttgagttcatcttgttctgaatgtgagtctgagtctttgtttccagatgacacagtgctgtctgagtcctctgaatcacctgcctcagagctgcagcaaagtttctgctgcccagaaactgaatgggctgcttgtaatgcagattcttcctcctggacaagaagtgctgctgcttctagttcttccagttctaaccccaactgggcctttgtaagggagacttcctttaaggcttctgcaagagctgccaacgttttggatttgactttctgagtccacacacagtagtatgagatgtagagatcattcagtatgtatgctgggtcgttttcctgaaaaattttgtgaatatccaggagacactttaaaactgcacttttacttaattgcagtatctttatagtctccccgtaggccttcatcgccagtttgaaatggcgatagagcaggtaacacaatacccttcttccaaaagacaccatgatatcatgaacattagtccaagtctcaaaccagcatagtattggactcaagtttcgtgatattccatgcagattcaacgttcttgtctccttcagtgacacgggtttcttagcaatatgccagaaggatatcaatcgaactgtagtacacttgacgacaggctctgttgtctagcagataagatttattgacaaattcttgtagctgatatttctcttcttcagaaaaagacactaatgcagcatgattttcttgcttctgactcttttccaaaaaggccgtcattttttaatatttgtcagtccaccaaggattatacttcaaaatctgttcaactgcctcatcttcaaaaaagtcagctagataatgatcaggatcaaacttggccagctcggcggccaggtgcttttgttttcgttctgctgcagggatgaaatctggatccttaataacatcactcaattcatcctgtaactgctgaaacactcctgatcgtaagtttccaaacccatagtggcatgaggattcaaagcactttctgttacctcttcatagggtgtctgctcaatttcccaatcaaactcttcatcgtcaactacttcctcaggaatttcagaatcacctattgcttccacaagtggttttgctgtcccggattttcctggtgccagaagagcaacacatgttcagcccctcaaaatgctggccaggggtttctctgggcaggcgagtggtaaaaattcctttatctgcatcataggacccttgctcgcttccgtatccatattctacaattcttccaggaggggttaatctgagaaagtacggcttggcatagtagtctaggccgacccctcgaagtagacgttgaactcggaggccggggcatagggcacgcggatggcgatggtcaggaaatccggctcctggctgaggctgaacgccggggtcagcatcgcggcaccagacgcaggggccagcgcggctcgccctcgctgccgcggcggtcccaccaagcaactctctccaattttacctttttaaaataaaagatgtctgggccaggcgcagtggctcacgcttgtaatcccagcactttgggaagccgaggcgggtggatcctgacctgaggtcaggagttcaagatcagccccgccgacatgacgaaactccgtctctactaaaaatacaaacatcagccggacgtggtggtgggcgcctgtaatccccactactcgggaggctgaggcaggagaatcacttgaacccgggaggcagaggttgcaatgagccgagatcatgccactgtactccagcctgggtgacagagtgagactctgtctcaaaaaaaaaaaaaaaaaaaaaaaaaaaagtctgtcttccaggacacagaagcctcctatacacacattttggcacttgattatgttatgtcttttacagttctctgcatgtttcttgcaggtaagtcttgattcttcaattacatattaaatttctattgaggatatatatctagctttcatctttcagagtacctagcataggacttggcaccaagtagcccatagtaaacagttattcaaccataatgtatgattttcttttctacttttcactggtatgtttttgtttaaaaagggtaaaccaccagggatggaaatgtccttgctatgttatccttcttctctaattagcaaccacccttcacaatctgccacattacatttaaaaaggattttcaaattagacatttatgcctgggcattaaccagggactgatgaatcagtgccatcagcagaacactgccctgactggcagacatggcaccattgtcaagacttgtaatttactcctggcttttcaaatagtcagtgtgtaactccaggcaaggtttaattatctcctgttaaaatgggaataatatgacccacccccactttgcttcccatgggtatcatgagaattaattaattattgaataagaatatatgtctataaaatattttatagttcattagaggtaaacaaatgcaaacgtaagatattgttcaatgtattatgaatgttcattgttgctgtatttagtacaaagtacctgtattatatcaacagtggtagtacacaaaataatgaatacatgttgggtcagcacctcctccaattaccacttgcaaacaagtcctggatggccagaactaattggaaggttgagacaaaaattatatctcgcacactaaagaaggggagattgatacagcgcgctcacctaaatttcgtagtgccttcatgaactcttcaaaagcttcaaatctaggctaggctacaggaagaacagcagcaactgaagactggcaccttttctggaacctcagcagcaccttccttgtttcgtaagatttcgaagaagcatatcaaaattcttccacccattccttcacagtataataggagaaaacatctatcctccgttgacacctggaagaatgagattccaactcactccaggacatggccagaaaaattcaacaaaagatttgctaaatcctctgcactattatctagaccaggatttctcaacctcagctctgtggacatttgggccagataattctttgttaccagaggctgtcctgtacatcatcaggtgtttagcagcattcctggcctcaaccaaatggatgccagtagcacctcccccacccacttgtgacagccaaagatatctccagacattgccaaatgtcccctgttatggagaatcatcctcagttgagaatcactggtttaggcaatgatcaaagtggggcaactaaatcaaaaggcactgcaatcttaagttgatcaagcatccttctttgaaatcactcagcactttcatatattgcatttatatcttaggtattcatattctaacaattcagccaatgttttttgagttcgcaatggacaaggtacaagatcaagtaagtaattctgtgtatccataaaacagaaatggatatggtatgtcccagttctccacagtaggcatttatgttattcccatcccaatatttagccctgatcagggttgtcaaacattgcatgggacatacttatcctaaaaaattattcattatttatctgaaattgaaatttaactggatgtcctatgtgtgtgcatgtgtatgtttgtttgtttgtttctttttctaaatctgattaccctatcctaacagactcaaggttttttccctgttccacaaactttatgacttgacttcattaaaaataataaagaggaataactgcaaaggctttaaaaatgctgttagaatgagtagcacaactgaatttgaggatacattttctttgaaggatgtctattttcctactgaaaatagtggcaaactccttagaactcattcaaagcctgatgggattcattgcctgatttatttaaaaacacttctgatgctcacagactatttatcatttacacagcaaatgatgttcttctagtattcttgttgggtgagttagcattgtggaaggacatagaggagaatcagacacaaacttcttataacctcataaacaggaagaaagggagcagaagcatagactgactttactttcactcagcttaccttcctagttctccaggtgtggtcctcagaagaggaatatcatgtgacctgggaacttgctagaaatgcacatccttgggacccaccccggacctactgaatcagaaactctgagagtgggtcctagcaaccagtgttttcacaggccttccaggtgattcttccgcatgttcgagtttgagaacaactgctttagagccctggttcttgaccctggctacagggtaaaacacctggggagtttttaaaatactgatgcatggggtccattccaagggagtctgatataattactatggggtgcagcccaggcgtaaacattttttaaaaactcctcaaccagaataacggctctacagaaattttatcaaatgccaaagaaagagttccttattttgcaactatagtgctttctactctggccctaatcaactttcataaaggcagaatggacagacattacgtgttttaatttgaagactaccaaaaggccggccattaaactaggtatatgggctcgtcctcaaatccctaaatctactccttaggacctactatagccagtgtcatataatagaaaagtcacttattgtccaccagaccctgccctaatatttgataacctcttggggcctcattttcttgtgtctacactggggatgatattaactcttcacaggatttggggaattataaagaaagaccatgtagtaaaggcaggaagatcaataatcaataatcacatcagaacctgaagggacttcgtaccattgaagtgaggcagaggagagagaaatttagaaggacaaattcacaaatttcaatgtgtttctataataactacttaaattattttctctttgaattgcctcactgttgtgtgtgtatgtccccactcccacctgtcccattattttcctgttttcacttgtaccttggcaacccatctgtggttttggccaagctgttttaatggcattgaacctggtagtttttttaaaagagtgtggtagtagttatatatggctcgataactcctggggctacaacaaggttaatgcgacagtttttgttgtttaaaaaacatgcttgtctgacaagtcaatcattttaagccccttgttcacttcaggatggttgctaaaggcttctctgtgagctaaaagctctcgctgttaaggggctgcctgccctgactgtatgcattaaatggaacagttctctacatggtttcttactacagatgccttgggatatatggacactggcattacctgctgcaacaggtcctctcccagggtactgctgagacctaagggcttaaatgctcaccaaaccaagtgaccttggagggctggtcatggtgggcatctgggagctgggaaagagcattggagaacttcatagggaaacctagtaggcaaaaatgaaagaacccataagggccattggcatgagccatagctaaaggccactgggttagctctcaaagaaaactgcaagattgaagcataaattccttcatcatgaaccagaagtcatggagtggagccaggggcaagaaagagaaagatgaagaggtagaaccaccaggataaaggtgccaagaaaaacagtgagagcaacactcagggaaccagagacaggaacacagctgggaactaggaggagaaaccaccacagctggagcgcaaagtggccaggtcagaaaagcctcatggaatcctggttaactgaatgtttctattgactgaggccactgcttaagccctgtattcttttttatttcaatccccatggttagaaaaatagtcctaaaatgggttcataccctttcctatcctgcaagatcttaaacatcactatcttttcctgcagtagttaaaagcatgggctttggaatcagaaactgggcacaaatctgagccctgctacttattaactgtgtaacattggtcaaatgaataaacttcctggagcctcagtttccttgcctgtaaaatgtgagtaacaataccaacttattttcaggttgtgagcatttctccataataatccacataaaacacttaccagagcccttggcatactgtgtgagcatgtaataatgttagctgtcattccaagacaacatgttggaataatctactttttccatcactatatatctcattttccttctttttcttctccctcaaacctgtccccattccaacagatgttttggcctgtgttcctagcctccagtgacagcagaaagcctgttagatttcctgcctttgtttcccaaaatttgagccccaagaaactgggacaagatattttcctgagacaagatatctcaggaaggggaatgagtggagcttcttttcaccccacactagaaagccattctgtttagaaaaaggagacggaagggaaagaaaagggtgctataccagttttccagtatcaccgtcagggagaaagcaaggccggagagtatctgggcagatgtaactataagcagcctaataaaggttcccaagtccaaaccatgaatccaaacggcagagctgccagacatgaaaggccttgctgcccttccaccccacaatacttcacctctggaagccttgacaattccagggagtatttgcaaaaccctgcccccacccaaaatttttaaaatactgcatatgagtgagtaaaatgatgccgagatttttaaaaggacaagcttaccatcagataggtagaatgagtagtagtggcagcggtggtggtagtgatatagagataaaagagttaagtggagttactgaaatgtgtagttatatttctcacactctggtgtttgtggatttgtgggctgagattcttatcaaattccggaacttgcaatgtctcaaggtaattgtttaaaatattaattgttttactcacactgcaaatgttgatatagatgctggggtggaggtggggcaataggccagaataagcccaagaataccttggaatttgctgaatttctttctttttgcataatcttattcacacattaacataatatgaaccactctggctccatgagcagcacagaagagactttctgcaaatgtgattattagggcaaaagttaggagattttttgcccccagcttttctcctctcctaaaatctttttttttttttcatttctttgtcagtgtctttaatttttttagctgcatttaaaaggctttctattatttctgcatgagtaagagcatgtgtcatgtcagcctccttgtcagcttctgtttcactttcattaaatttgttgattgagtgtaaagaaggaggcactgtcatcatttccagatttcatagctgtaggttagatctctctcggagcaatgccatgattactgctgcaattttgtaatggagccctggagagacagggatgaaaccagggaaggctccttatccctttcgtgggtccagggaggcagaaagagaggggaggaggatgtttctgtttcacctctattcattcattcattcatttgcttcacaaatattgagcacctcctgagtgacagacactgatttgggtgctggaaagcataagcagccctggtgcctgtcctcacagagcctatggtctgctggtgagacggacttaatcagataaacacactaatgaatgtatagttgcaccaacagatcctcatttaattgagctggactaggacctaggcatcagtattttttttataagcttcataggtaactctgccaggcctgggaatcactgggctagaccatgcaagttctaatcatataggctctactcaagcattaagcattttgattttatctttcaagctgtggtgaaaacgttactgaagagaggtgatatagtaagatgctcacggtttttaaaattaagcttttttattttgaaataattatagactcatatgcagttgtaagaaataatacaggggaatcccatatatcctttatccagtttccccaatggtaacatcttgcaaaactatggtacaatatcacaaccaggatattgaccttggtgcagtcaagataaagcattttcaacaccacatgaatccctcctgttgtccttggatagccctccccactttactcctggtgaccactaatatgttctccatttctataatcttgtcttttcaacagttatataagtggaatcatatagtatagaacctcatgggattggctgttttctctcagcatcattttctggacattcattcaggttgtttcacgtgtcaatagtttgttcctttttagagggctgactagcggtgttccatgtataggggtgccatagtttgtttaaccattcacatgttgaaggacatctgggtctgctccaatgttcagagattttaaatagagctgctatacacatttgtgtataggtttttgtgtgaacatgaagtctttgtttctctgggatacatgcccaagtgtgcaattgctgagttatatgatagttgcatgtagaaactatcatgcataaagaaactgtcaaactatttccagagtatctgcaccattttacattctcaacagtaatgtaccagtgatccagtttctcctcattctcatcagaatttaatgttgccactgttttttatttcagccattctgataggtatgtggtaattgcttgttgtggtttgctttgagtttctctaatggccaacgatgctgaacatcttttcatgtgcttagttgccatctgtatattacctttggtgaagtgtctcttcatgtctttggcctattttctaattggattattagccttaatgttgagttttgagagtttacttttatattccaaatactagtcccttttgtcaaatatggggtttgcaatttttttcccactctccaatttgttttttatcctgtttacagggtctttcacagagcaaagttttttaattgtgatgcagtctaatttatcagcttttccttttatggaccatatttttggtgtcgagtctaagtcgtctttgctgagtcctacatcatgaagattttttcttactaaaatttgatagttttaaatgttctctatttaagtccgtgagttattttgagttaatttttgcataaggtataaatcttaggttgaggctcactttttaatcttaaggattgctcagcatcatttattgaaaaggctatcttccctccattgaatttcttttgtacctgtgtcaaaacatcagttgcatatatttgtgtgtatcaatttctgggtcttctgttctgttcagtggatctatgtgtctatttctctgccaataccatatagttttgactatagtagctgtataataagtcttgaaacccttgaaaccaggtaagactggtccctttcatattagccttccttttcaaaattgttttagctattctagttcctttgcttttctgtatacattgtagaatagtgttgtctatatctatttttaaaacttgctggaatttttttttaagagacagagtcttgcactgttggccaggttggagtacaggggtatgatcatagctcactacagcaccaaactcctgggctctagcaatcttcctgcctcagtctcccaagtaggtagaactacatgcaactgccactacaatcgtatttaaaagtaaagttaaaaaaattttttttgagagaagatctcactctgttgactagtctggtcttgaacacctagcctccagcaatcctcttgcctcccaaagcactggaattgcaagagtgagctaccaggcccaaccagtatgttatgtgtgcagttttttgtagatattatttattatgttgaggaaactcccctctattgccatttttctgatagtttttaagatcattcatgggtgttgaagtttgtcagagtctttctgtatccattgattgttatgatcaagaattttttctttagcctgttaatacgatgtattaaatagcttcattttcaactactgagccagcctgaaataaacctcgcttggtcatgatatattattacatatgctgctgaattctattttctcttttactggtcttttggctggagagagtaggcttttgttggggctttacttgtacgtgcacattgttatttctgggttgtcagcctccttctctccaagtctgggatatatgggacaaaaacataatccagggagcccaccaccttgttagactttgagtccctagatccctaggtggtctggcttctttttttcacctttgaaaatcttatgtttgttttatacataatgttgagagtttttcgttgttcttagtggcagaagtatagaaagatactccatcttctcaaaaatagaagttcagattatgttttgaaaggcactgtaggcaggccagggaaggcttgtaaaaggctactgcactggtccaggtgaggggagttagtctggtagaaggctgtttcttccaccattctcccctcacattccactgccccatttgcatggagctggggttctactaccccagtagggcagcaagagagaaggagcaggcaatatcttggagcattacaccatgataaagggacaccaataccctccagatgctagctgtttctttctagagcttttaaacattctccttcagcagaagaaataagtcactcctgaaagcatcctaacaatgtgcatttctccaaagtttccttaacacttcacatttaacatgactccaggtataagcaacattaaacaagtcatatcttatgttacaacttgagtgaaactttaatgatgctgaatttgctaatttgctctggtataatgtatttcctgtttataatcccttttggctaatagcactaatcaacagaaaacactgacagactgcacaatggcaacagtaattctggacagagatagttttattatctacagatgaatccatgtttctaaaacattatttactataatgtaaaatatgggttgggcgtggtggctcacacctgtaatctcagcactttgggaggctgaggcgggcagatcacctgaggtcagcagttcaagcctagcctggccaacatggtgaaaccccatctctactaaaaatacaaaaattagccaagtgcagtggtgcatgcttgtaatcccagctacttggggggctgaggtaggaggattgattgaacctgggaggcagaggttgcagtgagccgagatcataccactgcactccaacctgggcaacagaaggagactctatctcaaaaaataaaaataaaaataaaaataaaatgtagtagataaaggtcataatttctatgcaccaaagcttttataggaggcctgtattttagcaatcaacctgtccttattctgttcaaattcaagggcacttgaatcactttagatggtgtcacctacattgggaagcaatcacagtatagatattttttcttattatgtttgcaaaataaacttcacaaaattgtcta

SEQ ID NO: 2135 - DNA, 650 bp, Homo sapiens
ccaaagtgcgtaactaagcctgggacctcacaaataagtctcttccctaatggccacctgattttcatcagacttgccctggtttcctaagcctttgggctgataactgtgtttacagcttgttaaatatgtgcctcatttattctttcccggatccacattcattcttgggaagctctcagtggcatttgtggagaccacagcccagagccctcctggacaggatcaccgggcagactcttggccagagggcagaggacttctgtgtgtaaatgactctaattcccatgatattaatagattatattttcagggtctgtcttgagtggcccattctctgtaggggataatggtttttagaaaagaacttttctggatgtaacaatgaaggttacattgaggagaacgacaaatggctcatttataaaaatgctgctggctgtgtgaatgtatcaattctagctaatctcacagtaaagaatttgtccagggactcctgctggtggaggagttgcctgtgttgaatgctaagtgaggtctcaaaaaggagctgtgcgtgccttgtgggggtctgggcagctaccacatcattctggaattctcctgcctctgtcaaggagcctgaataaacgtggatgctatcacctcta

SEQ ID NO: 2136 - DNA, 553 bp, Homo sapiens
ttccattaccggccagctacatttaaggggccattcaacagtggcagggagggaagagccacagctctggagagcactcttttcttctggtccattattttccctgaagagacccctgacgcctaaagagacggtatcgctctgctgcccaggctgcagtgcagtggcacaatcacagctgacggcagacttgacccccccaggctcaagcgatcctcccacctcagcctccagagtagcttggactacagccctgtctcagtgtggcctgctcccagaactgtttctcctgacttctcatttcaccaagaagacatggactcagaaaaatgaagagagaaacacaaagacacaggagcagcaaccaagcccctcttctccaggcaatcatctgacttcaattggcatagaccccttaggggtgtggacactgtctgaaagtatctggagagaccaagtttcagcagccactaagctgtcaaggctctttaaaaatctgattcctggccaggcacgggggcgcacgcctgtcaccccagtactttgggaggct

SEQ ID NO: 2137 - DNA, 1433 bp, Homo sapiens
ggaagtgcgtaccggaagtgccggcggcagtgtgtaagacgctcacgggcgcgcggactatcgggcggctaggctctctgaggaggctgccacagtgaagcaaccgtgacaagtggtgcccgaccagggacctgaacgaggaaggtctgccagagcagagaaagtgaaactgatcagacgaactacgaacccctggacgggagagtctgccggcggagaatataaggagatggacaaaccgtgtgggtgccctccaggtgtgtgtgaccatggaacgggagaccggagggatccatggtattcaaccgtgggcctgttacctccagtacgagccatgagccagcggaatctgaatgcaaagacagaacaagggccgaccggagtcacaatgacatccaaccccataacatggggacagatcaagaaaacgacacaagaagctgagaaactactggagcgccagggtcaggcaaaaacccctgactccatgttcttggccatgctagctgtagtgtcctgtgcgtctataggatcgggtgaaccaccaaccggcaattgaaagctgcacagcctgaaattacctttattcaattaatgcaaaaacaaaaggggagatgttggaggccgaaggaatgagggtcgtgaccaactcagtataccactggaggctctgtgagcaaacagcaaactgttctcatgaaagcaggatgttggcgaactgacaaactctgtctgccgccagaaggaatgctgggggcagtcatgtcccaggtcccgtgctccttgaggttatccacaggaacatccagaacctgttgaacaaagaaaggaatcatgtgggcctgtgttaaatcaaatagctgaccgacagttatcccttcctccctattcactctacctaataaatatgaagggctgtaaaagctcaggtccctgttccctaatatcaaggagccccctgaccccttctttcaaacagatccttttgtctgtctcatttctgcattcgtcgtccttcgttcggtccagaagcaaccgcgacagtcctgcatgtgttgatgccacctgtatgtgcaggtgtgacctcaggtgtgtgagtatccctcataccccttatcatcactgcctattcgctcttcctccagcctctggcaaccactaatccacgttatatgtctagatttgcctcttctggacacttcatataaatggagtcatacaatatgtggtttcttgtgtctggctttttaccactgaacgttttcagagttcatccatgttgtagcatgtatcagtttttcattcctctttatggctgaataatactgcattgtatggatataccacagtttgtttactcattagttcatagacattggggttgtttccaactctctgatattataaatgctactgctgtgaaaattcatgta

SEQ ID NO: 2138 - DNA, 3743 bp, Homo sapiens
aggacacagttaaacaacagatccactttattccatccccttggaataacatatttaaatttcttattggtttaattcgtttttctcacatcccgagttttcaaggtaaagccaagtaatgtggaaactacctatttctactgtgtactaacatgcatttaactacagttgacctttgaacaacagggggtggaaactgtgtaggtctacttatgcatggattttcttccgcctctcctacctgagacagaagacctttgccttctcttgctccttctgctcagcctgctcaacctgacggtgatgaaaactgaagcccttgatgatgatccacttccgcttaatgaatagcactgtagaagtctcgcatatatgatcatttaaaatttcgctgaagtcatgtctgaattctgcacactgccttatggatgtgggagaggtgactaaactgagtcaacgcagtcaaccacccaggacttgcaattccagggggttgcatccacctaaccctccggggttctggcttcggatagtgtttgatcaatggaagcaacaaaagaagattggaggacatgaagacaggttactggatgatattcgacatgagctgcaatcctccatctgaggtcccaacttttccagaaggcttctgtcctgttgcgctcattggattctgcattatgggattctcttgaagtgtgtgaagaataatgagctaaataaagaggaaaaacaaaagaaaacaaaaactgcagggacttttataactatcattgattgccagcttaagcctgctggactcttcacaaaactatatatgcttcaagcttaatatttaattttgtaattggaacatttataatcatattatgcatttaataaggatgctctaattcagatttactattatcaggaaattaaatttggagttacagtaatgcatgcatatatatgtgtgggtgtgagtgtgcatatacctatatatgtatatacatatataaagtaaacgccttcttttaacgtgtgttttaagtatagcttccatgtcctagttaattcagcaccctcccttttatcctttccttgccattgtcctctctactagactacaataaaaacaaaaaactatgaaagtaagcagcttataatcataattttaatcaatgtagcctatgcaagctttaagaaacatacgtctaacatcttagaaagaaagcttatgaacacaaacagcagaatacttaaatacatttgaaacattcacattgaattgattctacaaaattttgaagagcaacagcttttgaatttagagctataatcagtaccctaaagtttttaccactgagttactacctagtaaaaatatgttatatttgcaataaaagtacacattgtaaggacataagaattgtcatcaaggtacacaaacattttagaattattaaacatttaaataaatggaaattttaaaaataaaataacaatattatcatacaagttaatgatccagtttattaatttctaattctattgataaaacaagggattatttttgaaagggtttttctatctttcatacaaaccctttccaaaaatgtatagatacagtacggattctacctgatcattcttgtgcatatggtgatgtaagaaaccaaaaaaatgtaaattattttcataacactgtgaaaaccaatatttaaaaatacagtgcacaattagtagtgagtaacatatataaatttagaaatattatatttctgtacacaaagtaacattataaatgaaagcttcaggaataatgagctacttattattccggaaattatatatcaaaaatttcaaatatagaggaaaattaaaaacccactcatgacccatgaaaattaataacccattcgatcatacacttaccatgtaactttctgttaatttggtaataaataatgtcaagagattttaaatgaaaatacttattctgaaacataaaaacaacatctgagatgagcacaaatggatcaatagatacattattgattattttgtatcataaaatactatctagtacaacattctttaaaaaattcaatatttttataatgtaagtaaaacgggaagaactgttagagaaatgggcatcagatttagattaattctgcctctaacgcaaattgtaggctgagccctatatgttcttgaccattctaagttttactacattaaaacacataaaatattctgcgaggttttctccaatgggattttgaatctcactgatgactgtgatttaggagtaatgtagagagttttgcaactaactttactttacaccgttactccttttctacttgggggttcagttcaacacgctagtaaaagaaatagtcatgagagcatcctaaggaaagtaggcaaaatgttagtgcctcattatatttacaatctttacaaaacatgtatgtcagtaaaccatattaacatctaaagcacatgatatgtagaaacaaattgtgactacaaaatgtgtcttgtttcttaaatatgctaaataggaaataaatcacatctacttcaatttttaatctgtggactttggccttagtttgtgttttattttatttttttgcttttgattttaaccactgaaatcatttaccaatactataagccaggaaatacaatgtaactggccagttgagaattaagccttctctttttattattacaatcaaggggggaaatgcttatatatcttcctgcacaaaatgtttcatttatcaaaaaaaaaagtgagaaaaataaagaaaatttgggtgagataaataatccacaactattaattcaacagatattatttaagaaattcctacctgtaatttattttctaatatttctgcatccttagtatttatcgctcaaagatatttgcagccctcatagcagtgcttggaaaagagatttgctctgaaaatttagaaataaattcctgaggtgaatacagttcaaaactaaaatatattgctgtattatattggtttttctcatttgaaattaaaatctaaaaaaccttcatattaggttgtgtgtgtcaagctgccattataaaaacactaaatgaataaaatttcgcaagcaaggcagcattatcaggctaagtacatgtagtgggcttatatatggtgatgttttacataattcagctattaattcatctatagatttacatttcttaagtgcaaaaaaaaatgtaattatttcattacatatggaattcacctcccaaatttctcagaatctaagagaaaggattgacattttctgatatttcatttttgcttaaaattaagttcttaggatgtttagattttattataaatattacaacttaaattccagagttataatgaacggtctatgttttgaaacacagagggagaatggggtaatgactgaagtactgttttttcagtttattagtaaagatcagcttataagatgtcattgtaaaggtttctattgataattaccataaacaaagattaaaactttaaatactaagttctggatttctaagcccggtgaaagtttgtgcaataccatgccttgcatttatgatttttcttttaaaatgaactataaatgaagaaatttacacagaattggaaactattcctacttttatttgcattcttccttccattcattgctaatgttcaacaataaagcattttaattctaaa

SEQ ID NO: 2139 - DNA, 594 bp, Homo sapiens
cagaagaacatggaagccatgtgaaaaaaacggatcctaaggcagttttgaacatctggaggcctgatttattggagattgcaaatgtacagtgtaacatagctgtggagagcgagaagatcaggattgtcaatgctgtcattgcttttactggaatccccagcacgaattgaaggtctcactttgccacctaggctggatgcaatgcaacggtatgttgatcttggttcactgcagcctcaacctcctgagctcatgtgatcctcccacctcagtcccccacgtcgcttggattacaggcctgtgccaccacacctggctaactttttttgtaatttttgtagagacagggtctcactatgtttcccatgctggtctttaatgcctgagctcaagccatccgcctgcctcggcctcccaaattgctgggattacaggcatgagccaccatgcccagcctaattcttctaaatcttatcctagtaattaagccagaatttttctctgccaagaccaatagatggaccaagaagtactcatccttgtaaactttctttggataaattgcttacatataataaattcagagttaag

SEQ ID NO: 2140 - DNA, 1016 bp, Homo sapiens
tggtagggccacatctgccagagcctggagtctgcgaaggccgggacccggttccccggcccacagtgggggtgtgcaaacccgagagaactgggaagtgccgtcagaagcgataactgacgacgtctaatgtctatctgaccgcagtcgctgaaacctctacaacttagttgaccgtaactgccagagccctgccctgaattcctgtccttactccctctttaagattgcgtacccactgcagagtgctgaagacggggtagccacgaggttgcaaattcgtgaagaatcagcatcatgtttggcagctgagtattggagccaggagcctgccatgaggttttgagaacagagtgctgttttagagctggcagcagcatctcagcccaagagaaggttatattcccagaggatgtcagtcccaaggaccagtagctgccatcagtttggattctgaaaactaactggcatcaacactgggtgtagaaacatgcttgccttatgtatcagaggacatgctcagcagatccaagagatatatttggcaactttttctagaaaaggcacattgggtatcattcattacattcttgagtttttttgggtttttttttttttttttgagacagtcttgctgtattgcccaggctggagtgtggtggcacaatcacagctcattgcatcctcaatcacccaggcctaagcaatcctcccaccttgtagctgggactacagctcacagcacacctggctaaaattttttttttgttgagacggattctctatgttgcccaggctggtctcaggctcctgggctcagatggtcctcctgcctcagcttccaaaggcacaggccaagttgtagctttgtcccttgccatcatgcccaacaagaggttctataccttttaatgaattgactttcataaattggttatgttggtgggcaaagttctttaagctggaaattgtaaattcctcctgaaatgttttttcatgcagttaccatgaactaa

SEQ ID NO: 2141 - DNA, 2804 bp, Homo sapiens
taatcaaacattttcccaaacttaagaaaaacaccaagaaggaatataagtacaggggacattagaggataagctcataagggctggactaaatctttttttttttttttttttttgagacagaatctcggaatctcgctctgtcgcccaggctggagtgcagtggtgcaatcttggctcactgcaagctccacctcctggattcctgccattctcctgcctcagcctcccgagtagctgggactacaggcacctgccaccatggtgggccaattttttgtatttttggtagagatggggtttcaccatgttagccaggatggtctcgatctcctgacctcatgattcgcccgcctcggcctcccaacgtgctgggattacaggcgtgagccaccgcgcctggcctaaatcttttaaggagactcagtctttgtggcctgacacttggggaacagtcagcttcaggaagttgggatgccacacctttgtttcttgaaccatttagggaggtgtttcttgaaccattttgaaatcagaagtgtgagtcctccagccctgacttttttttcaagattgttttggctatttcaggtcccttgcaatcccatatgaattttttattttttattttttgagaccgactctcactctgttgcccaggctggagtgcggttgcatgatctcagctcactgcaagctccacctcccgggttcaagtgattcttgtgcctcagcctcctgagtagcttggactacagacgtgagccaccatgtccagctaattcttgtatttttagtagaggcgggctttcacgacgttggccaggctgatctcgaactcctgacctcaggggatacgcccgcctcggcctcccaaagtgctgagattttggtgtgaaccaatgcgcctggccacaatcacatatgaatttgaggatatgctttttccattgagcaaaaaagctattgggatttttatagggattgtgttgaatctgtacattgttttgggtattgtcatcttaacaatactaagtcttccagtttatgaatgtgggtaacttctaatttatttatttcttcattaatctctttcagcaatgtttttacagttttcagtgtataatatttacttctttggataaatttattcctaagtatcttatactttttgatgcgattgtaatgcagatagaattgctttatttccttttcaaatatccactgctgatgtatagacaactgatttttgtgtgttgattttataacctgcaactttgttgaattcatttattagttcaagtaggtttcttgtagattctttggtcgtagagatacagttttacttctttctttcccatttggatgctctttctttctgcttcctgtcaacttgctctggctagaattttcagtaggatgttgaatagcagttttgaaagcaggcatctgcattcctggtgatcaaactaattaaattaaaatacatgtaattatttagtttgagacaattagatttaaatggctaggttagggccttaatccaatatgattggtttctgtataagaagaagaaatatcacagtgtgcatgcacagaagtacgaccatgtgaagaggtagcaagagagcagcaatctacaagccaaggaaagaggccacagaggaaaccaaccctgccagcatcttgatcttggacttccagcttccagaactaaccagggaccccactcccatgccgacagtatgggctgctgtcttcaggaccattgcaagatgtcagagctgcagcatgatctggaggctttcctcgctttcttctgcttcccctcccttgatccttcacaggcattttcctcaatacatctcttgcctggctaatcctgtctgatgagtttccagatggacctgaattaaaatcttgttctgctgcccaggctggagtgcagtggcacaatcatggctcactgtggcctctaccttctgggctcaagtaatcctcctgcctcagcctcctcagtagctaggactacagatgcatgccaccatgcccagctagtttttaaattttttatagagtccagggtctccctatgttgcccaggctggtcttgaactcctggcctcaagcattcctcccaccttagcctccaaaagtgctggagttacaggcgtgagccaccacccagcctatgcaaataatttttaaacaataaatattaaatggttttgtttcttttggagacagggtctcactctatcactcaggctggagtgcagtggtgggatcgtggctcatggcagcttcaacctcccaggctcaagcgatcctcccacctcagcctactgagtagctgggactacaggcacaagccaccacacctggctaatttttgtattttttgcagagatggagttttgtcatgttgctcaggctggtctcaaactcctgagctcaagtgatccacccgccttgacctcccaaagtgctgggattaccggcatgagccactgcatgcagcctaaactgtatattaaaacgactgctttagaacacagtcacagaaatgggattgagtcaaatggactgtataattttagattaattcatagattagtattggcaagttactttctattcagtttccacaaatctacactgccctgaaaagcatacaccctatcagggtctaaaacagtggacattataatttttcaaatagtttgtacctttaatgttttaaaaatgtatcttgtagctttaatttgaatttttacatttattaaagaagttaatgattttct

SEQ ID NO: 2142 - DNA, 267 bp, Homo sapiens
cagccttgatctctacaaaggaattttaccacagtgattaaagttcgagatgcacaacagaaagtccacatcaactgatttcattacacctgttacatttcaatacactccagggaaatggtagtcattaatattatataccaaatatctctggttgctatccctgggggtgctttgcactggcctgtaccctttgaagttagatgtgaccatgtgactttcttgagccaatgaaacatgaataaatctgatgtgtattattacaga

SEQ ID NO: 2143 - DNA, 579 bp, Homo sapiens
aagataagctaataactttggacacaatttcactcctctgcattcaccaaatgtccaattacatatcctccctgcctggaccttcagaacaatataaaactgaatgaaggctatgaaagaagtcacaggaggatttttgcagagcttccatccagttcagaaacaaagcaattcaatacatgtcttcaagatttctaaaggcaatgacttaattctaagttccatgaaagcaggcattgtgtgaatttctcctgcatctggaactggcctagcacaccaaatggagtctcactctgtctcccacgctggagtgcctctgaatgctgttttagccatggttctggagagggtagcgacaggagctgtctaggtgggatccagaggaaagtacgaatgagcagaaggtgttgaaaagctaattcacagctccccagctgcctacttgtggggacagctttcttcggctgcaggcagtaattgctttactgctatcctaaattgccctggagaagaaagcaaagctttgcttgctttatcctgtggatttaaagcagtgcctatacttgctctgcatagaag

SEQ ID NO: 2144 - DNA, 383 bp, Homo sapiens
tgtaagacagccactccacccactgcagtctacaaggaaagcctccatagctgtgcttattaccgccaacaggatttctttagtactaagcttcaagaaaccagcaacttgcttgagatgtgtcccacttctcgttctgggcccatgaaacttggatgaaactatgcctgccatctggttcttacttcagggtcacggacttaagattgcccattcattcctctttaataagacatcttggtggactaatggctaaccagtccatgatcacacatcactgtgatggtgtcacacacttggtattttttaatttagggaatgttgtgatccaacatggctgtcacggacttgatgcaataaagcaaactgtagctgagctgaaa

SEQ ID NO: 2145 - DNA, 5578 bp, Homo sapiens
atcgcggggggcggggcgtcgcgggcacagcgtgagggccgccgttgctggagttcagcttagggaaggaggactctgaggaggccccgagcggcggagcgcttcgggggaggcgcccgcgcagacgcgaggcccatagccaggaccaccacctagctgttctacagtctggggacgacggtttaaaaatttatgccttgcatgcgatgtgcagtgggtgatggaagaacgtctacatggctttaaaattggatttaaaaggcaaatattttaaatgaaggaaaacccaagaagtttacttgattccttatcttccaggatgcgacttttgtttatttatttattttattttgatggagtctcgctgccgtcgcgcaggctggagtgcagtgacgcgatcttgacccgggaacctccacctcccgggttcaagcgattctccttcctcaaccacccgagtagctgggattacaggcgtgtgccaccatgcccggctaatttttgtgtttttagtagagaccggggaaggtatgggccctcttttgagaaaaatgcagagtgacactgaattttgtaactacatcaggaggctcttgaaccttctgcagctcactcgtggagtttgtagagatgcgtaataatccgaagtgttaaggaagaaggttctgttgagaaaaagttggagggctgaaagggatgcctttcgctatttcgacatgtgtggctgtaccccagagtgccctggctaacacgcaaaaccatgaattaggcggcttggcgaggctcagtggaggctggggccgagagtcatgtcaaagtttgtggggttaacctgcacccagtgacagtcatggcgaagtttgtgaggttaactcgcacccagtaacgctgttccaatgcaaggtgtgtatttggtgtcatccacgggaagaggaaacagcaaattttctcatggccttggcagttccacatgatggacatttcatatctgcagttttcttcgcatgagatggcttttttgcacaaaaacactggaatccagtgagcaagaatgatagaatgcaagatggatttccacatgaggaagtgtcacgaacaagcgttttgcatctctgtcagctggattcccccatgtgtacgtatgtgagaacatgccgtgtttcctgtctgtaatggtagaggcagccctgatactggattttcacctgaggatggatagatcttcagggttcaagtgggtttgcatctggactttagggtggccctgtaggccctgtgtgagaagcccccttcccagtgaactttcccttgtgtgcccgcgtggacagccaacagggggagcagtgcgagcgtgaaggcagacagtggcctggcccagtctgatggtaagtgggccagaggcagtgagtaccatttcttgatctgactactcaagacaggcgcttccctaggtactttcacacctcattgcgaggtacgtgttgttcccattttacaggtgcagaagctgagctgcagaggcgttaggtacctgcctcataagtggtagagactccagtgtcaccctgcccctcacgttcggagcccccgagggagggtctgccgggcagctcagcccagcactctgtaaggaaatcttcagtgccactgcccaggatgtcttcccggggattgggcctgaatgtcttgaccatgccgtgctggaggtaggaggggtgtcttcatatggaagaactgtacatatttctttggcagatggctgaactctgtgaccccggggcctgtttcagcctcctgctgtcagaaagcagctgtttgggaagaggctgtgattcggccttgtttgagggccgatactctgaatgggtgaggcttggaatcctccctttggaacaaagaaacataatgattttgctgaaggtagaattgggggactaggcagagtggcctcctgccctccctggggtggttctgtcttttgcaaaggtggctgcatccttaggggaaggtgaggggagaagcagggagcatggagagaagtggctttcgattttctctctccttttggggagttcctccttatgtggctggtctggtgcatagtgtgatgtattcctgtacgcaacgttgccctgacagccagtccaagctgagtctagagctggcaaggtgagctcccagtagtaagagggtgtgggcggcaagccacccaggcaccgaggcaagagacagaggacacgagctgttccagtataataaaatataaaacaagaatagttataccagatatagatcttagatatgattatatatgaatatcattaatcatgagtttgcagcaattactttttattccaatattatgataatcctcgctctataatcatagcctaggaaaaaccaggccatacagaggagctgaggggacatagtgaggtgtgaccagaagacaagagtgcgaggcttctgttatgcccggacagggccacaagagggctccttggtctagcggtgacgccagcgtctgggaagacgcccgttacccggcggatcgtggcccagtggtagcaaaaggtgtcaaggaacaacactcactacttagcagaccgggaaaggggcggggggggggtctccctttccccgggggagtttagaaaagactctgctcctccacctcttgtggagggcctgacatcagtcaggcttgcccgtagttatccggaggcctaactgtctccctgtgatgctgtgcttcagtggtcacactccttgtctgccttcatgttccatcctgtacacctggctctgccttctagatagcagtagtaaattagtgaaaatactaatagtccctgatatgcagaaataatggtataagctgtctttctctctgtctcctctccctctctgcctcggctgccaggcagggaagggccccctgtccagtggacacgtgacccacgtgaccttacctatcattggaggtgactcacattctttaccctgccccttctgtcttgtatccgataaataacagcgcagtcagacattcggggccactaccggtctccgcgcattggtggtagtggtcccccgggcccagctgccttttctcttatctctctgtcttgtgtctttatttctacactctctcatcgccacacacagggagagacccaccgaccctgtggggctggtccctacatctggcgctctgacgtggggctctccctcgctgtgtgaagttgcaccctgagtgcgggatcagcggaggagttcaacgagagattcctgaggattgcagtctataaacttggtggaaaagaactacagcctgtgtgggtcccctcccgacaattaaaattgcaccataactccaaagatgaaacgctcccagaaagaaaaggcaaagacccatcggaaacaaaagagcaactttcaccgcctgatacatacacttcatgacatccacattgagacaaaatctcgccgtgtgacctacaacacctctcgttcaaccccacctacttggggtcgaatacagattttatctcatcaaacagaaaaattcttaacagaaaaaggaatcccaaaaatgactggtaatataattctggctgcctttatggtagtcagtgcagcggtaagtataccaccggtcggggcaactcaaaattatacttattgggcatatgttccttttccccttctaattcggtctgtctcctggagggactctccagtagaagtttacactaataatagtgcattcatgccgatccctaatgatgatcggtttccagctcaaccggaagaagaaggtatgcactttaatctgtcaattggctataaatatccaccattatgtattgggaagtcgcctggttgtttagcttattcttaacagaattggatgtggactgtaccgtcctttacaaatgattcttatcaagtatataatgtgttcagtactaactcttttcaacttctcactgtcaaacgtaccccacatgaggcatggagagttcctctcactaccaaaactaataaaacaaaaggactgccggactgtccaaagaaacctacaaatgggccttttatagtgacttcaattttatgggataattgtaatgctcccaaggctgttgtactccaaactctagccatgggtattgttattgattgggctccaaaaggacattattggcaagattgctccagcaaaaataccttatgctcggagtttatttattccttagattatatagagcatgggtggcagtcttacacgatgagacaacgggtgtctccttacccatttaaatggatggacacaggtattgctcctcctagaccaaaaattattcatcccttttttaccccagaacatcctgaactatggaaattagctgcagctttgtcgggaataaagatatggaacactacctatcagctccttcgtactaaaaccaaaacacccacattcaacatcacccttatttctgaatgggtgatacccattaggagctgtgtcaaacccccttacatgctgttggttggaaatataattatgatgcctgatgcacaaactatagaatgtcataactgtaagctgttcacttgcattgatgcaacttttaatcccactacaagtattctcttggtaagggctagggagggggtatggataccagtttctctacatcgtccatgggagtcttccccctctattcacatagtcaatgaagttcttaaagacatcctcaaaagaacaaagagatttatttttactcttattgcagtccttgcaggactacttgcggttactgcaacagcagcaactgctggagttgccatccgcagttctgttcaaactgctcactatgttgaagcatgccagaaaaattcctccagactttggaattctcaggcgcaaattgatcaaaaattagctaatcagattaatgatctccgccaaagtgtaacctggctgggagatagagttatgaacttgcaacaccgtatgcaattacagtgtgattggaatacttctgattattgcataacgccttatgcttataatcaagatcaacatagctgggaaaatgtctcaagacatttaaaagcctgggatgataacttaaccttggatatttcacaacttaaagagcaaatctttgaggcttcacaagcccatttatccacagttcctggctcacacatttttgaaggcataactaaacaattacctgattttaatcccttcaaatggctcaaacccgtcagaggatcattgttgttactggcattattaatattggtatgcttatgttgtctccttttagtctgcagatgcctctaaggagtccgaaaccaagtccgaagtcaacaacaagcaatgatggcgatggcgattctagttaataaaaaggggggagatgtgggcggcaagccacccaggcaccgaggcaagagacagaggacacgagctgttccagtataataaaatataaaacaagaatagttataccagatatagatcttagatatgattatatacgaatatcattaatcatga

SEQ ID NO: 2146 - DNA, 510 bp, Homo sapiens
tcttcagcctgaaacccatccctagagtcttgctgtgtcgccaggctggagtgcagtggcacgatctcggttcactgcaacccccgcctcccaggttcaagcgattctcctgcctcagcctcccaagtagctgggactacaggcgtgcatcaccatgcccagagtcaagaaaacttttaagctatttacaacttttaacaattgagttaagtatactcaagaacaaaattcagagcatatttgtttctctctacctgatttctacagattttggaaactatttgtgagatgctggccagtacaactttctgctctgatggaaccatgctagatctgcgcttcccactttgtagccagtggtcatgcattgctatggagcattcaaaatgtggctaagggaaaattaatagaggacaatgtggttgtgaattttagaaggtcttgaaaagtacagcccacacacgtggtgcttactcagtgctgttacacataaggcggtaaggggaattt

SEQ ID NO: 2147 - DNA, 398 bp, Homo sapiens
cagatctaggtttctccactcaggaaaagaggagaatgtacccatacttgggaaaacaagtttccgatggcacagctttgatcaaacagcaaaattctatccatctatgtattgccatctgacagtatgacaaatggtcccatgtgcgatattcacactgcattgcagtcaaacctgatctaaaaaaaataatgctgggaagtcctaaccacatcaagaatgcctcagatcagtgacccaaggaaccttccagaatggatgaaatagacccaaagctgaattcacctaattttagggccaaaaacccaaaaaacaaaacaagaccaaaaaaatcttcagatactgggagaacaaatctcaattgctcaattgtatcttatgaaaacaatttttcaaaa

SEQ ID NO: 2148 - DNA, 1763 bp, Homo sapiens
actggtatgtgtggggctccagccacttagttggaattcaccatgaactgcatctcgaggatcaagtttaggctccccagtccattgtgacatccagcaaagtggagccgggcgcccccagcatcccgtctgtctgacgctaaatggcgaggctctccaacccacttagctccaagctcaaccttctgcaaaagttcaaccttctgcaccactggggatatcgtgcagctcagagatggggtttcgtcatgttgcccaggctgatgtagaactcctggcctcaagcaatccacctgctttggcctcccaaagtgctgggattacagacgtgagccaccatgccctgctggtttaacgttatattgaagtttctccaactgaagggcatgtactgttgagcatgctcagaagccaaggttcaagccattcttcaactatagatgcttcaactcatctctctttcttcggaatattctctcccttatcaatttcaccaattataccaagtaaccccctgcttattcccctagaacagacagagctgatactagtctgtgccttatgtgatttagaaaaagactcttggaatgcagccccagaccatgatgtacagagcatgagttgggtattgccccattttattctctaattcaggtgcccttgtgcagtgaataacatggcagctgtgagactagtgatgctaaacaggtttaatttttggtgcaaattctaatgaattaataatagctgttttaaaaaaacacacagtgctaagaaagactctgaggctgttttcaggctcagtagataaattgtactgtaagctgggatgatttgccttggttgggagaatggcaccaggtgtgacaagaatttgctatctaaggactagaggcatctcacccgtcctgaagaggtaggaagcctggggtaggcagatgttgaggtagaatgtgggcccagacaagttttataatttatagaacacaactttcaaatgcccttgtaatacaaggcaacaatcctacttttccaggtctctaacaaaaagcatctagctgagctagagtgttttcatgaggcatctgctacacaaaacaatgtcttgcttaataaataacacccgtttctacttggtgtcattttactgtttaatcaaaacttattttcaccactcttaaccacaatctaaagaaggatgcttcaatctcttcctgatttagccttaaacttggtcatgtgtaccattcgactaggattgccagagtcagccaccctcccaacaaaggatgctcagttaaatattgcacagaacacacttatactaaaaattgtttgttgtttatctgaaattcaaatttaatggggcataatgtattttacttggcaatcctacctgtgatggacatatatatttccccccagctttattaaggtataattgacaaataaaagtgtaaatatttatgatataaatggaaatataaacagatgctcctcgacttttgatggggttacatcctgataaacctgtcataagttaaaaatattgtgagttgaaaattcatgtaatacacctaacttactgaatatcctagcttggcctagccaaccttaaatgtgcccagaacacttacatcagcatatttgggctgatgtaacacaaaccctattttatcataaactgtttaatatctcatgtaatttattgaatactgtattgaaaatgaaagataaaatggttgtatgggtactcaaagtac

SEQ ID NO: 2149 - DNA, 2791 bp, Homo sapiens
ggtcatcgtgacaggcatgcctcacaccaagacggactatcaagacctgagccgacctgacttacataaatgacaaacactagtgctttacaaaggtggctggagttctccatcttctaaaatcaacatccaatccccttcagtcagcatcttcagtattcccttgaggactggaaaaccaaagcagctacgtccatctgtaacgcacccgcaccggacaggcacgagatgtcacgtccacctggcaccatccaaagagggtaaattggagaaatcacacctttcaaatgttaatctgacactgtaaacagcagttgagttctcatttacatgggcaaagaaagcactttaaactattttcacaactttcctacggaagaaaaggaaacgattcagacggttaatggctaagttttaaacaaatgctctgcatcactacttggttaagaaataatacaatttttgcccttgtgtccctttttcttcttggattttgttgtcctctgaccaaactgaggggtgggaagtgcagatggtggactagaaaggtcatctgtatagtaggcaaatctctgtggccggggttgagggattggttgtccaagaaaatatccttcttcttccgagtcggaagaggaggaggaggaagaacaccaggaatcatcatcctcgccgtagagtcccagaaaccgattcattcctgggttctgcaggccataatcggaagtggcatgggcgtactgtccgtagagatcagcattctggatgtatgcttggatctcccgggcacttttattctgtataaatttctcatagttatcgggggtgtacagccgcagtctgtccttgggagagtattttctttctgtaacaagattcagggcattgtcggagcgggactttctacttctccggcggcggtggtgatgagacctggatcccctctcttcaaaattgtagacgcgtctccgagtcctttcactcatcggaggctgccggatttcaatgtcatagttcccattgtcaatgacatcatcagaaaacttgacctgctggggtctggattgagacttggaccttctgagcactggcagatgtactggcttctcttcaggcaggattttctctggacacaactctgaacttagactctttaaggactctgcactcctgtgcagcatggaagagttcaaagttcccatattgctcatcttctcacaatcttctgtttccatctcctcaaaattttgcagagaatacaatgatggccttggcttgttttctccatccaccgaagcccctagaagagaggccaaaacaagatgtgcttctcaatcatcctaatattcgacagtacttaaaaatatccagtgctcactggctcgaatatccatctcattgggctgtggctgaaagaggcttttatcaccaaacttgaggaggagctgcgtcatataatcttcatgatcagcccattcttcagggtcttctggagtttcctgctctactctgcctttccaaaattcttcactggcaaaacttgttccttgtctggagagactcagatcatccaattttcgagaaagggtgtcatcagcattgcctgagaggccaggaaacttgtagttcagagcaggcgataagaggagagactgtctacactgatctgctgaccggctgctcttgcccattcggacacttcttcgggagtctcttgatcgagctgactgaaatgcagagtcggaagaatcagaggcatggacgtcttcaccaagactgcacgtttttgagcagtaaatctgaccctgtttgggaaggaagggacatcccaacaaagaggctttacactgggcacaagaaaagcaggcttccgtggcgtgccagtgctgcccgtcataggtcatctgtgcatggtccacacctgttttgaaaaggatagaataaataacaggttatggtttaatgcctgaaacaaggtataaggaagaaacgaagaaaataaataaagattatgggtatgggggagctgtgtgggtgacacagatataattaatcctcattctttgtggattctgtatttgtgagtgtgcctactcataaaaatttattcacaactcccaaactaatattcgcaacagtttcatggtcattcgcagatgtgcagagtggtaaaaatacgaactgaaccaacatgcactgatccaggagatgctcagctttttgtttcagctctcatactgtagacaagtgtcctatttctggtctatctactgccgcgttttctgcatttttgtgctctttgttggtgagtttactgtttaaaatggcccccaagtgtaatgctgataatgctgaaatgctgtcatgttgctaagggcaagaaggctgtgatgtgccttacagagaaaagacatgtattacgtaagctcctaatcttgagtacggtaccactggctgtgagttcaatattaatgcatcaacaatgtacattcaataaggcagtggctttaagcaaaaacacacgtgaaacaaggttatgtattgatgggttgatgaaactgctgtgaccagaggctcacaggaacctaaccctgtattcccccatgagcaatggttcagtgttcactaatccagtgtttgcagtaacgtcacagaacacaactactgcaagtaacaagaatcaactctctgttcatttgtcaaagctcatcagctggaacatttaagatctgtacatttcattgtatgtaaattatatctcaactttaaaaaacagaaaaagaaaaaataa

SEQ ID NO: 2150 - DNA, 1360 bp, Homo sapiens
acaagattgacgtgcactgtggtgtagaaagtttgtttgcctttccataacccagtgtatctaagaattacctcggaacttccatttctattaatattacctactaacacttaagtctgagtgtggtggctcatgcctgtaatcccagcactttgggtaaggctggtctcgaactctcgacctcaggtgatccacctgcctcggcctcccaaagtgttgggattacaggtgtgcgcccccacgcctggcctaaatgtttttaaactctcatcctgatcagtatttaggttatagataattttttaaaactctacttagaatattgtttcagaggagtctgtaaataacaaaactctataattgcagtcatagctgatgtatctatacttggatcttttccaaatgctcttctactcttgtaatttctagtctggtcagctggaaataaaagtatccagtaactccacttgtccatctaaaaatataattatttttttaactaacccattaagtattttttatatgtatttattagccaatcatgttatttactgtgactttcctgtttgtttcttttgctcattttctcaacctgctgatttatgaatacacacacatactctagatcttgattcttctgttattttatatataatatccttttcctggagagtagctgtttaaagtgcattcatgatttttctgatactgatagttttcccacatactatcatattatatttggatgttgccattatcactctaaccataaactggtaatctatttatatttttaatagtatgtgagatttctgtgtattcagtcagattatctatgaatggaaatgaattttcttttaaaatcattattatttctttacttttattaaaataaatacgattatgtcaagtattggggtaatagccagtgtcttagttgtttaaacagtttaatggaaatcagtacaatattttaccattcaactaatatttactttgttgtatgcaagtatgctctataattagggctaacttcttatattttttcaaatcctatcacttcttttgctttgttcatatatcattctcctctgctattttaatgttataattcattctgatttcttgttttaaaccatttctgaaatataatatgcttagctgtggtatattattgttttgataagctgcttaatttatcttatgaatattttgtttgggatttttgtccaaatattcaaaattgatattaatattattagcattcatatattaacattcaaaattaagaattttttaaatttttgttattgccattatttgtttattaaaggttagataaaatttggctttaaaccca

SEQ ID NO: 2151 - DNA, 2825 bp, Homo sapiens
gaacaagaacatcaatctttgaaatgatgccaagtataagcctctgtgtgtgtgtctccccactccaatttgtccaacagactgcttccaaagaaatcttcctaaaacactgaccatcttttttttttttttttttggctgcaaaatctttcatttcctcatcccctcacataacttccaatcttcttggcctggcactaaggacctactacagactggcactgaaatatcttccctaccttatcattccttgtgcttctccacaagcccactcttccccttcatcatacatgtgccgacctttcctgtctcttttactttgcagcaccaaatgctttctactttgtggtctaggaggaacacatgtcacttttgtaagctgctcgaaagcaggggccacaccttcatccttgttttccacacaacaccaagcacttagtagacacccaataaatcattgctgaatgaatgtattcagcctggaattgcactaggattttttggccaacacattgtattcttaactgataccagacttccaatcaaataaaatccttaagcctttttcatagtctttaattaaactacttctcttccattatttccctttgcctacttttgaactgatattcagaacttttctgttaatgtttaattttcatccattattcttgtctgtacagatctttttgatttttgactctcttatctagttttttttttttttttttggcttcccgttgtgttatccacaggcacaatgggtatattgactatcgttcattgaagttgttgatacaaatgttgaacaggagaaaaaccagtagcttgccaacttggcacctcattctctagcttgacagtaatctcttatctagtagtttttagatatggttatttaatcaaatatcactagcttctaattttgttataattcattcatgtatacagacaatgaagaatcatctttcttcattcaacacatttattgggaaccaatcattgtccaaggcaatatgctaggcattgtgtaatagaaagcgattaagcttttacccctgtcctctttggcctgcaaagagcaggtaagattcatgcacagacaaatgtagtaccaggtaaatagtgaggccaaacacaagaggcaggtcaaagggctttggattcagaggatggagaagctctttctaggctggtgaaatatttgcagaatgagtaggctcataagtggaggtgaggtacaggctaagctgctgtaagaaagagtccaaaatgcaaaggatttaccacaatgcagttaatttttctcacaacggtcgaggtaggcaggtggtccaagtccagttaatcagccctcctcaacacaaggcttccccttgtaagctcaggatgaccgctccagttctcatcatctcccaggcagaaaaacgggagaaagagaactagacgtaccacccagtcattttaaggacatagccaggccaggtgcagtgactcacatctgtaatccaagcactttgggaggtcgaggctggaggatagcttgaagccaggagtttgagaccagcttggataagaaagcaagaccttgtctctacaaaaaatttaaaaattaaccatgtgtggtggtgtgcacctatagtcccagctactcaggaggctgaggtggaaggatcacttgagcacaggagttggaggatacagtgagccatgatcacaccacctcactccagcctgggcaacatagtgagaccccatctctttaaaaaacaaaacaaaaaaacatcaccaggaagttgcttacatgtcttctattcctataacatcggcctgagcttagtcacatggccacacccagcagaaagaactctaggaaatatggtcttatgctaggtaaccccaaacccagctaaaactgttgcttttgaagaagggtgaaacagacaatgtggaggagaattaccagtctgccacaaagagaaagaattctatgtgaggaaaacgctctagaagagggagctgattaattagttatatctcagccgagaggatgttatgagaaacacagatttgggtttaatagaaaaacttagaacccttcaagaaggaatgggcggacttgagagtgtcctccgcttctgaaaatgatcaagaaaaatggtaagaatgtacacctcaagggtggatggtaaaggtcagcctttaagcctcaatggcggtgtggttgtaggtggggtgggggtggaggccccgaagacaggcagactaccacagtagccccgatggaagcagtgagaatgaactggaaggagcggctgtgggagcgacaacgtgatgagaataaacccggcttggctctgccctgtgcacacacaggtgagctgtgtgctcccggatgtgtcagctggtatatgcgtctgtcagaaggcagctggggagcactgttagctcagagactaagaggcagacccaggaagcccttctttgcattggtcagggtttgctgcattttcccaagcccaggaaatggaacccagttcttcttctttctgtgtaaaataataagcatcacaataggctgtgctcatgagaacgcattttgtttccacagaaatgttttttctcactctgtcctgattttgatttctgttaaactcagtaaacacattaccaaattttaaaataaggtgacttgttttccccaactcacagttcaccaaaggtatttcatctgtttgttctgaaaatgcagctgctgtctagatttatgtgtgctctgacaagaaatgttttgtgtaacaataaaaatcatttcctttgatgaa

SEQ ID NO: 2152 - DNA, 2079 bp, Homo sapiens
gggatggcagcctaccctgtggcaacgcgggagtcgcgttgccgcagggggcgcattggggtccagccgtccccagaacgcagatcagaggtagtcggacctttcccgctggcgcgcagcctcagctagggcacacagagtgaacagaaaaagaggatacctctgcgatcccgggtcatctccagatgctagggttatggtttattctagtgggcccaacctctgagaccatccttgaacatcagtagactgtgagttgtacatgggcgagagcagcttcgccaacccctgcaaagtgactctgaagaagatgacaatacctgcttcagtcacacccggaagctgactggtccacgcatggccaaagcatgagaaaactcattgcgggactcattttccttaaaatttggacttataccatagggacttcaactgaccttcctcagactgaagactattcccagtatatacgtcaagtcactgaggtaggaaaaaagttgctacagtcctattattttatggttattataagtataccaggactctaaaaagaacttgtttgtataatgctattctatacaaggtatgtagcccaggaaatgaccaacctgatgtgtgttatgacccatctgagcctcccatgaccacagtttttaagattaaggactgaaacctggtgggggctcataaacgatatgagtaaagtgttagccaaaacaaaagaaaaaggggtgcccaaacaagtcaccttgaagtttgatgcctgtgttgtcattaatagtaataagttaggaataggatgtggttctcttaattaggaaaaaggctatatggcaaaaaaaaaaaaaaagtacatttgtcataaattaggactgtatggaaatgaacgtgcatactggtcttgtgtcatttcggctacttggataaaaaatgaaaaggatcccgtccaccttcagaaagggaaaagtggcccttcctgtacaagtggtcagtgtaaccccttagaactagtaataaccaacccccttgatcctcactggaaaaaaggggagcgtgtaaccctaggaattgagggggctggactggatcctcgagtaaatatcatggcttgaggagaagtttataaacgctctcctgagccagtatctcaacccttctacgattaactgaatgtgtcagtaccagaaattccaggaaaaacaagaaatttgtttttacaattagctgagcatgtagcctagtctctcagtttcacttcatgttatgtatgtggaggaactataatgggagatcaatggccatgggaagcctgagaattagtacctacagacccagttcctgatgaatccccagttcaaaagaatcaccctgataacttctgggtcctaaaagcctcaattattagacaatactgtatagcaagagtggggaaggacttcaaccttcctgtgggaagactcaactgccttgagcaaaaactgtataatattactacaaaaacagccacctagtggagttcaaaccacactaagaaaaatccatttagtaaattcccaaagttgcaaaccatgtgaacccacccagagtcccactgggactgggcagcccccactggattatactggatatgtgggcatagagcttacaccaaattaccctaccagtgggcagatagttgtgttattggcactattaaaccatctttcttcctactgcccataaagacaggcaaactcctgggcttccctgtctatgcttcccacaaaaagagaagcatagctataggaaattggaaagataatgaatggccccctgagagaatcatataatattatgggcccgctacttgggcacaagatggctcgcggtgatatgggacccccatttacatgctgaactgaatcatacggttacaagctgtcttagaaataatcactaataagatcggcagagccttgactattctgacccagcaagaaactcagatgagaaatgctgtctatcaaaatagattggctctcgactacttgctagcagctgaaggaggggtctgtgggaaatttaaccttactaattgct

SEQ ID NO: 2153 - DNA, 1071 bp, Homo sapiens
gaagggtgttattttttcagatgttcagcccacaagagcttactggtgaaggaatgggacaagacccatctttatgcaaagccagcgttacagtaatgttccagcatctcataatctatcctggggaattcagctgcctcccagggtgaatacaggtattcctgatgacagtctgcctctatcttacagagcagcttgttgctatataccattgaaaagccttcagagctgagaggtactactaaccaataacctgcttggctcaaagggccagcaccttctctctaaagcccaagaggagtttgaggaaaactaggtgtctgtgttcactccaggctgaagttacaggtctgagcaaataaggtgtataaaaaatggaatctgtcttggaggacatcagaaggtgaattttccaagttcttggacaacctagctgttgaaaagctttctgggtttggggggtatttcagatgtaccttaaagtgttagcagacacagattaagacactgggagccaatgaaacagcagttgagggtttgctgtgtatcacatttctgtattttatcacccccttcctgcaacattatttatctggaatctacctgcccttttgttttttagatacaagggcttggttttgttacccaggctggtttcaaggccatagctttaagagatcctctcaccacagatttccaaagtgctgggattgcaggtgtgattcatggcacccagactttgctgcctttcttacatgatccaggcccagaacccaaactcaggcactgtatagatgaccactttcgtaaactactgacctagcttgttgccaattgttgattgaacttcccataactccacttcgtgtctgttcctctgtatacagccaccttctgttcccgtcatgagcctttaggtctccatttgcatattgcaaatactatgttccatgtaggtagctcattcagggccttgctcttcacttcaaaaaaggttcccttgaggactggctgtcaatttgtgttgctgtgttggttgttgatgaaaataataaaatgattgattacata

SEQ ID NO: 2154 - DNA, 1435 bp, Homo sapiens
ctttttatttagatgatattaaaactcagaagaattaattttgacattttgtatttacagtttatcagttaattttctctgttcaagtagtacagtaggcacagattaacatttaaatttttcacatatggtatatttcagaaatttgaagttaagcaaaaattttaatgagtagagaaagtaagtagccttcaggaaatcttcatagaggaccaggcccttttggaattgtgaataggtttattgccttacatcctggtacacatgtccaaggtcaggtcctgggtggtaaaggtaaatacaaattggaagggcactgtgtgagccaaaatgagtcagattagtcatgattcatttccagtttgggttttgggtggtcttggagaatgttgtaagcactgcttcattgataggttgattgagccagactttactcagcagcctggaaaaggagagatgggctctgggttctacctttgctcactggtaagttgctaagatttcagctttgccctcaaaccctgaagtagtccttcattcacacagtgggatcactcgaaaatgtcagatggggaagtccataggttgttactttaaagaaaatagaaaaaatgctggaaaaggtttcttcaattttaatacccatgaaggcccatgttttagctttcctccgatgggcaaaccatacactaacttgggccttgtaatcaacaagcaaggctaaaagctctctaagtgcttgctgtttaaactattttgtgttggaagaagagttggaaaagaggcagtgtggaggtgagggagaagttccctccctccaatcatttccaataaatggaaatttaaggagaaatttgtgtttatccttaatatctaagataatcactgtgcagtgccattggtacttttcatgagagtagaaacatcaaacttccttggatgggcccaacccaggtgacttaactctggaccaaatgtatgctttttgttttatccactgtggacagctgcatagataattggtctttgttctaaactgcacataaaaacatgggagaaaatgacatttgttgccttttgatgtgccaaagaagagtgggaatgttctaagaattctttttggcttaatctttgttgaattgaaaatatgtataactcttctgctgaaagtgtagcaagtacagtcatgaaattttgtggtcttcctgacatgttcttccagcataacgttgccaccttcagttggaaacgtatccttatctaataattaagccctggagaaaaattaatttatatattttattaattacataaggacattgttattagctaagcagagtaagtaaatcgaaataaaactttaaaaatgcctttatggagagaatgactatctctgaaagcttgtttttaatgatgataaaattcatgatcagaa

SEQ ID NO: 2155 - DNA, 630 bp, Homo sapiens
acagggtgaaaactgaggtttagagagggtaaataacttgcccaaaatctggaaaagtttgccaacccctggtcttactcctcattaaggtttcccttcctctccaccattcccaaatctgagtattccagaagagctactgtttttttaatgatatggtaaattaatttctaaagggattaaaatgaatacctacctgttgtaatgaaaataaatgtataacataaagcaatctgcaaaataactgttttgcaggcctaagacttatgcagaggtggcgcccgcccgtaatcccagcacttcgggaggccgagacgggcggatcgcttgagaccagccaggataacatggcgaaaccacatctctacaacaaatacaaaaattagctgggcgcggtggcacacgactgtggttccagttactcggcaggcggaggtggaaggatcccttgagcctctggaggtggaggttgcagtgagctgtgattgcgccactgcactccagcctgggcgacagagtgagaccctgtcagaaaacaaaacaaaacaaaagaattctgtaagaacttctaacaggtacattcctgtaagcattacccaccactggactaggcactgggtagcctgtaaa

SEQ ID NO: 2156 - DNA, 496 bp, Homo sapiens
gattcacaggccaagacgctgccttggcgcagcactccccgtgttgacgtggaaggtggtgatggcagtgagcaaaaaagtgatccatgcacagatgcatttgtgaacgccggatgaaacaaagttaaaataggacccagcggatgaagtggactgaaacactgaatctgaaacattgatgatcactacagcaaagggaagagctcggtaaattgtgcatatcgttcttagatcttccacccaaaagtaacacttccacttacatgtattggccacgagacaggattgtgccatgttgcccaggctggtctggaactcctggactcaagtgatccacccacctcgaacctcaacttcctaaagtgctgggattacaggcgcgaaccactgtgtctggcctccgggtggttttaagtgggaacttttatttctcacacattcttctgtatattctatattttctacaagaaatatatattacttttctaatcaggaa

SEQ ID NO: 2157 - DNA, 647 bp, Homo sapiens
gtgtggggacttcattttgattttcagtctgatctgttggggtctaggcaggagcttggtcccaaacaacacacccatgtgtgctgaggacacgctccaggggattcttacgcccgcctgcatcagagaacccaggtcttgtgggcgaggcagcgtggagagggagcgcagctctggagacggcccccagggcttgcgggcgggcgggcgaggcagcgtggagagcggagagcgaagctctggagacgacccccagaggagattggccaagtgcggatgtgcgagtcctccctgcccgaggcgcaaactgtctcactccaaagggcgtccggagggttctgcggggcggctgtgcactgacacctgccccccacgtgggagtccgccggctcctggcccttgccggttggtgttgcgcgtctgagatgacgcccctgcggtaggagcggggtttccctgatcaccgcttcttttgaccatcttttctggcagggccttgtatttttaaaatgtgtaaaggttaagctttctgagatcagaaaaataatatttagtgaaccatgtgatttaagtcactgtgtatgtgacatgaaatatttatacctaacccactagcaaatggctcgttaaacatatttgagatttaa

SEQ ID NO: 2158 - DNA, 471 bp, Homo sapiens
ctcttgttgccggggctgcagtgcaatggtgcaatctcggttcactgcgacctccgcctctcggatgagaaaatttaaagaagacgtgtaatttctccaaagtcgcccagctcagaaatgccctggcggagaatgtgaagatgaggccagagggaacattgagaagaaggatctcagagaagaaggaaaattcagcagaacctaggaagtgcaactgctattgcctgggcctttgttcctggaatggactctgagagtgcatgatgcagcttggaggacgtctcctctgggatccctccccactgcccccaccgcttcctggggtgaatgagtcctctgtagccatcaggattcgctgtatcaggagtgttcctctgctgtcacctctgatgactattttcctcaattcagaatccccagcacctgcaaaaggcctggataaagaaggggctgagcaggaacagaggattg

SEQ ID NO: 2159 - DNA, 3222 bp, Homo sapiens
atggaataggccaatgatgcagcaagagaattgaaggttagactacaggcaggacttcctagagatcaggtttattccactggctgtgcactcccattccaggcccactgtttatcccccatcttccctgccctctcagcatctgccttcatacctgtccctgcactttcctaagcctgagatgatgggaaatttcctacttttcccagatcctcccacctccctgccatcataacccccatctcccccactgtgtctggatatcattccctagggtcagagttgggagaggagtggcacaaccagatgcttagggcctctctctgacctttcagagggaggaggttcttgatggggccagattagaggtgcggagaccagctccaggcattggggtgcttgggaggactgttctggggctggagtggggaccattgggcaggagcagccagtgcccaccgggtgctgggaagactgtttgccatgcatctgagctgtgccagggcctgggcctggcccccttctggtgccctccctcccttctctctgggctggagctggagctgctcacagacctggctcccatctctctgacgggcagcccagagacccatatagttggagtcattttggggccaacaccctggaccaccctttcacctctgtctgacagtgggagagtgagggaagagggcctaaggccaatgaggacctaactgctctggaacatggagggcaacctacccttgaccccaaaaatgggagtcactgaccagtgaggccaagagggtagccccgtgcagttctgagagagctctgtctctccagtctcgggcctcagcctcccaattgcagctaggagccctgaggaaactcagacttccccacatccggtaccagcctcagaacccaggggtccagggttctgtggccttctctatcccacacaccactcatctccacttcctcttctcttcctccagagcaggccacacctctccaactctaaccctgagagctcagcagtcatgcggtccgttcccttgacgccacaacatccccctctctgtttcagctccagcgtctgtatctctgcccttgttttgaatttcttgagctgttcaggaaactttcctcttgtcacatcatttctgtctgacccgggatgtccatctccctcacagtcttcatagacccaacccagagagttaagaccaggtctctctctctctctctctctctctctctctctgtgtgtgtgtgtgtgtgtgtgtgtgtaggcatgcacgtgtgtacacacatctaacaacacccaccacctccatgctgaatgcccatcagccggcagccaaggtctgtcccataggaactgagctccagcactcagcagggtcagcagggaggcacaagaagccagagctttggctatagcaggagggaagctctctgctacccccttaacggcttcatgaggagcaacatgagcctacacaatataagcagggccttagggcctgtagaagtaattgcaatcatcatataaatagtcctttttattggaagcaaaactaataatactattagcaatgacaccagccgagcagttgcagatccctctcgtatagaatctgaaatgtggatgatgctgttataaatagcaaagttagccatagcaacataggcactggtaatactgtgggtgggtctaagggtaacactgttccctgatcttactgtcatcatctgcaatctaagtaatgcagataataatggtgccccttggacttgacgccaatctcttggtcctattagaaccatgtaggcagagctattccaataggtgggggaatacctgacaggatatggaaatacctgggagagggaattcccaggcccctggcagtgctaggaaggaatgcaatagtggtaaccgaattccagctaatagttactgatgtctacctgagccagttctcctaaatgcttcctgtggataacctcaactgtgagaaaaagattgtttatgttttgctcattacaccgatgaggaacccgaggttcagagaagtcaactaactaccccaaggtcacagagcaaggagccgagttgggattccagccgaaatgggcactccgaccaccccctagagcggctctgatcggctgtcctgccggactacagtaaggtgtccccagaagggttgctggccgctgctcctggagctgcctgtgcgtgggggcacggaggcaaggactgatccggaacgctaccgccctgcctgggacaaggtcggaaatctcggcggccgcgctgggacaggagcgcgcagcagggaagatgcgaggacccgaggggttgctgatcagactgcgagcagcaggggggctgccactggcagagctggaagcatgtagatcagagatggcagcagcagctgcaggcgctcggggctgtccagcagcctaccccgctgcggtgtcaggagtcgacgagttgggtgccccagagcctcgaggcaagggctgacaggcggggggcgcagaccaggcaggcactcccttctccctgtccccgaccccacggcgggcggcggggctgcggaggcactcacctacccagggctggggttgggtcgcggcactgcgaagtttgtcgcctcctccgggggtctcctccgggtgcacggctcagtcctgcagctgcagctgagactgcggcggagactgcgcgagcgtgaggagaggctggggccgcaggacattcggaagagggcgccggccctcccggcgcagcacaaaaccccctttcttccccccgcccctgccccgccctccccggggccgcccccgccccctggtcgggagcgcggggctctcgggacggtcacgggacccgctgccttctctgcttcggctccggcagcagcggcgagagcaaggacgagcgaagtaggacatcgttcagcggatgagaagccgagggcttggagtagggaggaggggcaggaggggcggggagggagcgttcgcccagcgttcgctgagctaaaggatgacgatgttgcagctggaggggtggaagttggacaactggagagtcttctcgttgttcaaagaagaaggaggagggagtcaattagactgtaagaagtggatgaagggagaatgggggctttgctcctgaaaagagacaccctttctaataaaaaaaatggaaaactc

SEQ ID NO: 2160 - DNA, 549 bp, Homo sapiens
agaacctgcctaaattgttatggtggcacatgtgactgatggatcttttggatttgaatgcctatttctgagagagcagacaccatcttatttctgttgaattgtatttagtaactcaaaaggcatataccaagctgtcagaagcagcttcatttaaaagaaataaaatttctagtcctgcctgaagtttaagctagcccatgactacacaagtgcaactgtatttcccaggtagatgccggtagattgggcccagtaagtttgggccgttgggatgtgaaaggaagagatgcgggcaactttttgggtcatcttcttaaagaaaaagccatttgtcctggatgccctcttttcttttttctctttggctgggaaatgacaagaattaaagcagcagccttggatccagagatggacgccaattgatgaagacagcagaactgactggctagtctgggttccctggagcagagctgtctctccaccctaggttatccacttacttttgtactgttatgtgagagagaaataaacttctatcttctttaa

SEQ ID NO: 2161 - DNA, 3685 bp, Homo sapiens
atagttggctgtatttctgggttctctattctgttccattggtctatgtgtctacttttataccagtaccacgggtacactaaaatctcagacttcaccactatacaattcatccatgtaaccaaaaaccacttttaccccaaaagttactgaaataagtatttttaaagattttaaaaaatagagaggaaagaggaggctatgaaattccataatggagttacagatgcttgacataatttagtggatattggatttagaagcttacatgaatgaggcaaacctgagatctgtgatatttgtaaatgaagataggagtgaacttactgcccttaggagtggagggagggaaggaagggagaaaatgagagatgccataaaatctattacttcaatggatttgaagtaatcctttgaagcaggcagtgagacttacttcataaatccatacctttttaatgtggattggagagaagttgttgcgctgtaatacctctgttgctactgtgagagtcattgccagccactattctcatgtcaagctgcccttgaggaggtttctcttgacccaatttagaaacaacccaaaacaaggtttgtaacttagaggaattctttgattctgtgacaaggggtctgtgaccctcttaaagggatcaagtacacaggagatagtacaagtagtactaaatagccagcttaaaaaattggataggtgagatgagacaggaacagtggacagaatggctctaggcatccccaaacaccacatctgggataaggaaatagtacaatggaaagtctatccttggacctactatttgtcattccccatggcatgatggaatatctaaaataaaaagagttgctttggagaaggattgcaaaatattatttcatagaagagatttagaagaggggaaactcccaattacataaggtgggcattatagcttctcaaaacattggttccctatatgggtcatgaagattgatcccagtatcagcctatggcttactaggccagtttaactgaaagatttaatgagcttggaaggatgctgccacctgcactctcactttggcgggtgtttatcaccagtgagtgcggtccctaaaggagcaaaaggacaataagcacccagtggacaacagtgtggcattttgagtgaagatagcaactgaaaaggtcatcggcttggctagattgggctgggcttgttttttaaaaataaaaaaaaagttttccttcatgataaaagtaacaggtgatcattgttaaaaaataaagtatgaattaaaaagtaaataatatgtataattttataagccagaaaactaatttgtaatattcaggtgtatgtcctttcattctttttaaaaattatgtatataacacagttttataacaaaattgacatcatattgtatatatcattttattatctaattttttcatttgaaaattcacaagcatatttccatgttattgttctttgaaaaatacaatattaagtgctccataatatcttatggatttaacaaagtttatttagatgatgtcatgttattggacattttgattattaccaagtttgcgtataaaatttaaatgtaatgaacatcattgtacattaacctttatgcacatctggaattatttctttagaataaggttccagaattaaaattatttagtttggatgatgagagcatttattagagcatctgacaggtgatgctgaattttcctcaatacagttgtgcaaattgcattcccaccagtagtgtataaatgtgaatatccctccatatattcatcaaaacatggcctttctaattttgtaaatctctgctaatttaataggtaaaaatatacctttgttgctttaaaatttttatttctaatttacacacagtaaaattcactctttttagtatatggttctatgggttttgacaaatgcacagtcatgtatcttctacactagtaccatacagagaagttctgtcactttaataatttctcttggtggctctttttgtattcaaccccttaccccatactcaatctctggaaaccatcaatttattcttcatccctatggttttgccttttccagaaggtcatataagtggaatcaagcaatatgtagcccttttggtctggcttctttcacttagtaaaacgcagtcaagattctcccatgttttgtggataattatttcattcctttttatcactgagtagtacttcattgtgtggatgtaccacagttttattatccattcactaactgatgaacttgtaagatgtttctagttttggtgaatatgaacaaatttgctataaactttcaggtataagttttgtgtgataaatgctcatttttatagggtaaatgctttggagtgggaatgagtgccagactgttttctaaagtttccctagcattttgcattccaattacaaatatgtgagagttccagtagctttgtatctttaccagtatttagtaattttgtattatacatatatatgtatgtaaatatatatatatattcatttaaattttaatcattgttagaatttgtaattccccaatgatatatggtattatcttttatttgtttataattgacacataattatttatgggatacattgtgatgtttcagtacatgtgtacattgtataatgatcaaatcaggatatcacctcaaaccttatgatgatcttacagttaaagatgatatattcttgcaaagtgtctgttcagatcttttgctcccctttttattggattattccttttcttactgtttttatatgttttttaatatattgatacaaatcctttgtcagatacattatttggaaatagattttcctagtctgtgacttgtcttttcattctttgaacactgacttttttagagcaaaaattttaattttgatacaattcactttatcaatttttttacttttgatgtgcaatgtaagaacacttgtctaacccaatgtcatgaagattatatattattttcatccaggaattttatagttttaagttttacatttatatctatgatactttttgaataaaggtttgtataaagtttagctatgggtcaaggttcagtttttaaaatatggctatctaattgttctagtaccatttgttgaaaagattgtttcttttttattgcattgcttttgcacttctgtcaaaaaatcaattgattatatttgtttgggtctaattctgggctgcctattctgttccattgttatccattcacaaataccacactttcctaatcataggaagtcttaaaattagatagtgtgtacaacttcgtccgtctcaaaaatcgtgttgattactactttgcttttccagaaattttagaattgttgctttctataaaaaattctgctagtatatctgttgagttagaactatagatgaatttgaagaaaatttacatcctcacaatattttgtctttaggccacaaacatgatatagctgtatatttattttggtcttgcttttttttccactttcagcatacagatcctggacatattttatatttataccaaatattttatatattttctactgttgtcaatggtagtggtttttaaattttcaaacattcattactagtatatagaa

SEQ ID NO: 2162 - DNA, 832 bp, Homo sapiens
ctcaactgcaccagaaggcctgacagttaagagaacccagtgaagaaaccttttgcagagagagaaaagaacccttttgaatgtgatcaatcacgctgatttatttggatgatttctcttctggatttccttaaaccagggaaaacccagagacagaggtcttgctatgttgcccaggctggtctcaagctcctggcctcaagcgattctccttcctcagcctccaaaagtgctgggattacaggtgcaacagtgacccgtgacgcagtagggagggctgttttccatgcccagtgaggcctgctcagctcccattaggcctttatggatggcctgcctcccagctggtacctggtcccgtcacagtcccaggactctagacctcgaggcagccaggtgggtgctacagatggtgacctctcggtggcacagcctggcgctgcagcagaatgcagggttgggggcggggtgaagaatggagtctggattgtgccaaaacaggagtttctatgtctggtcctgccaccgactgcacctgcattgctgcgtgaccttgacagctactccttccacacctgaacgtcctcatctggaaactggacttgcctcctagggttcctgcaaatataaaatgagctaatgcctttgaggtgtttgctattgtcctggcacttggcaaacacatgataaatattagcaatcacttgcgagggggtgtggggttcgggggagctttgcccctcctccccctctccagggctgagcagcagtgaagagctttctgcataagagagagcaagagagataaataaacccacatcttcctctgaaa

SEQ ID NO: 2163 - DNA, 637 bp, Homo sapiens
aaggctatactttcagggatcatttctatagtgtgttactagagaagtttctttgaacgtgtagagcaccgaaaaccccgaggaagagaggtagcgttttctcctgagcgtgaagccggctttctggcgttgcttggctgcaactgccgtcagccattgatgatcgttcttctctccgtattggggagtgagagggagagaacgcggtctgagtggtttttccttcttgatggctcaatgacagagactagctcgtaaactccgggccgtttccgggctgttcgctcctgcttggcaatgtcgcgagaaaggttttcgcctcctgtttcagcggtgacggctcttgggttttctcggggtggctttttaattttagtcttggcgcgaggcgggggatgctgtgtggcacctcctattgtctctttttgcgttttctcccattctcgctccctcttttgtcgccgtttcccgcccgccactcccacccccagacggggtctccgggtctcttgttctgtctgccggccccggctggagtgcagtggcgcgatctcggctcctagcaacaactgcctcccgggctcaagcgagtctcccgcctaagccctcccgagtagccggggcttaaaggcgcaca

SEQ ID NO: 2164 - DNA, 587 bp, Homo sapiens
aatctgctgagctggtggccacctaaatacaatcgtcctgttcccctcattggtctctccggtctcctgattccagccacattttggtgagccagccaggagtgaagacgacaggtttgctgtctcctttgcctgtgggtctggggccccagcctgggggagacccgtgactccaggcatgctatcaggacaacttcaacccgaggggagatcagctctcccgcaacctggtgccgctctctgacagcacaacagaacctaaggggctacaggatgattcaaggaacagtgtgctacaggacctcgcaagaagaccctcaccagatgcagcccctctatgttggacttcccagcctccggaagttagaaatgtgctacaaccactcaaggtctgcaaacagattcctatttagatgttgttgagaggtaagtacaactagttctcattaatatttcatgtcctatgtgccatacttacactgccattttgtagtcatttgtcctacagctaaagattaatttataatcagatacgtgaaatctgatatgtgcattaagcttgattatacctgactgtgtcttcacga

SEQ ID NO: 2165 - DNA, 1976 bp, Homo sapiens
cacagttcatggtaaagcccaagactgtacctgcccatccactgccttttccatgtatcctggaactgagcatagacctcttcccaggcagagctgacagcaagtaaaggagatcataatcaggggaccaaacaactttgtctaaagtgtgaatgtcacctaaggagaagctgtgagatcagaagggtggggcagaggagcagacaccatgagggagagtccttgggggtacatctgccagactgacactgtctggcctgggcagtggaggggctagcaggaaccacaggtactggtggtgtggctactaccgttacaactgcctgtgcttggacatggaccctctgcaatatgcggcagtttcattcattgccccctacattctacaccaagtagaaatggaaggcaattggatacttcacagacaagatctaagtggagaaggaatgcgtcctgtggctgcagagatccttggagcttggaggggagagcttgagccccactgatgatgacctcccacagctcgccaactcagccctccctaagtccccatcgggggccaattctcactctggggttggggggactccaccatagctcatccatcatagggatgttggtatctactgtgggttgggtagggccgatgtgctgaggatggctcccccacaagcaagagatgtggatttggggagcttcccatcttgtgttgaaggaacataactcagaataataagagccaactataacaaacccacagccaacatcatactgaatgggcaaaagctgcaggcattccccttgaaaagtggcacaggataaggaagccctttctcaccactcctattcaatatagtgttgaaagtcctgatcacagcagtcaggcaacagaaataataaagggcatccaaataggaagagaggaagtcaaactatccttgtttgcagacagtatgattctatatctagaaaaccccatagcctcagcccaaaaggtccttcatctgataatttcagcaaagtttcaggagacaaaatcagtgtacaaaaatcactaacattcctatacacagtcgccaagccaagagccaaatcaggagcacaatcccattcataattgccacaaaaaagaataaaatacccaggaatgcagctaaccaaggaagtaaaggatctctacaatgagaatcacaaacgctgctcaaagaaatcagagatgacacaaacaaatggaaaaactttccatgctcatggctaggaagaatcaatatcattaaagtggccatactacccaaagcaatttatagattcaatgctattcctatcaaactatcaattacatttttcacagaactagaaaaaacttaaaattcatatggaaccaaaaagcctgagtagtcaaggcaatcctaaacaaaaagaacaaaggtggaggcatcacattacctaacttcaaactacagggctaccatgaccaaaacagcatggtactggtacaaaagcagacacacagaccagtgggacagaatagagagcccaaaaataaggccacaaacctacagccatctgatcttcaacaaagttgacaaaaacaagcaatggggaaaggtctccctattcaataaatggtgctgggataactggctggccatatgcagaagatcgtaactggaccccttttactatgtacaaaaattaagatggtttaaagagttaaaacccaaaattataaaaatcctgaagataacttaggcaataccattctggacataggaactggcaaatatttcatgatgaagacaccaaaagcaattgtaacaaaagcaaaaatggacaaattggatttaagagctttttcatagcaaaataaacaacagggcagacaatctaccaaatgacagaaaatttttgcaaactatgcatctgacaaggggctaatatctagcatctataaggaatttaaacacagttacagg

SEQ ID NO: 2166 - DNA, 433 bp, Homo sapiens
caaagcagacgctctgcccatctgtcactaggagccgccgctggcctccaactacccttccctaaaacctcagcttggagtaaacaccagatgtcaagaacacaaagcctctgatgcttgaggcagcacggcctctggaaggagatggggctggatgccctctgcctctttcgagacaccaaaggattcttgcagggttggaactgcagttttcagcctacagctttgctctgatgtttacacacactgaaagtgtgaaacatacggcaagagagagaaagaacgtgggggaagaggtcactgcagcttctctacaaagcactgactcaagtgattcagagtaaaactagtaccttggaaccaaataattaaaagccttccaaaaacaaagaccctgattaaacctgataagtaaagtttggtcatgaaaatc

SEQ ID NO: 2167 - DNA, 1871 bp, Homo sapiens
ctagcctggtggggcagacgatgcagcatgagcccagcgggcagcccagagctcaacccaccagggtgatcatggactccgtgatcacccccatctccacaccccgtcctggcctctgggggacctggcagggcaggctcgggcctggcgttcccaagcggggtgtgggtggcaatagttaccggatgaggtccaacagggcatcggctgagctcatgatgggcttcccactctgctccgtggtctccttctgggccgcgctgcctgggtggatgatggagaccatgaagatgcccacgatgacagccatgaaggtggtccacaggtagtacgccacggtgaggacgcccaggcggctagaggtcttggcatccagggaggcaagtccggacatcaagctgggagggcgagggggtcaggggctgtggtggggaggccagggcctggctggcactcagcgctcactcagcccctcctggccatgtccagctgcctcacagtgctccagggaaccccattcttccaacaatccagtcctgtgctccttccagcctctctttctgctctgccctctcccccacgccccggggcgcaggccacacacatctgtgccttgagacctctgcactgctaggcagagagcccaggccagggtggctgtgggatggtggggacactgttgggggagtgagagattaattaaggaaatgcgtgtgctttactttgttgcctcaagtttcccatgcttggtgtcctctcagaagcttccttcactctcctgacccctgcccagccaggcaggaccaagcttggtctacctctgagatctacctgcctctcccccagagtgaggagcccattctaggacccccacagcccctggctgctccatcaggacgctgcctgtctgtttgtgagaggagggatgagtctgacttccctgtgggtcccgagaggacggcaccgcaggcggttcctgcgggctcctggacgagctaatgaggagtgagtgagagcgctgggctgggggctggtgacccaggtcctagtcccagctctgccaactggctgtgtggcctcaggcaagcaagtcacttccccatctttgggcctcaggatctccatctgtaaaatggggacatcttgggtttgtgcctgggcccaggctccttgtcacagggggctgtgttgagagggctgtgggtctctctcctctcggctcctccccacccctagccaccctggcctgggctttctgcctaccagtgcaggtcagccccagagtactggcgtcctggagccctggagccctggagccctagagcaacgcttcttgcagccattgtggggggtgtgggacggtggggggtgtggggtgaagtgagattaattaaggaaatgcttgtgctttgctttgttgacaaaaggatttttccccaaagccctttcattctttcagataaagaagtatttgtctggttttaatcatgtaaacaagagcagataatccccagccacgctcctcttatcattagattccatgcagcagcatccagccccaggctgagcgtgaacaccggccccctcccccagcgggagccaccgcctgtgagggccctgccctgcctgctcgctggcgcaatggcttactcttctgattgagcccgtcttcttgtgtgatggagatgacacctcctggaggacccagcagcctcagaagccatcatctctctgggactttactgttccccagacacctgaacacccagcccagtggatccttaaccttctgagtgaagcactgtggagttccactgcgagccacatttgtaatttagaattttctagtggtcacattaaaaagtaaaaag

SEQ ID NO: 2168 - DNA, 657 bp, Homo sapiens
aaaacttactgtggaaaatgtatttacatactcaagttgtttgaaacataactcactgttttccaataactgaagtatccacttttacatgtattaaaattaaataaaattagaaattcagttctgcagttgcactagccacattttaagtgtttaatagccacacgtggttagtggcatctatattggacagggcagatctagagagaatcctgtatctaacaattttaatttttttccctttatgctgttattccttacctagagaaacaatttccctccaaagttcctttgaggggtctgtttaggccaggccaacacaagtgacctatgtggattttagcatcctttttttgaaatttgaggttttatgaagcttgagtttttctggatatttttagtaatttgctggtgtgtacttagctcaaatacttgattgcaactgtgttgggtcaactatttctaatgggacttttccatttgcatgtacagtcactggaaactgctgggcagagaaactctaaaaggtagttggggcacactttttccacctgtcagattggtgaagaattggtgaggctgtggggaaaatggcattctcccacttttgatggatatgtatccaaataaaagtcattcccatgctttctttcatcc

SEQ ID NO: 2169 - DNA, 976 bp, Homo sapiens
attgggaggcgccgaaggtggagaggtcggctcggaaggaaaagatcactcactcttgggggcatccagcagccatgttgtgaggacactcaagcagctgtgaagaggtgcacctggagaggaactgaggcctcccaccaaaaccaagcactgacatgccactcatggagcaacttccagtcctgcaagctccattcatgcaatcacaggaatatataaaacatgagcagaaagaggcctttggagaaatctggaccagcattctcattttacggatgagggaccacggcccatggaggtttccatagatgattggaaaaacccaagagttggtcctctgttccagaccccacacagacacaaacctacaagccaagggagccagtatttggccattcgtccatccatctgcatgtcccagggatgcacgaacagggaacacttcagcctttcggctgccttcaaagaagcaatgagagagagagagagggttactttgatgagtgagcagataccaggtactgttttggggaaactgcttttctctgagtctatattggtctgcacaaataaactaaaatgctttttaagttgttttatgatctatatagaagagatattgacaaacttctcctgcttagaaaataaaagggacacttggaattaacaaagggggttggtagatttaccattgaggttgatgaacttaatatatcatctggtaaaacaagcgtcaggaaatatccatcattcaaatgttttggctgacagcaaaatgctcaaggactaatcccacagctgaaatgtaggggaaaatttcccctacatttggctccttctggctcctacttggtctacacttttggaaggactgctgagattgtatccttggagtcagggcgagagtgccccctccttttccccacttggaaaccagagtttgtggaaagtgaagaagtgatgtgctggagccaga

SEQ ID NO: 2170 - DNA, 1542 bp, Homo sapiens
tctattattgatttcttatttaattttggtatagccagagaacaccatttatgtggatgatctcggctcaccacaacctctgcctcctgggttcaagcggttctcctgcctcagcctcccgagtagctgggattacaggcatgtgccaccatgcacggctagttttgtatttttagtggagatggggtttcaccatgttggtcaggctggtcttgaactcccgacctgaggtgatccactgcctcagcctcctaaagtgctgggattacaagtgtgagccaccacgcccggccttgtgtggttttaatttattaaaaattgttaaagtttactttatgacccagaatatgatctatctgggtatatgttctgtgggcacttggaaagaatatgtattctgttgctcttgagtagagtgttttataaatgtccgttatattaaaccagttgataatgttatccaggttttatatatcctttttgatttccatctatttgtttatcagttattgagaacagagttattgaagtctcccagttatgactgtggatttttccatgtctcttttagttctatcaatttttgcttcatttattttggatctttgttagttgcatactatatttcagtgtttatcttcttggtgaattgacccttttatcattatgtaacttccctatatttatatctttatatttaaaatagatttccttaaaccataagacatttgagaagtaaaaataaaataaaatagctttcttgctgatagcatatagtcgggtcttgtttttttctttttccaatccgataatctttgtcttttttttttttttggaaatggaatcttgctctaccacctggactggaatgcaatgacgtgatctcagctcactgcagcctccacctcccaggttcaagcaattctcctgcctcagcctcccgagtagctgggattataggcacccgccacgatgcccagctaatttttgtattgttagtagagacggggtttcaccatgttggttaggctgggggagttttctattatttatttcttgtttaattttggtatagccagagaacatgctttatgtggttttattaaaaattgttagtttattttatgacccagaatatgatctatctgggtatatgttctgtgggcacttggaaagaatatgtattctgttgttcttgggtagagtgttttttgtaaatgtccattatattaaaccagttgataacgttatccaggtttgatatatcctttttgatttccatctatttgtttatcagtcattgagaatggacttattgagtctcccagttatgactgtggatttttccatatctcttttagttctatcaatttttgcttcatttattttggatctttgttagttgcatattatatttcagtgtttatcttcttggtgaattgacccttttatcattatgtaatttccctatatttatatctttatatttaaaataggtttccttaacatttgagaagtaaaaataaaataaaatgtaatagc

SEQ ID NO: 2171 - DNA, 502 bp, Homo sapiens
accggaagtcccgcctctgccgtgggcctgcgagaatcgaggcactcgctggcgtacccatgtatcgaaatgagttcacggcctggtaccggcggatgtcggtggtctacgggatcggcacctggtctgtgttgggctcactgctttactatagccggacaatggcgaagtcgtcagaccaaaaggatggctcagcaagtgaagtacccagtgaactctctgaacgcccaaaaggattttatgtggaaacagttgtcacatataaagaagattttgttccaaatacagaaaagatcctcaactattggaaatcatggactggtggccctggtacagaaccatgactggctgctgaattctgaaaaccaggacttggttcaacatttaaatttgatagttgccctgattcccattttgggtttgtgaaaagtgtatgtatttaaatttgctgtaaaacataatcactaataatatgcaataaatattttcttgaaggaaacta

SEQ ID NO: 2172 - DNA, 2450 bp, Homo sapiens
caaaacaatttttttaagagcaaagttggaggatttatagaacctgattccaaaactgtcagtaaaactacaataattacaaagtatcagccaggtgccgtggctcacatctgtaataccagctctctgggaggctgaggcgggtggatcacttgaagtcgggagtttaagaccagcctggccaacttggtgaaaccttgtctctactagaaatacaaaaaattagccaggcatgatggcacacacctgtaatctcagttactcaggaggctgaagcagaatagcttgaacccaagagagtccagctcaaaaacaacaacaagaacaaaagtatcacattggcataagaatagacatgtaaatcaaataacaaaatagagaattcaggtataaatcttcatatttatggctgattgactttgaacaaaggtgacgaggcaagtcagtatagcagcatattcttttcaacaaatggtgctggcagaagaaaaaaaaagtacttggatccttacctcacaccatgcacaaaaattagctcaacgtggactatatcagggtttctcaacatcagcagtgttggcgtttgctggggtggataattctttcctgtggagagctgtcctgtgcactgtagaatgtttagctgcatcctggcctctgcctattagatgccagtggcatccctcccctgacacacacctagttttgacaatctctgtctccagatattcccaaatgtgccctggagagcaaaactgtttccagttgagaaccattgacctaatgtaaaaaataaaatgtacagaagaaagcatagcaggaaatcattctgacctcaggttaggcaaagctttcttagatatgacactaaaggcataattcattaaaaaaataagttgggctttgtcaaaattttaagttttgctcttctgaagaaaccattaaaaaaaaatgaaaagacaagccacagactatgaaaaaatacttgcaaatcatatatctgataaaggacttgtacccagaccatgtaaagaactcataactcattaataaaaggataaagaaaaagctgaagacaattcatgcaagaagatatacaaatattaagcacattaaaatgctcaatattattagtcactagggaaatacaaattaaaggcccaatgaaatacctattacacacccattagaatgactgtaaacaacaagactgataattccaacatctgaccaagatatggagaaactagaactctcctacattgctggcatgagtgcaaaatgatacagccactttgaaacaccatttggcagttgcttaaaaaattgaacattcaactaccatatgacccagcaatttcactctcaggtatataaccaaaatacatgaaaacatggatctgcacaaggtcttgtatacaaatgttcatagcaacattattcataataaccaaaaattagcccatcaactgaaaagtagataaacaaaatgtatatccacaccatggaacgctactcagcaaacttctaaaaagcaacaaactactaaacacgtgcaacaacatgaatgagcctcagaaacataagtgaaagaggtcagacacaaaagactacaaattgtaagattccatttagataccatttctacaaaccgcaaaactgtagaggcacgaaacagattcatggtctgctgcagctggggatgggagtgggaacagagagcaaacattttgggatgatggaaacattctaaaactggattgtgattttggttacacaactgtatacatttactaaaatcaatgaacagaacacttttaatgggtaagccttaaggcatgtgaattatacaccaataaagctattttttttaaaaaaaagagagagagagaacgagagctacatggcagccccagggcaatagctctcagatctcccttagagaaagaactttctcttccacagcaatgagtgcaggtagctaacactgaccaacctgcatctggtagttcatttaaggtcggccttggctttcaagttaaggccatggtctttctctgcagtccccagccaatacgtgggcacagaaaggcacagggcatggctgattcagcccaacatgaggctccacaccctagaactccctgtggagttggccgatactgcctgtgacctgcaatgtggtctaagctgtcagacctccacagtggccagaaggttttccatacctgagcctgcttctacccacttttatttttcccaggagtcacgcttagtcatctcttgctctttgaactccatgtctgtatcagctacccagaggacccatcagacagaaagtaatatgcagataacagcccaggggaatctgggcagcactgtgaaaccaacatttcttcagtgaaacctagaacaaaagtggaataaataaaaactaactgtctcatttc

SEQ ID NO: 2173 - DNA, 2038 bp, Homo sapiens
gcgcagccccagcccatcccgtgcggaccctacgccgagtccagcccggggctgctgggccagcgggagcgggaaccggacggcgctcgcgttctgccagagcggagaacgactcggggacggtgcggaggaccaggggaggagatccgcgcccgcacgcaccatcagccgagaggacggcccgcatcgcgccagtgacctaggagcgactcggggacggcttcgggctcccaggccctcctgggccaccgggcactgaggagagcggcggctggaaactgtgggacccgaagggcgggagcccagggcccgcccccgccggagcgcccccgccatggccacgcccccgccacggggatgggcagggcaagcaccggaagtgcgtcacgcgggagcgtctgcgtcgcctaccctgcgtggcgcagctaggttccgagcggcttagcctccgggcgcctgcgcagtggcggtcctagagacgcactcggttgccatagagacgggggcttgggagcgacgtcgcgctcgctggcactggcggcacttgccgcgccgcagccacctctttccgactccaccagtgcgggccctatccggggttttgagtcacgcagacctggacacagcgagaaacggcagtccgggcccgtcctcccgccccgggttctgcaccccagagttggacgcttgcttctcgctttctcctgagagaagtctccgcgtttctgaacaatgcactgctagtttctcatttctttctttctttctttttttttttttggagacggagcctcgccctgtcgcccaggctggagtgcaatggcgcgatctcggctcattgcaacctccgcctccagggcttaaactattctcttgcttcagcctcccgagcagctgggactacaggcatgcgctaccacgcacagctaatttttgcatttttagtcaagacggggtttcaccattttggccaggctgatttcgaactcctgacctcgtgatctgccctcctagggctcccaacgtgctgggattataggcgtgagccaccgcgcccggcctctcatttcttaattgtagacattgcgtacttccggagaaggtccctgagaacctggctgatcttccccgctgcacccctcacgtggtcctgttagctcccaaactgtcaacctgaaaggaaacccagaggcaggctctccaggacaagtgagttaatctgggaatcgcagggggttgcagcctaggctgttcgtgccatgacagatcataggcctatctgagagggccgggcgaaggggaaaatacagatgagctcacaaaagttgttttgtaacaaaaaccactggctgtgggcgcttgctgcaggagtgggcgttagcttgttgttggagagagccttaccaggccgacgtccttgtgcaagctgcttatctagaatactgcagtcctgaggaatttccctgcagtaagtccggttacaggcaaacgtgcaggacgtgcaggagcgtcttgtgaggaggcctgctgcaggtattcctgcatgagagctcccccttcgtggcctcccgactccatttgtttagggattggtggaagtagttccattttggtacctgcaactttcacagctgtcgtgatgaaatcaggcttagctcttcatgattgagtacctgctgttcactgctacagtataaaaccatgccacaattcctgtacaatctttttttttcttttgagttaataattacctaatattttcacatatctagctttttactaacccatggccagcctttttttcaagtaccccaacgttttcgccacatgcctaacgataccgttttccaaaggctcaaacacatccgttgtgtctaactgattctcctgttccgacctagaccgatcacttcctgacccggctgcacagctcttatctcgagcttttctctgctctcatccttgagactcactttgtctgtctcctttcttggattccctgtgtaaacgaaaaataaaatcctaagctctctaccaa

SEQ ID NO: 2174 - DNA, 519 bp, Homo sapiens
ctgtactggctataaggaatgctgggcaggcctcgctgccacaccacctcctgagagaagagacagggtcttactatgttgtccaggctggtttcaaactcctggaatcaagcgatcttcctgccttggcctccagaaatgctgggactgcgcctggaatagatacgggtaaagaaccttttacatcagactcttgtgtcctactcccagaatgctgattcagtagcctgcaagtgaggcctagaaatctgcattttcacaagctctcaggtttaatacacaatacatttaaagaaagcacagcccaaagggtgtcagtggggtgtatgaaggaagcctggttagtggggagagtgggattagggaacagctgcttaacctggcttgtttcaagtccccctttctccctttttgccctcaaaaagttcccctcattttttcccctctactttctaatttctcaccatgcactcacacagctatacagctgtctccagagattactctggaaactctgct

SEQ ID NO: 2175 - DNA, 476 bp, Homo sapiens
aataaatggatcaatcagtttaaaaacttagaacagtgcgtggcaaatagtgctcaagaagagtaggcttgtgaaacattcacatgcattgttttaacaaacaatgcttccccagacctccccacagagttgacgctctggaaagaaaagccaggcttttctctgaggttttgcatctccttggccaatgtgctcatgccagagaagagcagtgcatggccagtttgaggagcacggccatgtgaccttggacagcccctgcctctctctaggactcactcccggtccctaacctcagctctctgatctgtaccacaaggagctgccactaacacctgtgtcagaactactgtaaggaccctttcctcctgcgagaggagaacagtgctaaacctgtctgaacgtgatagacatgctacaaactgccaaccctttaggctataaactgctcacacatgggccaagtgtcactctca

SEQ ID NO: 2176 - DNA, 881 bp, Homo sapiens
tgcgtcctggtgaggacactgcgtttctttcagactttgaagatctgtcgttttagaaaagtggctgcctctgtcaccagccccatggttactgtcctgtagtgtgactgtcaggaggtgtttctcagtccttcgttgtaagaatgtagatgccggttgcaccttctgttgtcttggaagagactgcagtgcttggctggaaaataagctgctcgggactcctctgagaagccaaagtgaagctcagagatggaaaatttgggcagttgtctggacattaggagttgagtcacctcctacccatgaggaacaagcctgtggggggactgatattatcacttctgtcatcaagaaataaggccgcaggcatccctgaatatagagcatttattaatcgaactgtgaaaatgaaacacagacagtgatgacagctggaagttggccaatgtcctgttgtcatattgccctcagcctagggactggcctgtggctcactgaccctgtctcccactctccacctctcatcagcacctggacctggtgcacctggtctacctcatgtccagtgttttccgcagtacctgactggtatccccacccttggttgttgtgtggtgagctcgtccctatgttggcaagttacttaattcctaggtgtcccgccttcctcactgtaaaatgagaatagtcatagcacgaatgtcatgaatccttgtgaagattttatgattagcacacgagttacaaggagacacgataactgttacgtacgtactcattcgttcggaaatacaacagacagcttagtatctccacccgggtccctctgccctgtgggaatccataaagaattgattctcatcccccagaagtgagatccc

SEQ ID NO: 2177 - DNA, 652 bp, Homo sapiens
gaaagcttctgtttgtatgtataaggcaatgtgcatgccagcatgtcagttacagcaggagagagggaacaagccatgtgggaactgatggagccatgtcacatccagtgtcctctgcagccgctatggagtgccaggaggaatgaggggcaaatggtaagatctttatgacgtgagagaagccaggtgcggagcagggaacagtcaggtttaattggtgtgaagaacaggatcactgaaaaatattttctcatagataaaactctttttgtataaaagtctacagaattgcgataggaaacccataatcatggtttcaagtgggcagagaactaggctctggcgtcaggggaggaaggggaactgttcactgtcaacaccttttaggacgtttccattgggatcgaagggtggctcactctgccactttgacataagaatcacttctacctaaggcacttgaaaaatggcacaggcaagagcatcatcggatctctccttttcttcctgaagacaggagataaaaacgctcaggtgaaagatgccttccctgtaccgggcgaagaaagattcctctacagggaagcacgtcatagccaacagaattctgtacagacattaaagtaattaaagtaattcctgtcgttcttaa

SEQ ID NO: 2178 - DNA, 141 bp, Homo sapiens
atggctcttcctcagggtctattgacattcagggatgtggccatagaattctctcaggaggagtggaaatgcctggaccctgctcagaggactctatacagagacgtgatgctggagaattataggaacctggtctccctg

SEQ ID NO: 2179 - DNA, 2432 bp, Homo sapiens
aacgagcagcagagccgcccagcagcaaccacattaggaaggaatcggaaaccaacgctccgctggctgtcaccccttacccacttgctgtcagaccacagcctgaggcagccaaacccatttccttggggatccagcgcaaaccagagagtgtggacaggccgatggaagaatgttggaccagctttaagaatgggctgttctaagtcatgaatattgtaggaagcagctctaaggaccacagggctggagggtgcacaggaaggggccagtgcatacaggtgtccaaacagtgtcatccggtgtcctgacatgcggccccaatggactgatccagggtggaaaggaagagtgagaagaaatcagacagaagaattcaggagatgtggcaacagagtggatgtagcagaagggacatagagagtgcctaaagatgagtctttggtcagcatgtgatgaaaagaatgaagacactggggaagtggggagcagaagcggatgtgggcccaggaggaagaagattccagagagcagagatggcaaaaagatgcatggaagagagacacagcagggtcgggttctggcctcaggagccaagggggaagtgcctgaggagacccccaaatgaggcctgtgtcaatgaggtctttaggggactggtttccatgtatgccaggccatactccctggattcccagcattgagaagaccaaacacttctacacatttattactgaagccccctgcaagctgaaggcggaggaagtggccaatctcctaagccgtgtgtggctgaggcagttgtcagagctgtgatgagggaaatgctcattattcttctatccctcacttggccaaataaagaacttcttagaattcttcccctgtgacaaaacggggctgtgatttggaaagcctcaggcaagtttgctagggccgcggtaaccaagcaccacagactgggtggcttcaaaactggacggcttcaacagaaagttattgttgctcagttctggaagccagaagtccaaaatcaaggtacttgcagggtcagttcgatctgagggctgcgagggaaggatctgttgtagacctctctcctaggtttgcaggcattggtcctgatgttcacagggcatccttcctgtgccttcacatcatcttctctctgaatgtatctctgggtccaaatttccctattttaaaataaggaaatcagtcctattgggttagcaccccgcccctcactttaacttgattacctctgtaaagaccctacctccaaataagatcacattctgcgtactgagggctaggacctcaacatctgaattcagggtgggtggatgcacaattcattccataacattaagaaggaagggataagtgcccaaggaatcacatgctcgcttggggagagttccaagcgtgcagagctggtggtcatagcctagcctcaggccttcggaaatcccctgaatctggttttcccagttctcataatctcatttcaccaaaatacggcatctcaatacattccatgcatttctggtgacaagctcattctggtgcacgctaagcaatgtgctaactacgtcttaactagggtggtttaactggtttggttaacatagatctctgagtcatttcacgcattccttaagcctaaacaaatctcatccaggtgtttaagacattgcacaatattagaccatctgaagctccatctccttggggcaatgatgatgatggtgatgaaagtggctggtgactgttctcagtctcatcgccataatggaaccctacgttgtgttcctccacactggtgtgagggacactactaagtgcggcagagtttgcactcaggatagagaaatatggactcacgcacagattccagctgagtccctccgatgtgctaggtactatgtccagccccccaggattcacctgtaagcaggacagtcttttggatgacagagggaattctcatatatccacaggcagatggaatttacaagtggaaagacctagaagttcagagacagggggactgaactttttgctttcagtcagaatctttgcttacggttgtgcaaatgcttgcattggtgggtttccatgccatataacgtgctacatatttttacgttacccttgcacataagcatactgttgggagggaaaatgaagagggtggaggtggtaacaaactcaagctaaggaaatggaatttggatgggtacaaagtccagagaattagcttgaggaaaatgaaccaggattcacacaggagttttcaaacatctcaatatcaggacccctttaccctcttaaaacttacttcgtgaggaccttaaagagcttttgtttgtgtgacttatatgtattaatatttactatattagaaattaaaagtaaggaatggttgt

SEQ ID NO: 2180 - DNA, 304 bp, Homo sapiens
aagatattctaggccccttgttgcttcagccatcagtctataaataacacaacactaattttccatcaagtaacagcttaaaacagaacactgtcaagattttgatttactaatttataatcttatttccaagcaaaacaagtcaatttcatgttacaacttttttcttgtttctttttatcttgtttggcctgagggttgggggatttgggggagttgtcagctgcacaatctttgaagtgtaagttaatttttatgtgatatttcagtatatattttattgattaaatttattggaaaactt

SEQ ID NO: 2181 - DNA, 557 bp, Homo sapiens
agtcaagtatgactgccacagagaaatggtcccatccaggaaatcagatattgagtcctacctgagtttccagcaagaaggtacggacttgctgttaggatgggaattatggatcaggaattgccctgagatggggtcctggtaacagatagactctaggataggattccctcctggggattgcggcagagtgtacttgcaagtggagccttgaaggtgtctttgctcagttcaaaagccacagaagaagttctggacgatgtgggccttcaatcttctaagatgggaatagaaagaagaggatctacccagaccaggaccctgctgcccaatctcagctctggctttctggatctgtgcttctctggtagaggaaccctgaggactgatctactcttgcagttctaaaaccatggcccatgacatgacttttctaagccagatgtaattacatcattggagcaaggaaaagagccctggatgattgtaagggaagaaaaaggaagatggtgtacaggcctcgctattccctgggacacaacaatattgaacgtagg

SEQ ID NO: 2182 - DNA, 510 bp, Homo sapiens
gcaacgtgttggaccttccggagcttctcagaagacagagggttttcttttgagatccctcccgtagctgtcatacagagtgcgatttatgacttgtaagttgtgctatggagcttgacaagtaagtttgatttcatttaatattttctttaaaccatcttagatcttctctttgacaagtatttcatctgttagtgttctcaaaatgtaaaatgggtaacttaatgagaacaaaaattgtaccctaagacatatttgcactatctacatatttgcaattaaatcttaacagatttaattgtaatagaatctaatggttttcctcttgaatttttttagacaccagaaattttcattactaataaataatgtttagcttcctagtcacaaaccaaacagaaagcaaatttcatcagagtttagaatggttaaaaccaacatagctgcaatatttttagttttgctttaaaattttttgaatcaatcagtaaatcaatcagagttgaccat

SEQ ID NO: 2183 - DNA, 520 bp, Homo sapiens
taaaggtgagccacagacatgcagcaccaccagagacaacaacaccccgtggcaagaagaccatgttctggactgtctccgtactgccacgggcacagaagaagaagaaaaccacaggagtcccatgaaggtgcagaggtctacacaggagttcaggatagacaccttgctggcaggacatggccacagactcctctaacttattccccaaagtgcaagagcaggtcttcttcagtccatccttctaacctgtccagagcagctgtatgcttactgccagatcgctctacccttctggggcaacaggactcgagccctgaggactctgcaaagctaggcccctgatggtctactatgcttagagaccattatgcatggggctctttgggcttctaaagggctccctgggagaaactgccttccaaatctgactactaagatgatactatgggaacagattgtgaggacagaaagaaaaaaataaataaaaattaaaaacgtagaaaaaagaaaaaaaaaa

SEQ ID NO: 2184 - DNA, 951 bp, Homo sapiens
gctgtcccacgcgccgggtcccgttggcgccggggcctcctgggacggcctggccgcggcctgcgggtatgcgctctttccagaaaggcagcacacgcatgtctctgccgtggccccagatcctccccgcgccgccgttttgagcgttcacactcattacccaggtccgtctgggagacccgccgggctcccgccctcccggcccgcagcctcctggccaaaatcctcccgggacaccccacctggactgctgcgaacgggcctccacccgcctccccggacccgcagcgccccccgctccctcagggttctggggtgaaggggtctgaatagcaccaggggaggcggcagggcgggcctgtcctacctgcgcccgagcactgctgagacgacatcccttccagcgccgccacgtagtccagccccagccagccgcggtcctggaagcaccgcaggcagacgacctgctcctcactgggctcaggcagggtcacccgcccagtgccgctagctgcaaattgctttacatacagtgacccaaagagcaagtcatttcagggccccaccactctgattggaagtcataagcttgacaactgattggcctctgtcacccaagcgggtgtggggacactaggcccgcaggtgccactggaagaggcgttcagaagcactgcggtgctccagctcctggatgcagatatctccccacaaacctaaacaatttcgagagggacttgtgttctgcaaccagtcacagaatatcaggtgagctgggcgtgtcttcactgacccacccgcccagggatgctgcactcctctccaccctgctcagaatcactagaatgaccgttctgtggctacagccctaaaagagctactaaaaagaccagaagtagtatgagaacttatgaatacgaatataaataaaggacatctggagaacatgca

SEQ ID NO: 2185 - DNA, 3255 bp, Homo sapiens
atattttcagcatcacattttaagaataatatgtgaaatacaatatgttttattagtcacctttggaaaatacagtcttccacaatctggaaccacctctttggttcaaaatgtgccattcttctgtaatgtgtgtgataaacttaaaaaaaatctgtatcctttatcctaatcatcttacttgaacatcatcctgaaacaaatgacaaaaacattcacagttttatatacaaagttattggtaacaatgttcttaatagaattcaattagaaaacatataaaggcaaaggtagagttatttgatgttatggtttgaaaggattcccacactctcatgaatattctttattatgccagagggaccctaattcccctgcctttgagtgtgggatggcattgatgagttacttgtaccacatataataagcaggaagtgatggcacgtgacattggaaacaacttcgtaaaagtcaccgagactcactccttgctttctcctatgtctcccacctggcaggaagccatttgccatcatgtaaggcgagttcttcttagtgaggcattgacatctccagccagcagtgccgtgagggaggtgggcagctcaagcctcagtcaaaccctgagatgaccatggtcccactcaacatctcagctgtgaccatgtgggagaatccaagcctgagccaatcagcctagctgctcccagagtcctgactctcagaaaccatgccagattatacatatctgcagctttaagcttctgagattttggaatgactgatgacagagcaataaataactaatacatttcaccacatatcacttagcagaatgccatggagctattaaacacaatattttatgaagattagtctatgatatggagatatactcacaatgttattagcaacacaactagaccaactgagtataggtagtataatctcaatttgttctaaaaatataaatctgtacaaagatagaaagaccagaagaaaaaaaccatttaatacttgatagataattacaatggtaaagaatttagccttgatcacttgatttgagatggaatctaacttgctagctgtatacccatagttgtggatgtgtaaccaatgatttgtaaactaattctcagtttactcgtctatataaaagagctagtaatattacctatttcatgcggcttgggagaaatgaatcaataatatatagaagggcttagttctcatattgtggcaagtacttcacaaatgataatttttactattacaatttttataaggctttctgtaattcacaaattttctaatatctattttatgacttttgaaataattcttacaatatcccttttagtaacctttattacaaaatctattgtaatctcttaaaataatattcctttttgtttttctccgagatagtctatctaatgatgttacaatagagttaccaacaaatgccatatttcattcctgagcgtctatattcttgagttcctagcaacagagaacaaagtagcaaccatttcttaagaaaatgctgagatggacaccagagtttcaagcaattttcatccagaaggtcacatgttaggagtaaaagctatatggaatcttgaacaagcatagcatctaatagccttatttgattaaaaaaatgaatacacacaaaaattttttgaagactaactaccccttagaaatgttcgttaacttggtcagtaatataagcctacctcccatttattcaatagatcaggtaactcccctctttgttatgagcctagttttctagaggtggaccagattccatcatatgtacatcactcagctagttgagctctctaaatgaaaacttcagccgtagccactggatagaagaatacaagaaggaatgccgacttgaggagcaagttgtgttgagttcaggcattgctttggagaatctgcttcttcacctgctggcttaaagggttggatgacctgaggcagcagcagaagtttagacaattatggttggatgattcttaactgtcctaatcccaagtcctcaatttataagtgaggaactggaaaatcattcacacagctagctgcaagcaatgacagccttggagagaaatcaacctgtgtacagctcagtcccatctgagttctttggagaacaaactccagcagctacttctagaaaatatagacagcatattcagccaatctcctgagctggtgggacatttttacatgaacaaggcctccctccacatgaattgcaaagattcagtggactttgcatgattattcttctaatcttacattaagctttattttggattttaaaaaaatctgccacgtgtaagggcaccaatgtccaccaatattgttatataaaataacattattaatccttcctgtttatcttttaatcagaactaagagggatggtggatgatgaatgcatgagtcatacttacttcatgattctataaatcctaattttcactttttttaaataaaaattgcacgcaaaccaaaaagaagctgcctaaaacagacgtggagatactctacttaggtttcccagggaaagacaattttaaaaaacaattttagcaacaaaaatacatgggcagggaatacacgcatttattatcatttttcctcttaaagcagctatgatgagacacgtccaaaacacctgctcttgtgtactgcccagtttcacgtgagttctgtgggataacactgaatccactcttcagctacagtgaggaagtgatagaactgcttctggcacaccaaagaacagcacagaggtccaaatacatcttccttaggtgcccatgaatttaaatttatttctgctttatcctttaaaaaaaaatctaatgatttcaaatgccttgctgaaatcaacaccctctgcaacagccctctcaggatagttcatcctagtaggtctgtcaaaactgaaacaccaacatgtgagttcctcctctgggttttaaatgttagtactgtgactacttctttgtttgttttcacttttaattgacaaataataactgtatatgttatacagtaaatctgacattttgatataaaatgataactagtgactatttattgctgtgatgttgtccccgcttgtttattggctctgatggaacttttcaggggaatggttataactgaaaaatctgtaatgctaggaatttaacttttctacataaaatgcattttttctta

SEQ ID NO: 2186 - DNA, 304 bp, Homo sapiens
ctaggttggaatgcaatggcacaatctcagctcactgcaacctccacctcccaggttcaagcaattctcctgcctcagcctcccaagtagctgggattacaggcacgcaccactgcacccagggtacttggaagagctgtccaataagggttataaagcatgcagtagtccttggttgtgccatttccagacgcatgcaagattgcttcctgagcggctgtctaggagacaaacaataactttcaaacttgcaatgttatggcttgccaacaactaaggattttaataaagctatttatatgca

SEQ ID NO: 2187 - DNA, 2927 bp, Homo sapiens
gctgctgctgttgctgctgcgacgccgaggacgagccggcggtcaggccgtccagcaccttcctgatgttgaatttcctcatggtctcggaggggctcccccgcagcccgggaggggaggcacagggggtccccgggcgggggagaccacccggggccgaaggcagcttcgaccgcggaaacggaggagtgggagtgtgaggagaaatatgcaatgatgacatttccaagaagtgatggcatctggcgctaaggacaaagaatgggattttgccacagggatcttattctcccacatgttctgtctgaaggagaaagttatctgaggccttatatgatgcaaaactttggactcaaagaaattaaatcacttgcccaaggttacatagctgccacccaggagcttacaatttatgtgaggaaacagattgtatacatatacagataattaaaaatatatatgcccctggcaaacaccattctactttccgtctctatgaatttgactactcgaagtacctcatgtgaaatgttggtgccaaatgaacttttctggttcttctgaatatgccactgttgctggagaaatgtcactgctagagaacagaagactattattccaaagggtatttgagactgactgaatcaggtctggaacattattgaaatgagacccacaaaagaagagatactgaggtggtgaccagatggatataaacgggctgtggaaaaagagaatgcatggccaaaaatggtggtgctctctgtccaaaaactgaggccctatgaccatgaatgaagccagagggcaggtaggaatagatcatttgctccagaagaagctggttgccatgtcttgaggacagtaaaccctctggggaggttcctgtggtaaggaacaagggctcctggcaatagcctctgagtgagccaccttgaaaatggattgtccagccccagtcaagctttcagatgactgtagctcctgccaatgtcttcaccacaacctcatgagatcccaagctacaaccactcagttaagttatgccaaaattcctgattcacagaaattgacatacaggagaggtcacagttaagatcttgatgttctatcttgacccataatataggaacttcatcttttgggaagcaccagggagagctgcctgtgcctggcagaagctgcccatgccccactgataccccacagtacttcctgttctgcttagtactcctgcttctttctacaaacaactgtgattctctacctgggagcttcctctggccacaggagcctgctcacctgattgggacaccctagcagtactggctcatagatggaagggacttgccttgtcgctgatgagactttcgacttggacttttgagtcaatgctggaatgagttaagactttggggaactgttggaagggtgtgattgtgttttgaattgtgaggacatgagattttgaagaggctaatggcagcgtccccacctaaatctcttcttgaattgtagttcccataatccccacgtgtcgtggggtggagccggtggagataattgaatcatgggaacactttcccccatgctgttattgtgattgtgaattctcacgagatctgatggttgtataaacgccttccctcttcgctgggcactcatttttctccttcctgccaccatgtgaagaaggatatgcttgcttcttgtgccatgattgtaagtttcctgaggcctccccagccatgctgaactgtgagtcaattgaacctctttcctttataaattacctagtcttggatatgtttttattagcagtgtgagacaggactaatacacaaaggatttgaaatcacaaaggagctgttttctgctccaccatggaagtctcacatgcatcacatctattcatatccatttgccacaactagacaaaaagtcctttttaaaatctgcctagagatcaggaagtattatctctggatgcctaggcaggagaggtgaatcagatattggtgggcactagtgtgttctatgatacatagcttaataaaaataagtttcagataaatctaaatatacattagaatactgtaaccacagtagaaaaaaatattggctcctttttgtgataaactaatgatggtaaatgcaccctatttaagcaagaaaagaaactgatctgccataaagaaaacaatgacatatttaactacaaaatatgttacaaaatattaatatccctaatggacaaatgagttccaataaatggataacaaaaaaccaataagtctgtagaaaaatggagaaaatatatttgcagaatatttatacaggtggtaatgaaattgacaatgatgtttatcatcagcagtaaacagtaaaaagtttcacccaccaggactatagaaatttttcaaatggataattttcagaatcagcaaagttatagaaaagtaggtaccagttgcacataccattggaggaaatgtaaaatatagttaccttgtggaaagtaatctgatgtaatatattaaaattttatccatgtatgtcctataattcagcaattccatgttggggaatccatacaaagaaatacttatacacatgcagaaggagctaagtttaagaaagcacacatttcagcgggttgtggtgtctcacccctgtaatcccagcacattgggaggccgaggttggtggatcacctgaggtcaggagtttgagaccagcctggccaacatggtgaaaccctgtctctactaaaaatacaaaaaattagctggtgtggcagtgggtgcctgcagctactcaggaggctgaggcaggagaatcgcttgaacctgggaggtggaggttgcagtgagctgagatcacaccactgcactccagcctgggtgacaagagcgaaattccatctc

SEQ ID NO: 2188 - DNA, 644 bp, Homo sapiens
acattcaccaccgcgtgacgcggcgccgggtcgccgccgcagattcgacacaaaacccggaaggaccccgccgaaggttttctccggttcgggagagagacggagtcccgctctgtcacgcaggctgccaggctggcgtacagtggcgcaatctcagctcgctgcaacctccacctcctgggttcaagcgattttcttgcctctgcctcctgagtagctgggattactggcacacaccaccatgcacagttccttgttcaaaatgccaagaacctggatgactcatagtcaagaccctccaccagtaacatatattggcgagccagccaggagcttggaaccctcggtggacagtgcctaagcacagaggcaaccacaggtttctaacagggccactctctggtgaaactgaaaggtttctgtgtgaaagtgcctgaccaccactgcccaattcagaccactacaggaaacactccatttattccacctgacttcccacttggctgcatcctcaaccattgaaatgaatttgaccctgataatctaaggaggaaacatttgatattcttttgcaataatacttggccccagtattgtttggaatctggagtttgctgttgaatgggaaagcaggatgacgttgc

SEQ ID NO: 2189 - DNA, 3838 bp, Homo sapiens
attgcagctgcctctcccgccgagttggagacggatgggctgggacgggttttgggggggtgtccccaattctgactgggagtggaggaacccctcctgagatctcttgtgggggtgccccctccccagggcactccccagtccctgagccagccgagaggaaggaggccagcgatgcgactggggcggctcctttctcctgcaccccaaatgtgagggatgcaccctaaattttgctcttttcaaaataggggaccaggatctcaggggagagtagctgaggtaagtggggagggaagtgtcctctgttttcaggagagacgtggcggttgggggggaggtttggaggtgcgtgctggggtggggttggctttgtcagtcttggaattggggggatgattggagaggctttctcttatacccctaaactgcagccccccagacggaaaccaaaggctgagaccagagagccccccaacatccccagccgttaggatagtgtttaatttctctttcaccccccacaaaggctctgccgaggtaggagctgggggcaactgttagtttgggggctatggagggtggtggaggagcaggaggccttggcaagatttgatggagggcagataggggtgtccgggaggggtctggcatcttcgggggcctaaaaagactgcttacatacaccaccttggatctttcagattgctaagagttttggggggtgtgtcggaagagggggtggtaaaagatgcgatgggatataggaagataacttctggattttagggggtcatattttgatttgcaaaaggagttttggcccttggattttgctttctgaggggtgtttttaaaaaatcaagtcctggacaggagaaaagggctgagggaaggcctggagttgggggtggggagaggcatgtttgtctcagcttaaacgtggctctctggggtgggcccgcctgccctggcctggtggatgggctgatggaggttgctgtgggggccggctcgggtcctcaggggccctggggagtgggaacagcactgggggttgaatacctggccccccaggtccagatggccctcttcctgggctctgctgctccccttccccctggtctccatttcctgcctttggcctccatcttgtggcaggcccagggcccagggcgacttccggcccccctctcccaaccatgttccggccccaccacctctggactgccaactcccaaccctgctggccttggccctctgtctctccttgcttttctcttgggttctgacccagggagaggaaggacggacacaggaagccttgggtccctgcccttgctgagacaggaggcagtgtgttggcccctccagtcattccctatttcttctgcctctgaccccaccctagggatcccctgagctgagttcctacagagggaagatggtccaatcttactacactgtgagctcatccccatggtccgtcgccttccagttgcctgctcagcccgtccctggttcctcccaaacgtttttgggggccatgtttgccttttaaggcttctctatccccccgctcctggaggtggtgctggggtcttcccagcactgctatgtgctctcttcctttcaacccaccccggtcctgctcccgccccagcagcacactgtggtttgtacggcactgtggccacgtccaaaccacactgtggtgttagagcgagggtgggggaggcaccgccgaggcttggccctgggaggccatcctggagaagtgacacaaaaaacatctggggccttgtgacaaacttcttgccaggtgggcaaggagagggtggggtatgtaagcacccctctaaaatctccagggcagtttcaagaatactgatggccagagaccctgggagtaagttctgcctcaagagaacaaagtggagtctttgttgcccacacccagcttccctggctctagcagcacagaaatattggcacagggaagcgagtctgccaatattggctgtgctgctccaggcagggtggtgaaaactaccgaggaggggctgagcccccatgggccgaggagagaagagggaacaggcctctcctgctaataatgttaagcagacagcacgaagctgagagggaaatctttattgttttctgtataaaaatgtccatcagatgaaggtcaaaggggttgggggcagatgcttatgcgggaatagcgaggtggcagccccagcagcctttcagccctctctcgtgcaggccttgctcggagtcccaggagatccacaggtccggcatgaacagtgagaggtcagaggtggaaggctcagcaggagaggagaggaggatcagcagaggtcatgagaaggccagaatccagggtcaggctgtctggaacaggaagtaaaatgggccgagatggagcgagcccccagtgtgcttccaaggccactcccacctccctgaaacaccctgctacgtactgatccaatgccctgcgctgtgtatgagagcaccttctcttctgaaacccctatacaagggaggggcccctgcggagaccgtgccctgccatccaggtgagccctttctccccaaccccgtcagctgtgtgggaggaggaggactcctaccctggtcgaagttgagtttcttagctggaggagtttctcctagcccttcaatatccaccacgtcactgttggcatcggagtcgttcagagcactgagtgtcacatctgggaagggggcataagctaggttctaggttcccctgacagcctctcccccagccccaagcttcccaaagctttgtgcctcctctcccctcccctctgcccctctctgggaacctccacagggacaggaagagagactgacccttctttgacccaggcccaattctctcactaaacctcagatgggacctttaacccctaggcagcaactccacagccctcaccagccttctgtttctttatggggggacccccggcctcagggacactggagctgctgggaggaggggcagctggaggaggtgacaagacaccagatgccaccttcttgggccctttcttgggtgactcagctggaagggggatgccagaatcttcatataccttgcgtttcacagtggcctttatctgggccctgaagaaaagagagaagaggttaggaaaggagtcatcagagagactaacagaagaggggacgggaggggaaggggttctgggagtcccttcataagaatccaggtcggggccccaacccattggtagggttctcactttctcgaagttttacactcactcaggatggatggagtgtggagagtggagtccctgaactgagtagtgggaaaggcccatctcctaattctcttctgggagagacatcaggtagagcttggtgatttacaggtggattgagatttactgatcaactagttcagggtcaccatatccctggaaacactgcagtggggtcctcaaacatttatataaataaccaggggacttccatcatcaaatacaataacagcatctcaggcaacctaaattcacattcttggaaggattaccacagcattttaggaacttctgaccaactgtgacaattctattctttcagtcctcaaggggattctaaaaaactagtgacaaagtagggaagcagctgagctggaaaggagttctgaggacgatggaaccttgggtaaggaggaagaaggctgcccacccgcccttttctggcagccaccctccctcacactgtccgttccttgatgacacagctgatgtgattaagatcgtccccaaatcgc

SEQ ID NO: 2190 - DNA, 667 bp, Homo sapiens
ggcatctagaacactgagaaatccaggatggacacttaacactaccaaagattgatctattttggagttagttctttagatcagaggtccccaaccccaggactgcggactgccactggtctttggcctgtcaggcacccggccacacagctggagtgtgaaaaaaaaggaaaaaactgaaaatctcaagaggattccaggaaatcaaaacaatgaattattgaatcaagaatttgaaagagaaaatagatgcatactgaaaaaagaattttgtttagtgagatagatgtaataatgaaggcatgttgataacgggggagctatgtatatatgaggggagggatatattggaaatctctgtatcttcctctcaatcttgctgtgatcctaaaactgctctaaaaaatattttgagaaggaataatgatgtggtaaacatgttctgttatttaaaaagagagacttttcatagccgcctccctccccctctacacacacacagagtcctgtccgtcttcattcccttactcaataatttgtacagacacagccactgggctccagtaatcctaaagtttctagaaaatcaagcacagaaaaaggttaaaaccctgagggaataaaagaattcctttgcatccattgcatttctcaggaagtgaactaa

SEQ ID NO: 2191 - DNA, 3571 bp, Homo sapiens
ctgagagaaggccggctcctgtgctctgcactctggcccagggctgctgttccgctggctgacgccctgtccccaccccagcatgtcctgcttccaggctgcttgacccggctgggctgggtgcctcttccccacccccgccccagtctcccgggccccatcccagcctggcccgtcataactgccgatccccagaactgtccctggtgtgcagcaggcatgcagggtgggcctgcagagcgaggtcccagcaccggcggcatctggcgctgaacacaggaagatgggacgtttgctgaatgaatgcacgtccctgatgaggcctggacttcgacggatgaaggggctggtggggtggagtcagggttccccgaaagccctgggtggagagggtccccaaagtggggtcagacagcctgtgaggctcacagtcctgccctgcagccctttggtttggaccaggtgccacctccccatctccctggccccagccctcagctaaccagcccatgccaccgcctggaaatgggccagagggcagtggcgacctgcccaagtccacacgcaggccacaggccacactctgaaccccggggcaggctcagacgggctttgctcagcctgccttagggcatagagggagactgagtcagggccctcccaggaaggatgggtgtgcggccttccacgctcgggactttgggccacgatgtccaccccagggtcttcgcagagcagcgggaaaggaccctgctggcaggcacagtgcccgtctctgcccccggctctgctccaaccgcccccagcccaagggcggcacgccgcagggggtctgtgatccccccacgtccccggctcctttcacccacacaccacactgggaggcggcagcccgagggcaggtttattgacaacctcacgggacacaagcaggctggggacaggacggcgacaggctccggcggcggcggcggcggcgctacctgcggtaccagatctgcagcctccgctcccgcttgatcttcctctgcagctgcaggatgccgtagagcagggcctcggccgtaggtgggcagcctgcagggaccttgcctcagtctcgcttcccgcagccggagcccgcgtgaccgcgtgcacagcgcagccggctcggctttggaagggtttcccgggccggcctctgaaggtggaggctgacagccctgggtgggcgcagtgccagggactgggagccggcgcaggggaggtccctgcaggaagagtggggtcctcccctgggcaaggccccactgccctccacccgtggctcatcccgggctgtcacagggacctctcggacaagacgctgacctcactaacccggcccccggccccagccctcaggactcaatgggggccagcgctcagcagacacacttagcagtggggagcagggcccggggctgccctggacggagatggaggcagggaggctgggcggagggaggggaggtggcccagagcccgggcatcccacgaggacccgatgaccctctttctgagccccaagccagagctctttgctggggatcccccagtcccggctgccacgcaggttcagaacaaagggcttgagcaagaggacgaagcccagggcccaacggggacagcaggagtggaaacaggggaagacgccaggggcatgggcagagctcctgaccccaggatggacctctctgtgctgtcaagtcacagggaggcccaggctgccctctccactgcccccggggtgacctgaaccgtgcagaacgctgaacaaatcaacgccctttccagggaagcggaatccaaagtcagagcctgttcctccacttttgagaggcaccaggatgtgcctctcgcttgcccaaacccccagactcgggactcagggctgggctctctgcgcatgagctaatgccgcacgcagcacagggtggccaagaacaggactctgtcccctgtcccacatgagcgccacctccaagcctgcctaccgtggaccactgtcaaggtgaacgcccggggggatggccctcgtgggaccacgtgaggtgcaagagtcccacgggatcaccagatataaagaatgttcccggtgcgatgtgaatttcaggtaggaccatatgaaactgctgtaaaccaggcgtgtgtcaggaattccactcagcttcccctgctccctctgatccctctgatgcctgaatacatcgccgacttctcacaggggacaggctccactaagaggcagcgctccgagtcggcccatccataggatgggggagcccgccgtctgctgggggtgtgggactccctcacaggggccgccgggctccgtgtggcgctggccctgtctccagctccctcgtgggcggtgcggtcccggccctacctgggatgtagatgtccacgggcacgatgcggtcgcagcccctcaccaccgagtaggaatagtggtagtagcctcctccgttggcgcagctgttggggaggcaccgtgaggggagtgtgccgaagacccgcctgcccaccctccctccacgaggcctcgccccatccccacccgccttcaactgcaggccaggcacctacgaggctggaacttgtcacggagaagcaatgagcaaacacgcacaggctcccagagcctctgtgggaccagtggggcgcaagctcacacgtggctgataactcggggaaaagtgctcccctcccgagggggctcctgaccaccgattcccggggctgggatgtgtcagatcacatgtgtcaacaaaaagccacttcagacagccacagtgccaacacccagcccctgtctatggggcggctgagcctcaccctcgcctgattccggctctgtcagtgaggcgctggggtccacccggggcagggagctggaaaccccaggagaccacacagactccactcccagcactgcttcccacagccgtaaaaatggacataccctgaatgcccagcagtgggagacggttatgaaaactctggaatattctaattaactgtttagaattagattagtaatatgtccacacagtgggatattattcagccaagaaaaggcacgaggctcggacacaggccacagcacggatgcaccttgaggacgtcgcgctcagtgagagacgccggacacagaaggccatgcggcgtgtgatcctgtttctgtgaaatgtccaggacgggcccatccacagagacagggaggggaggtgtgggcaccggggctcggaaggggatgcagagtgactgctgatggggacagcatttcatttgggggtgatgagaatgttctggaattagaggtggtggcctaaaaaccactgaactgctcgctttaaaagggtaaacttatcaagacctgatctctacagaaattttaaaaagtaggcacagtggagtacatctgtaatcccagcactctgagaggctaaggttgggggaccgcttgagcccaggaggtcaaggctgcagtgagctatgactgcaccactgcactccagcctgggcaactcagtgagactctgtctct

SEQ ID NO: 2192 - DNA, 936 bp, Homo sapiens
gaaactgctgctgggtctggagaggtgaagacccgtggccagcttctgttgttgccatcggccattgctttttgttcgcttgcttttggttttgcaagaagagcggcctctgtctctgatctgcttcaaatcatcattccatcagtgacagaagtggctgttccatcagtggtcgcagccagttcagctcctgcatccatccccaagtgttctgagtggaatttgaggcctccccaaccacctaccaaaaaaggagggtgaaatgaaaggaagaagaaaaactcagcattctttcctctgacaaagagtaaaacgacaaggaatatcggcctgaattctcttcccaagaagaaagaaagcacaccaacgcaggcatttgtcttctgtccatggtgctgaagtttattcactttcaaaccactttcagtaacaggtctgcgttggacacggcattgtacatgggattagctctggtctgacctaggagctggaatgccagtaaaaggaggaagctcacggtggtggtggagaaggagctcatgctggcgtcgtcaaggagcaatccactgcttgctgctctgtctctcccctctggttcctctctggttcccctctcttggcctacgtctgtccctgtctcccagctgcccagtgccgcctctttttatagccccccagctctccaagcacgcaggagagacagaaccctccccattctgtcacttgcagtgataaagctgccaagtgagaagccagcaggagatgcccttttaaagttatcatcccgcagggcttgtcacagcccctctctgccttgggcagccccaacagccccccagaccctcagctgcaagagccgcattcttactgatttgactcaagaggctcccacttcaaaggtgtgagaagagtaaaaaagagtccttggttatctca

SEQ ID NO: 2193 - DNA, 622 bp, Homo sapiens
aaatgaagcagttggaagcaaagaagctgctgctttgggatccgcaaatcagaggatcaggaaatgtgaaacaactttcctgacagcttcagggagtgacatccaggcaggaactcggcggcttggcagagctggaggaggatagcagcctgcattcactggatgcctggtgtgaggaaagaactggcacatgtcctgattcagccatctgtgcttcctctccccaccaaagtgaaaatgcattcaaactaaattattttgaaaacacattctctccattcaagttctacttcaagacctcacaatagagggcacctccacgatctcattcctggcagcacttgaatgggggctgctgaacaatacactctcagtacttgctcagaaagaaagacaagacttgggacgaaaacaggtgaaagctcttccgagatttagagagacaggacccggtgccgaattgctttccaggcggtcaagccgcattgctcattacgtggagtgaatgggatgattccaaaccagccctggacgaggtggcaagtgaacatgtgctttaattgctgcttattcaatgtttaaattatacgtttttatatttaagccagtgttaatttatttt

SEQ ID NO: 2194 - DNA, 4625 bp, Homo sapiens
cctgtctcccggacgaggacctcaaccccttcccccgctcggggaccccggccacccgcagcccggccgcgctgcgcccagaaacccatgagtcttcctcagcagctgtcgaaacttgccggcggttgcttgctcacctttgctgtctccccttcagaaaaggctggaggggagggcgaggaaggcttggcgtggggacgcccgtcgagtctctcagtgaggaatgagaggccagcttctcctgcggggtatgaaggaggaactgtatctcctatatatattaagtttcatttataaagacatcagagagcacctgagaatgtttcaaggtcaccaaaagctttctgaaaatgcctttctgcaaagaaggtttccagagatagaagataactcaggaagcttagaagaggtcaacctgggaagacaggattctttctccccacccgtggctctgcaggaagcaataccctcccctctgggcaaggtcgaccctccaagtccagatgagaagagttccctctgtctgctctttcctctgcctgatgacccagaggctttgcagctgtgatcctggcagcccctggccacctcagggagctgcagaattcaaaccctggaaatggagctctgcttgcagctgcacctggggcctgacctgcttaggacaggcctgtctggacctaagagaaccccactgccacccactcagctactccctaacagactgcagagaccaagtctttttcatttctttatatccattgatttctcgagttattgaaactcaatatttactgagcacctacaatgtgccaggcactgtgataggcactgaagaaagggcaaaggacgagcagataaatttcctacttgcagggaacaccgtggtagtgagtaaaatgagacattgcaaataaacacataaatatataatatgtcaactggcaataattgatgcgaagaatgattaagcaaaacaaggaaatgcagagacagggaaggagcatctatctggtatgaagtagtcagagaaggcctctctggtcagatgacatttgggcagaacctggggcctgtctcagcaccacctgttccttcctcggccacttgctccctgcagccaccaaaggcccctgtggttttcccgcctgaggctcaccagccacaggcctagaatatctggcttctctccccacgtccaaactcagctgaaatgccaaactgcaggaccttgtttcctgagcaactgccaatggggctgaatgatgcaactcggaaaggaagaggatttcattccccctgaatggactttgcaccagtgggagacaggaaacaggagattggaggatactgggcagctgaactgcctcaccctttccccctgccccgtctggtgcacaatttctccacacagcctgctgtgtgtggccaagcctgtgcgccgactgagtgttatgggttgaactatgttcctcagaaagatatgtcgaagtcctaacccccagtaactgtgaatgtggctttatagtatttggaaacagggtctttgctgatgcaatcaagttaagatgaagtcattaagggggtaggggcctaatccaatctcttgtccttagaaggagaaagacagagacacatcaggggaagatggtgaggtgacaatggaggcagagattggagcaatttatctaaatgctaggcaacgccacagagagctgcaaacaccaaggctagaagaggcagggaaggagcctcccctacaggtttcagagggagcatggcctcaccatacctttacttcagacttctagcatccagaactgtgacacaacacatttctgttgttctgagtgacaacagtgtgtggtgtgttattacagctgctctagaaactaacatatcgagcagccagctgtgtgggattgtacctcccaagtaaccctctaagacttaacctttgcccagggctctgtctctagagaactgtgacaatgataggtagacctgaataaagcgaaggatgatatctgcagggatatttgaggacagggagtgctgacaagggaggagccagtgcaaaggccccgaggtggcagtatgcttggtgtgttggaggagcaggaaggtgaccagggtgtttggggagtgaataaggggaagagtgctcagaggagaagtcagaggaggggccaaagacatgttctctagggccagaaaggcctttggatcttttcgacattatcttcttgacatgtaatttatatagtagtaaaatgaacaaaatgggtgactattttgtgaattttttagatacataaaaccacgtgatcactatccagatcaaatgttgaacatttccatcaccccagagagttcactcctgctaccttccagtcaatacaacttaccaatcctgaggcaaccagtactctctcttttatcatcataaatttgttttaacctgttccttaatggcatataaatgaaactacatagcatgcttttgctcaaaatagtgcttgtgaggttcatccaggttgctgtatgtatacttcaattattattattgctgagtagtattccattgcctggatatatcacaaattatttatccattcttctgctgaatatttgagttatttgcagtttaggcctataataaatgaagccgctaggaacatttatgtgttcctcttattttggttgcatgcaatcatttctcttggtataaacctagcagtgtattttctgggtcaactggcttaggtttaggttaactgtattcgtttacaccattttatactcccgtcagcaatatatgagttccaggtattctgcatcctcaccaacacttggagcctttctggtaggtgtgtagtggcattgcattgtgctttcaatatgcatttttctgctgactaatgcactcctttttatatgcctattattcacatatctccttttatgaagtaggtattcaagtcttttattcacattttatgttttgttatggccacatctcacttccagaatctgtattggttatctatcgcgcattaaaaaagtactctaaagcttgacagctaaaaacaacaaacattcattctctcacacagtctctgcaggtcaggaacctgggtgcagcttcatggggtggttctggctcagggtctcaggttgcatttgagctgctgtctgaggttacagccctacctatcaaagctgaaccagagccagactccatgtctaaactcacttatgtgagcttcagtgtgagaaatgtatgaattttgtttgatgaaatattgaaaagcttaacaacttcctcctactctcattggcctcttggtgcccagtatctgagtctgaaaaatctcatctataggaatcaatggcagcaaagacagaaccaaggtcccacggctattggggaggttggcagatgagtgaggaaaaaggggtgtcagcaatctaaaaatattcaggctcacagaaatataactgtttgaaatgactcacttttattaagatcctgccatctcacttaccagcttaaaaaaaaatagatcacagcagaatgtttcaaattctccataaatggccatttgatccagcaacctacctgtggaaatttatgccaagattagaatctacaaaatacatacagagatgcacattgaagtattatttattaggaatctaaattgtggaatcattaaagagaatacatattccctcaaaagaataccatggtgttattaaaagtagtcattatgagtggttaggatataatataatattacaggaaattcttaggatataccatcaagtagaaaaacttttcttcccagcttttcaatgtgaaaatgtttaaacctacaggaaagttgtaaggccagaacaataaatgcttgtatagccttcatctagattctccaacagtgaccacagttgccacatctctttaagtgtaatgctcatcctttgagagtaagtgcagacattttgataccatgctctaagtactacaacacctatctaaaattgtagaaggaaactcttctatgattttcacactcaagacatttaacactgatataaagtttatattcaaatttctccaaaagatttaaaactatctctttggcttgtgttatccaggactcaatggaggattgagcattgcatttagttgttgtgcctctttagttttttttgatctaaaacaatccctcaaccatttttaaaaattctttcatgacattgacatttttaaaagactctggaacagtcattttacagaatatccttcaatttggatgtgtctgtttcctcaagattagaaattacatgaacttcttggctaacttctccattttattttgtgttcaaaatatattactctttcccatgtcctgtgaaaataaaaaatctctaatgtgtttgtgaaaaagattaagctaagattttgtttggatgcagtgtgatttggacttaggtgtgtgtatctgaacttcatcctttgtcatcaaaagaatagtataataactaagaacatgtagcttaagaaatccaggcacttgagagccactgtaagtaaactctaattcccacagcagaaagaa

SEQ ID NO: 2195 - DNA, 471 bp, Homo sapiens
aaactctgcctgcttttagatggctcctcttagaactatgcatctctcctgatacttggatgcttttcctctgactgatgaagatcctgaataccaaagagggccgctgacaggtctaggagtacacttctagcacctagcagagagaggcttcactacatcatgcttcctgacatctctccctttgaagagcagtcagactcctgctttgctcttcagacttaatttgggggtttaacagccatgtgaagtgctcactccccctttgccttctgccatgattgtgtgtttcctgaggcctccccagaagctgagaagatgcttcctgtacagcctgcagaactgtttgaatgagagaggcagaagcacatttccaatcactgggggaacctgagaccattctttccaacccattttgccaaatggatgtcctgaggaaggtgttccaagagaggcgatgtcaggatagtg

SEQ ID NO: 2196 - DNA, 1114 bp, Homo sapiens
agacggaagcagcagcattccgcttgcaggtttttgaaaaaacaaatggggcaagagaggccaggaccacgcctgactcaggcgatcggacgggcagggaggctgcaaggcatggcatgagcaggtggagctgtcaggactgccccagcccctggctcaaagatgcccgaccccaggaccctgcctcgctggatggtgaaggccaacttcccctctgttggagctggcctgggcgttgtgggaagggctgggaggaggcccaggacaatgcagaacagacaggacgtttcacagagcaggctgccatgtccctcggggccttgggggctgctgaggccctgagaaaggtcactggaggcctggccggaagtgcagggttatctcagtacttgatttaaggctcctgcagctgaaaagctgccccacacggcggaccgggtggaggaagtcagctgtgctgcttaaccgtggagtctccgtcccggtcctgctcaccagctctgcaaaggccttgtcctccctgcctgattctcggcaccatttttaacacgcctatggagaggccacgttgagtccagaggtccgtgcgcctcatggccacatcacggcacccgttcacccacacaagggccaggagcatcccctagggaggaggagatggcagatctgcacaggctctgcgctcctctctctccggagcgtcctctcctctgtgtggcaggctcggcgcgtgatggaggagccccttctgcagggctctgtttagagggtgcccgccccacagcctgtggctgctcctactcatgccaggtgaggctcctacacccaccagtggccaccggggagtcacagctccttctgcatcatccgcctgacctgtttcctcatctgggatgacaaccagatccagctctgaggtccgtgccctgagtagaaaagttcacacagcaaagtttccggagccttccctgacgcgccacgtgtccgtccataactggtcatcctccacatcctgtgaggcacgtctcagcacctcttcgtgcaagcgcccgcactagacgtttgagaaacagatgtgagcaggcgtggtcctgacctccatcccgaggttggg

SEQ ID NO: 2197 - DNA, 523 bp, Homo sapiens
tttctctcttcgcctgctgccgtccatgtaagatgggacttgctcctccttgccttccaccatgattgtgaggcttcctcagccacgtggaactatgccctgaccttccgggaaaccctcggtgagaggcccacagcctcgcttctagggtcaccactgcttcttccagtctagccaaacagctcctagtacagctcagagcaccctgcaaggagggcacgtgttaaatcgaggagcacacatgctccacgaggaattctttgctttgaggccatgcacagaggtgggttcactatgaagcttgtgaaataagcttcagggcccgcatttgcatgggccacagagagtctgggagctgcagaaggttcaagggaagaggagccatcacaagcagaatattctagaaggcatttctggcaaatggcccaaagaggcctcaggagaaaagaacttgagtcttcaaggtaacctgcgacttttttgtctcattttaaatatcaactttcatgcctaatttttataa

SEQ ID NO: 2198 - DNA, 603 bp, Homo sapiens
atcttgcccaccctctaatgacacgttggactgcgcactgaacatagatcctgtcgagggtgtttagaattgcgccttcgggtgacctggggtctgcttccagaaggtgacattttaaataaggtgccatggggcagctgaggagctgggattaggctttggcctaacgcccctcagtttcttcagatgtgatctgttagtgctgcgggcctggtaccttgaagaggtagctaactggatccaatccccacttcccctgtagtttcctcagttggagcaaaaatggcgatggtagaggtcagacgtcatcctctatcaggacttcctccggactgacacctgggagagagtcacacttcggtttacagcccttccccgctccctttgcgcaaaaggaaacagttatcacctcaactgtcaccattagcaagacttgttcttccagtccagtgtcgaaaactattgtgccttcttttcccggactaataaaaaactgtaaacttaaaatacacaaagtgacacattactgacatactgtattttcttctctcaacctttggtctacagaagaaattcacttattaaattctactagtttcaaga

SEQ ID NO: 2199 - DNA, 445 bp, Homo sapiens
agtcttgaatattggcgagaaaagatgaagaagagaggatccattgtgtcgatcttcaagccctgttcttctaaaatgattgaagctgagatctccacctagtggatatataggattttgcagatctttatgggaacagccaactatccctggaaatccttaatttttttctcttagagaaataacaagttttaaagacttctacttaaatctgggatgattgtcaacaggacaattgcaaatgtatgaaacataccaatatgcatatcagttacactacagttaacaaagctgaatttttattttcatactataattaggaaaacagatcaaacacaaatatgaatatataattatccatgtagaaagcaatattgtaataccactaattgagatatgtataataatttacatgaaataaacatcaaatgtaaatctgctcaaa

SEQ ID NO: 2200 - DNA, 2043 bp, Homo sapiens
ggaagaagtgtattcagcattctaccttcttcctgattctgtgagcttagacctgcttccactttcaatctctctcattgcaggctgaagaggactggcctttcagtggccctcgtggaacggtaggaagctgagctggactctctgccacatcgttcggttcccacaacagcctgatgaagcagcagcagaaaaaatggaagccattttggttaacgggtcacatcttagcagttggcagcgtaagaagcggaaggatccactggtcagaaatggagattgaggagaagctgagagcacggagggcttcaggggagagcctgtcctttggaaaagcgggcaatttgcactcgtggtagatgagtggggaggccgctcagtctctctgcccctttgcacatgctgcacccgtttagtttgacgtcgtggagagctcctccaggcacgggctgtgtgaaagggtttaaaagtttgggggcatggctgggggtccccgcatgaggggtgctgtgtaggctcccatcttttctgccggtcatgctgggagccaacagcaccggctcctgacgtggggacttgccctgtgccatgacgtggggactcgccctgtgccctgcgccccggttcctgctggttctgtgccttctggactcatttcctttccagggtccgcaaccgcttccgacacaatcactattttggctgcggccacggcttcattcgcttcagctgcgagcttttctcagcgcagagagcacagggaagctgggaggagtccgcctagatggaatcttccagaagcaacatgactcttttaggcctttgctgccagctaagaaggtgaagaaaagtcaccactgcaataaaaagagggcactttgtcttacttggcaataaaccaccaccagcagcagcagcaatagcagcacccccacccccaccaaacccaaaacaaacaagaaaagcaaaaggaaaccttcgttttcagtgagaggattggcatgaagaatccttgggacacaggaatcaatcaagacctttggatgcccctgcctgctctgtctctagaagcctcaagcccagcatccccatgccgacgtgctcatctctagcaaaacaccagcctctcagccctctctccataaaggccactagaaagtactgtgatgccaggctgctccacatccaggcagcctgggtgaccactgccctttatgagaatcagaaaaagctgtctcccgagtagttggaattacaggtgcatgccaccatgcctggctaatttttgtatttttagtagagatggagtttcactatgttggccaggctgctcttgaactcctgacctcaaatgatccacccgactcggcctcccaaagagctggaattacaggagaagctaaacgttttaaaataagtatattatttctgaattactataacagacatggactccatttgaacaagatacttaattccatcaaaaacttgtcaaaatatacaaatttagtcacaagacactttactaccatctaccaaagctgtagtaaacacacacattttccatctttgaaatgaaataacgtataataatgttttccaaaataacaaagatgtctgcagtgaatagcactccctttgatgtggcaactgggtcaatcgtgttaacaactgtgaattcatctttttaagaaattcttttattgtttcttttcttttccgcgacagtctcactcgtgttgccccggctggagtgcagtggcgctatcttggctcactgcagcctccgcctcccgggttcaagcaattctcatgcctcagcctcctgagtagctgggattataggcacgtgccaccacacccagctaatttttttgtatttttagtagagacggggtttgaccatgttggtcagggtggtctcgaattcctgacctcagttgagccgccggcctcggcctcccaggaagtgctgggattacaggcatgagccaccaggcccggccttattgtttctatttgtaataaatctgttccccttgc

SEQ ID NO: 2201 - DNA, 2480 bp, Homo sapiens
atgaaggcggcttcagccgggcgtccggccgggctccaggtcgggtgcagaggcggaagctgtgctcttcctgctggacagagcccgagcccgagcccttcctccagctcctcacacgacgctgaacatgctaagaagctgctgctggttttaaaagcagagacacttgtcgcgataggctggcaccccaatgtttgctcacacaggcagcacaatcccacgctgtacctcagcttgtgccttgtcagctctgagctgggaggggagaggagaaaggaggaagcctcctgacctcggagcctccagtcaggactggctggctctgctccgtatgccgaaagccctgggaatttttcactgctctcgggatggcgtctggggcgtgggcaggttggtcccgctttgaacgctctgctggacttacggagctgctcttagtgctgggcagtgaacgccaagctgtcgtgtccacacggccaggggaacgccagggccaaggccagcatgcgctgagcttctgcccagcctggagtcgccttcaccaggccatgagcacgtgaggcactttctaagcactggttgcccgggaggcgcaactgctcagacgccgaggcagctcaaagggctccgacgtgcggtggctccacggggtcagcgtgcccagagtaatgggtgtcactagagcacctggcccagcacacgctttctgaggacacctggtgggcgcgccccacagcaggccccaaagtttcagaggtcctgtggagtacttgctgcctgggggaggcccttcctcagggagtgtccagcagagggaagagcagaccacgctctggaaggtccaagccgatcatgcacgagtcaacagtgctcccactgccgggccagcccctcttccccacccgaggccaccactctgctgaaatgaaggttcttgaatagcaagaaggaaggcagaagttggacactggatccttctgggttgtggatgtggatgagctagctgtgggcccctttccctctccctgtcctacttctgctgtgccagccccacagctgctcagtcccctccctggtggtgggtactgtcccgggacagccagttggtcctctccttcccgttggcaattctggctttccggcattccacaccaccggcccagcccctggggcttggcggaggcagtgttcctgctagctcttctctttgggcggaggagccccagcaccgcaggagatgggaggcagtgcagagactcgcctgagtgctgagggtggcggggcctgtctctgtcccctctcggggacctgtccctctcctggaccacggatattgatctgaggcaaacatctaattcccacttccccagaacatcccccaactgaacaaaaatcagtgacacttcaggaaagaaaaggtggtatttagtggcggtccccacactgcccctcccaggactgttttctaagcccacgtgagatctctcctgatccctttgaggtcttaatacaagagccgggcctacgggtgggagagtctggattctgtcctggccttgccatgcttcctggcttcatgaccttgttcaagtcacttaaacctctgtctggcttttacaaccatcaaaccatctaccctccaggtgctccacaaggactgactccaccccgggcactgtgtcggcactggaaacatgaaacccgagctgggagccagacaggggttcttcctgagagcctgggaagccgcctgccctcgtggaatttacggtctaaggagtgatgcacgtgaggcactttgaaagatgtgaaggactgtgtgtaaaacatgtgccaatttctcgcttcgcagaaggaatttccactgctttctcagttaagtgtcaagaacctccaaaagagatggttcaagagagctatattattgaatcagattatgttctttacacattttagcatagctcacaaaaccatatgaatgtttctgttttgaatattctcttcctaaatgttttacatcctgtggggaggggcttggattctgattctgtgtttaaatcctacaagcaggccgggtgcgtagctcacacctataatccctgcactttgggaggctgaggcgggcagatcatgaggtcaggagtttgagaccagcctgaccaacatagtgaaaccccgtctctattgaaaatacgaaaattagccgggtgtggtggtgggtgcctgtagttccagctactcgggaggctgaggcaggagaattgcttgaaccagagagttggagattgcagtgccgctgcactccagcctgggcaacagagcgagactccctctcaaacaaaataaaacaaaaaacatcctacaagtgtcaagcatggtggtgcacacctgtagtcccagctactctggaggctgaggtgggaggatcacttgagcccagttcaagaccagcctaggcaacatagtgagaccctgtctct

SEQ ID NO: 2202 - DNA, 822 bp, Homo sapiens
agtgagctccgagggcctttctgctgcttcctgtacccctgtatttcgctcagctctctgacttgactcagctccagaaatattctttcattaatattacatgcttatggaactttacctattgattaaagacatctacccctggagaaagagcccaatgagaagtaatctctgaagcccagatttcctaaggatgaagcttcaggagaggccttatcaatcctgacaacaaacttttctcgtcaatttagtttcatttaatggaagttttaaatgtgtaaagttcagaaggctattaaaattggttccagctatctaagatacacacacaaccacacacgcgcacacacggtagagataaatatgttcgaaaatccagctcaatgttactagaaaatttgatcagaatctggtgaaataaatagtaaacttactaaaaatgccaaatatcccagaagctgcttaacatttgatcaaaagctctgtccagtcaattcctgcttctttcaaaaatactctgctgaaaagccaaaggagaaatggggctggtaccttcaatatagagaattccaagtaagattagatcccagaaggcttagtgtggctttctaggactctcactattaggcagtaacctaccattcacctctgtttcccagattcaccttgttataccttataacttaaaatataaattccaacaatgtactgcactcaaaaaaattatttctcaatttgtttgctcatactattgatttttttctagaatctaaataattgtgaattaactatgatagcagtatgcacaaacagtaagtgaaa

SEQ ID NO: 2203 - DNA, 2978 bp, Homo sapiens
tttcatatgtgggagccactaggcctcctcttttcaagggctaagagaaatttaaatctctcccgattactgaccctgaaaaccacactgcgtttctggcagatgatgttaaaaaagtgtggtggaactccctctggtacaattgagtgcagacccttgtcttaaggaaataccatttgtcaggggtgggagagaaatatggatctctgtttctatttagaaatcatggcaacaagtagaacattttctgtccacatccagagggagaagccacaggaggaaataccttgaagcttgtgggacgtgcctggtgaggatattccgttcaatgacacatctgtcatctttacatgttgaccagccaacaagaacttgctgagtacaggacggacaaggttggcattccgctggctctacaggggatcaacgggaaggatggagagaacagcttgtgtgccaggtggggagacggacatggaccaatactgaataacctacaacacaatggtttagaaagagaattcaaggtatgtggactggacttaagccatggctaagctcacaaaagacttcctggaagaagatgtacagcctatggtgaggcacaacctccctgtctgtactgcgagttcttgggtcaagacacaactcacctctacctatctgtacactgacagcaaagtccttttaatatcaaacagaaatgaatgacaatgatggtgaccacatttcccaaacccacgaacggtcaggtttctgtggcgcctctccatttgagaggctctctgaaagccagtcgtggatagcatgcttccatgtgtatgtaaataacaagacatatggaacatgttaaatcggaagactgttccatatccagaattactaatgtactaataatcctttgaatcctcaaaaaaaacaaaaaacactatacttttatgccaaagtagatggaatgggtgactagagataaagctgaagaaatttcagatttaaaatctgactggcccattcaccagcagacttaggaaagtgctaactgcgaagctggccagtattcagctcgacagtcctaaaaacaaacggaaccctttggagctggaaagtggtatcataaaagccgccgaatgcggtgcttctagagcggcccaccaggaaaatatgacagtttacatctttacgtagcctaatgtacagtgggaatataaatatctcgttcaggccccagtcactgcctggaatgggatgctttccttaacaagaagcagatgagaggcccagaagccaaacctcttattctgttggtctgaaggctgtagttttcagtcggtcagcacagagagtggcaattcagggagggaaggcactgcatgtgtttccttggtcaggacaaaagcttgtagctcttttcctgggccccctgaggctctcgtacgttgagtgtcccgcatgtggtcagcggctttacccacctttccttgggccaccagctccctctgggctgctgaggccgatttgaccagggcgcttgtggcagcagcaatggatttagcagcttccaagatctgttcctcaaagtccagggtctcatccgcttgctataaccaaaagaaaacagcatcacattcaattcatatccacaaagggctctttcttccaaactacttactgccgggtcacctggctcttcacctgcctattgttttttgttgacaaaccacacctgaaatgggatggttccttaacaagaagcagatgacaggtcccctgtgcaaactttcaggactcttaagtcagtttggttaagccaccctcgggtcacagtgtggaagatgtggctggtacctttcaggcattaagagacaatggccaggcacagcaatagttttctttgtatgtgtggtacaatatatataacacaaaatttacccttttacctaatgttaagtattaatacactgacactgttgtacaacagcaataccaggatagaaaggtcaggatgcctctccacctgcagccccttccccctaactccaaaaggaaaaagccgttagcttgacatcccacggaaatttgcagacagactcattttctggaacaaaatctttaaagatatacactcactgtgaacaaaatacactcaaatggttttagcaacatcaataactgaaaccaaaataataaaatcaaaacagtagatcatagcacttactctcttctagagcctaagcctcaaaaatggactttaaaaaaaaaaaaaggaaagatggctaccagttctgaaaagttgtctttttcctgggtaaaaatcaaagccaaacagcactggcatttctgtggctgagcactgagagagttatagaccaagcacacattgcccagtggtgaaaaagaaaccagggcaacacgacatcaaggtggagcttgttctgtcctctggacacccgaggcacgggatccaccttgggaagaacactggacaccactgtgtaggtgttatcagaccattagggttctggtctaaattcaccaccatctcctttgctgctaaaacaactcaggaagttgaaaagaagctttggagaagtggaacaagtataaagactgtggtcccaggctcatgggttggagcatcacagttttgccggggggtggtcagattagacctgtgtgacaacattccgtgactctaggtcaatttggttaagctgccctcaggtcacacagtgttgaagatgtgggtggtacctttcaggcattgagagatgatggccaggcccagcaatacttttctctgtatgtgtggtaaaatatatgtaacacaaaacttacccttttatccaattttaagtgtacaattcagtggcattacggacattcacactttgtgccaacagtagtagatttttaagagtgcctactgtgtaccaagtattttgttaggcacttctacatacaatgacttaattctcacc

SEQ ID NO: 2204 - DNA, 558 bp, Homo sapiens
cctaccttttgttataggagtgttggccatgacccttatgacggatggggaaagacatcacatccttcctctcctacttgcagaaatatgaatactcaaggttaatgtcaaggacgtttgttccacttcgcatctgaattgacaaggaatggactcttcagctctgacagcaaatctctcttcagaagtctggaaaagcagaaagagaagaatgaagaaatgtccacaaaactgctcctatcctttacaccacataggaccaaactcttacctttcatcagttttcagtttgtacattaatgtatcctggtgaagttcctcaaccacttctgcaacattcaattttaatttatatttgcccacatcatttcatttgtgatttggacacatgcaggctactgaatataatggatacaaatctctcactgattcccttgagctatttcatagttctgctttcacaggcaggagacagtgaagaaataatgattcagttatttcttaaagatttcacaattctacattcaataaagaatatgtgaattcctggaagttatg

SEQ ID NO: 2205 - DNA, 945 bp, Homo sapiens
gttccatgtccgccacatctagggtgacaggttggattatgtccctccctaagagatgttggactcataacctcaagtacctcaggatgcgaacttatttggtgataggctttatagaggtatgcgtattagtccattttcacgctgctgataaagacatacctgagactgtgtcatttataaagaaaagaggtttaattgactcacagttccacgtggctgggaaggcctcacaatcatggcgaaggcaaggaggagcaagtcacatcttacgtggtgtcagggaagagagaaatgagaaccaaacaaaaggggtttccccttataaaaccgtcagatcttgtaagacttattcactaccatgataacagtatgggggaaacggctcccatgattcaattatctcctaccaggtccctctcacaaggtggaaattatgcgagctacaattcaagatgagatttgagtgaggacacagccaaaccgtatcagcatgcccaaattggatctcagcgcctgggagctccaactttagcaagtgcgaaatcctgtcttcggttttggaattttcatccgcacagactatatcagccacggataggatatgtgagaataccagcatgtcaaggctgggaatcatccttaggcatcacctagccagtcctgcctctcattttaagatgcagagtgttcatatgaggagagactttcccttgtctccgtcatctgtgatttcacttccctgacagaagacgaagcttccatctcagatgttttcttaaatgatgaaacagcatacgcctctgttcttgtcagctcagggaaaacagatctggggacctcttcatctctgcgttgggaagcataggtggtataatcccctcctgtcacgtccaacgttgcatagtcagaagcttcgcccttgtagttggtgcacacagcacg

SEQ ID NO: 2206 - DNA, 597 bp, Homo sapiens
tcacttttaaaacaatgaggttttattatttccaattacttacagcaagtaactgcatctaactaccatcaaagcattactagaaatgttagaaatctactagaaataactagaaatctgccaagctagatatatagagtacatgttagtataatcaagttttattttgttggaagggacctgtattattcaggattctttctgtttcaaataatttttaaaaactgaactcaaactggcttaaaaatgaaagggaatgtcttgacacacagaacttaaaaatccagaggttaatctggcttcagacattattagatgtatgggctaaaaaaagagccaggactcagtctccctctctccactgcttggctatagtttcctctgtattggtgtcattctcaggcaagccctacccgacttgctagcaagatagttgccagaagttctgggcctacctcttaccctttcagcaacctgtaaaggaaacgatttctttttcccaatagtttccttaaaagtcttaggactgcttcaaattttccgagcgtggaccatgtgccctttcttggccaacgagataaaagtcactgaatgtct

SEQ ID NO: 2207 - DNA, 701 bp, Homo sapiens
agagcacaggcagccccgagcacgcccggttgcaaaggaggctcctcggaaatcgcagcccaaccttaccccaggcccgggttccaggagccgcagagaaagcggggccggcaggaggaggcacgggccaggacttacctggcggcagcggccccacacctcctccaacccggactcagttgtaacaagaacctgaggccgctggagaaaaggaaaaaatgccgtcgcgggcggggcagacccacgagcctgcacgcagccccgcgccgccccgccccgtccgcgcaaacacgcgacctcctcagctcccattggtttctgccagcactagccacacccctgacagccccagatggggacacggaggggcggggcccgtcccaagtgcccctcaggatcttcccctgccgctgcctgagggagctgcccgggactcggtgacacctgatgtggcctccgatatcgactgggaggtggaagagaaatttggggaacgcatcgagaaccgtggaaaagcaaccttcgcagggggcaaccttctcacggtgcccccgtgaaccttcacagttggatggaactcaggccccaggttgagcttaaacaatctcttttctgtgctccaacttggactctaggtgagtacctggatttttggccacacaatgttttgaaatcaataaaatttggacccctttgaagta

SEQ ID NO: 2208 - DNA, 581 bp, Homo sapiens
ctagagttttgctcctgggacgggacgtccgagagcttttggttccagagggccatagtcttcatatacttcagcactccatgaaggctttcttggtactgttcaaagtaagatataacaagttgctgtgttgcatacatctttacaccttcattgcttgttctcccaggcatgctatcatacccaaggccacatggtgagatggaaagacactgcatctgaagtcaagggaccaaggtttcaaattctcaatgtcccccttgcatgatgggcaactgacatatcactccgcactttgcttgttgatttcttcattgagtgacagtaaaatggttgagtctgttcccagctgtcagactgccaggaatatctagtagtttggtttcctcttctggaaaatgacattagtagttaatgctacagtgtttactttgtgccaggccatttcctaagtactttacatatatatttactcttttaagtctcatgacaaccctatgaggtagtgtgttagtacattttgcattgctataaaggaatacctaagactgggtaatttataaagaaaagacatttatttg

SEQ ID NO: 2209 - DNA, 3803 bp, Homo sapiens
gcgcgcgggtgctccaaggagtcggaggaacgcggccgcgcgacgggccccggacgccgagggtggtgcttcctccgagcctccggtggtgaggccgctctcagaaggtcatggaagcgcaggggagagcgaggcggccgagcccaggcaaatcctcgagaaaggccgagtgcgcgacggctctgcggggaggaccgcgcctccccgaatgcggccgctgctgccgctgcaaacagtgccttgaggagaggaaagcggggaaccgtgttttcgccgcctctgtaaccactgcacacaagaaaaccagcttctgggagagggggatgattgttgggactttgcgaattacctaaacagcccagggccgaggcgccgccgctcgcgtcctggtcctcctgccgggtgtggggctcccctgcccgagatggccagcgggcgcgccgagagtatcctggagccatctagtcttgcctcggaggcggggtgggcttatttgtgcggagaagaaacggatctcttaatggggtgagatttttcctccgtacattgttcccatttccgcagtttcacttggcctcggttttctagcagagtaatcaccaaatgaaattagctggagagcgtttgatggcgcagaatcacggtctgaagatgtttacgctgtatgccggacgcgtttgatggtgttctcttcggcacaattaattttgcaaagttcagaaatgtgccagacagagcccctggcacgcagtcaggactctacagacacaccttgagtaggaaacaggcttgtttgtttcatctgtgatttatgtgatgcaccagcaccaaggccaacgtgttttttaaagacctttcgatgaaactccaaagcaatttataaattggcaaaatgaagcttgttttgtaaaataactcttccttgttgatcatgtaattaaatgggcaacaaaacacctgaaaggacatttactgaaaagtagactcccaaaacaaaaatatgtatttcacagctagatacggtcgctattagcgtcctaatggccaactccatccatgtgcgtattttgaacactaaaaacgcctcctgttacccctaagaccttgtttggataacatttttctattataagtactcgaaaccaaccccatttaagatgtttacccttattcttgagtccttgatggtttgggaaatttatcattattcatattgcacaatcctgtcactgtcttttccattaggcacagtgcctaaggtccacaatatttttagaggcccacaaaaaatattttaatttcttttcaaatcagaaggaaaaaaaatttaggtttaagaaagtattttaatatatattaatatatttgtttttgtgctaatacaatcttaaaatgtatgtatatatgtgtgtgtgtatatgtatatatattttaatggagtaaggggctcaacgaaggcaaaaaggcctagagcccaagaaaaacatgatgtggccctgttgcctggggttgaaaaatcccattccatgagaagaatttagttttaagaatattacataaaatgctcatttctgtggccttgctataatagaaagatggagattcagagtagtgataatggctaacatccacctgatacacaccatgtgtccattacctcttaatcctcacagcacacctgtgaaataggtactattctcacacttagggggtaatgcaggttttgtggggcctgcaatttatgcaatttgggtggtcctcttaaagaaaaagcaaatactgtgtattagtccgttctcacactgctataaagaactgcgcgagactgggtaatttataaaggaaagaggtttaattgactcacagttccacatggctggggagacctcaggaaacttaacaatcgtggtggaaggagaagcaagtaccttcttcacaaggaagcggaaagaattgtgagcggaggaacttgccaaacacaaaaccgtcagatcgcgtgagaattcagttactatcacgagaacaacacgggaaaactgtccccataatcaagtcatttctctccctaacaagtgaggattacaattcaagatgaggtttgggtaggaacacaaagcctgaccctatcccacagcatgtccaggctgccctagcaccacccaatagaagggaaaatggcagagggaaagtcctagtggaaagagacctcagtctcagctaattgtggtgacaatatattgcttttgcaaattgtacataaacatatgaccaggtgaatgtatcgccaaggctcctgccaaggcctgggatggaggcctagagaagatgcccgaaagtttatgctgtgtgagcttcacagaagacctgccttccatgtatacccattttacaggtgtctgtgcggtgcagaaactgtacaactgtatacagtgaccatttctactctgggtctctaaacaagggctggtatcgttacagagactgaagactgaggaagaccatctctgtaggatgccaaggattgactggagaaagtctggcagaatagaacgtcttgcacaagaggagtggaacagcggtcagagcattacagctgactcatcttgaccagagaaggttacagctggaggccccagagattgcccacttcccccctccatttgacagcaagggaaacaatggccagagaggatctggaactttctctcaatttcagtgaaggccagaggtaaaatcaggattgtctgaagacaagtaaggtcaggtgcatagggttatatgtaggagtatagttaacaggtgtcagaaacttggatttaatttagaggtggttaggacatgcataatatttttcaactatgcgtgaaatctgggattctgcatttatttaaaatataggattgtccattaattctttctcttgagagggcgcttctttcagaaatgatctaggcacttacaaacattttaaaaatatatacacgtgagatcatactttcatagtgatataagcatcattgctcatatccctaatgaacagatggggaaaaggaggtagagacagagagagagacagagagtcagcaactcaccacaagaatctcctggttgcctgtctgggcttctgtcagctccatttagttgaatttctattcaatattattactgaggtcttatacttaagaacatgttctttgggtttcctgcttatctccaagctgaagaatttattttcttctatttgcttttccaatcttcagcttccatgaccttaaaaaaaaaagtacacaaactgagctggtctaagagcagcctgtttgcaacctgatatgagacctggaatgcaaccagataaaccttggtgtagggttctctaaacacattcaacattttttccaagaggcaatcggtttatttcctttgaaatgcttgatgatgaattaacagtacattttcgaaactattgaaagagcagaggtaaaatggtagttatacatgtcggaatgggaaatagagaactatggaatttatcttactttgaagcttaaaccccttttaatattccttgtatttagccacatgtatttttaaggtggaaattagttaatggaatattctcatagtccatactttttattaaggttgatgtttgatgaaccagataatgtctactcactttctgctttaaagtttataattcttgataaaaggaaaagtggtgaattatgtgagccaaccctggaaagtatttccgtattgagttttgtttgtttcaaagaacctactgtacatatgcaaaaaaa

SEQ ID NO: 2210 - DNA, 2328 bp, Homo sapiens
acagtgctctgtgccatccagggaccagccgtgtgctctcgagttactggagcagcgcaagcagctccagtggtctcagctgtggagacagctgtttgcccaccgtctgcgatggcagaaatgtgtggtcccaatttgggccccgagtctgctggagaaaagagaaaggctaagaagcagcctaccttacctgtggctctgggtctgaggatggccaggagaacagagagcaaagcagagccaatgcaagacctctggccctggaagccgaagggtctctcacaggtcaacgcaggatctactccatcatcatcttcactagcacacccagttcgattgaggagccttgacgtgggatattgatgggatattgagagaaaagagaaatggtgaatcaagcactaatctcaaagcttctgcacagaactacttacatgtcacttcctcccatgactattcctaaattcagccaaaaggggacacataatctcttacgggggagggcaccacggggagagaaacccgaatatttggtgaatagtaacacaatctactttgttatagaatctgtcctcaatggtcttacagtctaagagcattacatttagttacggtagtcttaaatatgatactaaatgaattgaatagccagacatctgtgaaagtaaaactgtgataatacaaagtcagtgtgcttttaagtttcaattgcttaaagttatttggaagtaaggatcacatgagttcagagccccaggattcaaaaataactccggaatcttttatcactccccaaaggaaaagcaataataagtaagttaccagacattcatgtaatctctctgaaactgtaagactaacaaaggaaaattttcaaaaggcagaaatactttattatttatttgcaatagaaattattcagccgggcgcggtggctcatgcctgtaatcccagcactttgggaggccgaggcgagtggatcacctgaggtcgggagttcgagaccagcctgaccaacatggagaaaccccgtctctactaaaaatacacaattagctgggcatggtggcacatgcctgcaagcccagctactcaggaggctaaggcaggagcgacagagcgagactccatctcaaaaaaaaaagaaagaaagaaaggaaaaaaagaaaagaaaagaaacaaagaaatttttcagtaaatacatacaacagcattgatggcctggagacataccaccttcagttgtgatcctggcagatgtgatagattctacaaggttggacaggttaaattcttgcaaggaagtcctttctggaacacccaagaattacagaaagtttagctatctttcagatgagatttcattctcagttttacttgttccatgacccttccaaactacacacgggattcttttcattcagttgccttggccagcattttatcaccaatagtcctattttatgtaactgagtttgccttgccctttactgcatttaggtaaatggaatggtgttttttagacttccgaaactatttgtagaccttttccttcacaagtttgaaatagatgtgaggcattcattttactcagacaacattgagcccaattcacttgggaaaatgcatcttgatgtgtaattcatcatccagagcctgtccactattctgttcctccctgagagtaaattaggcactttgaaaggtgcattaaactcttcctggctactaggtaccatttagaactgtggggcaataatttacttcatggtaccttggtgacctcaaaaagtttatattgttttgaaagttcttaattttctcccactaaataatttatgcattcagaggttgggtgtgcttatgtttccagagagacaacagctattgaatagcataaataagataaaatagtcatgctagtgtagaaattaaatgttcacaaatgtgttatcgagtctatccatagaataaaagtgtagcttataaaacaattattgctttggatttcatgttttaaatttacaagactgtgttacattttgttgtaattagtaatgcttcatagctacaaggattaccagatccatatcactgcatttttccatagcacaaaacacatttatccaaagtaaaaatagtgtgctaaacatactgaagtttctgacagacacttatatttctcttcattctttcattcacagcagagtttcatccatattaaataaattggttaagttttgatacctcctactttaatcactcatcttatgtactaaaatgaaccaaattaagtttgagccaacaaataaaagtgatatgctttga

SEQ ID NO: 2211 - DNA, 1080 bp, Homo sapiens
cccatctcggcctctgaatagctgggactacaggcatgcaccaccatacccggctaatttttggggttttttttgagacggagtctcactctttcgcctaggctggagtgcagtggcacaatcttggctcactgcaacctctgcctcccaggttcaagcaactcttctgcctcagcttcccgagtagctgggactacaggcgcacgccaccacacctggctaatttttgtattttttagtagagacagggtttcaccatattggccaggctggtctcgaactcctgaccttgtgatccgcccacctcagcctcccaaagtgctgggattatagacgtgagccaccgtgcccggcctaatttttgtattttttaaagtagagtcagagtttcgccacattggccaggctggtctcaaactcctgacctcaagtgatgcgcccacctcagcctcctaaagtgctgggattacaggcatgagccactgcgcctggcctagatattcatttctacaactcactgagcacccaccccgattcgggactcggtactgggtatccagggatgcgtatgaccagctctgccctcaatagcggctcaacacagggagaccttcaggttcttggataaacaagctctgacgatcattcccaaacaagagttcaaaaatgttttccgcaatagcaatgatatggacggaaaggatgccctcctgcactgatgcctctggaggaccacactttccattcagagacacgctcagcactcaactcatgctgcacacccggccgaccccagtaccgacactcacagaatgcaggttggagagagatgccgacttccgaggaggtgtcttcttcggactgaacgtattcccaaagaaaggcatctttggcctgatgaaagcaaagccagtgctcccttctcctagggtcagaaaaagtcaggggtacaagcagctggatcactgaccttatgccattgtcttcaaatcttgaagacatacattttatcatgtggctactaacgatcctggtgctatggtttgaatgtccccaccaaaactcatgttgaaattgaat

SEQ ID NO: 2212 - DNA, 16455 bp, Homo sapiens
cagaaagtcaggcagccacattcctttctgcatgaggataacattttatagtcagccagatcagagttcttctcctcttttttgccttctcttttcattcttgattagagactacattagagactactcctaattagaaacttgtatgttttagtagaaaccatgccagatgtgtgatgcagttcagtggaatgttagagagcaactgatggtggcactttgaattgggattgtaagcgtgacagatgggggctgaggcaagaagagcctagaagcatgagtcagtgaaagaagagcaaggacaaaaacccagtcttcagagaaatcagctgactgaaccgagaccaaatagcagcctccagtccatgattcaaggagagggcaagactatattggctggcactgatgccttgttgggttgaaggagagacccaggtattcaagggcactacacagaaggagacaagaagatgaaaggaactcttaaatttattgagcatctaatattctatttaattcttgcagcaatcctgggagcacccttaacacaaatgtttaatgttttggtcaagatcaggaatttaacagacggaggatttagatttgtctgtctctaaaatccatgttcttttttaaatgccattttgagaattctcagagattgttgcccaatactcttccataaattgaggaataaagaagactaagatattccccaaacttgatgacttgccccatgagaactatcgatttaagtcccacaagcctctgtgttagttcacagagggaagaggaagcctatgggtagatagggagatgcccaggggagaatgaaggatggttctgctccattgtccagaatctcagtttgctttgttccagattaactccaggtggcctgatactgtgtactgatgaccacagcaaccttccaaaggatccacaggagcctaatagccttcaaaggaagcatcacaatatagcatgagaatatgcccaatgttgaaactgatcaggaaaaagcaagtgaaattaatcattatatacttaaaaaaaaatgaaactaagtaaatatccattcacaaaggaggagttaaacaaatcacagggcatttttccctttacaaagccaattaaaaaggtggttgaattaattatacttccatggatggatatccaggatgtattgagtgcaaaaagcaagttaataagaacaacaaaaatgatatacctatgtgctcatatacctctgtgtgacacagagaaaggccaggaagaacatgtatcctttaatggttattttgggggaagagaaggtggaatggggaaggagtagagcagtgacttttgctcttcatgcatttctgcatggtttgaattttgggaagaaaactgagcatttattactgttataatataaaataaacccaacacaaaagtgaatagtcagtagaatacaactatctttctgagccagaggcagagaatgatgacttaaggtcatggatgattctgtatcagcatctaattcagaaatacagacgcatgctgaaatctgctccagttaggagatccaaaaaaatctgctccaggagaaaaaacaaacaaccccatcaaaaagtgggtgatgcatatgaacaggcacttctcaaaagaagacatttatgcagccaacaaacatgaaaaaaggctcatcatcaccggtcattagagaaatgcaaatcaaaaccacgatgagacaccatctcacaccagttagaatggcgatcattaaaaagtcaggaaacaacagatgctagagaggatgtggagaaataggaacactattacactgttggtgggagtgaaaattagttcaagcattgtggaagacagtgtggtgattcctcaaggatctagaaccagaaatactatttgacccagcaatcccattactgggtatatacccaaaggattataaatcattctactataaagaaacatgcacatgtatgtttgttgcagcactattcacaatagcgaagacttggaaccaacccaaatgcccatcaatgatagactggataaagaaaatgtggtacatatataccatggaatattatgcagtcataaagaagaatgagttagtgtcctttgcagggacatggatgaagctggaaaccatcattctcagcaaactaatacaggaacagaaaaccaaacactgcatgttctcactcataagtgggaggtgaaaaatgagaacacatggacacagggaggggaacattacacactggggcctgtcagggggtggggggcaaggggagggatagcattaggagaaatacctaatgtagatgatgggttgatgggtgcagcaaaccaccatggcacgtgtatacctatgtaacaaacctgcatgttctgaacatgtatcctagaacttaaagtatcatttaaaaaaaaaaaagagacataaatgaatgtatgtaagatatacattggttcatcccataaaggcatgacatctcaaagtagtgatgtggggggcttccaccttatagatggatttaaagatttcctgaattataattggttgaaagggttaaactccacctgaaggagtgaagttagcagaaagaaatgtttattgttaagataagggggcttgtggaagccaggggtcttgttgtgtagatgaagcctccaggtagcaggcattagatagaataaatgataaatgtctcttatcagactctaaaaggtgctccagactcttaattaaatctctcctggacgaggaaaagaccaggaaaacgaatctgatttttctacagaatgtagattttccctacaagagacagctttgtgaggccatatcaaaatatgtcataaaatatatctctgcctgtaacttctgtccccctaaaatgtttaaaaaaaaatgtaacccaactaccttgggcacatgttctcagggtctcctggggctatatcatgggtcatggatcttacatttatctcagaataaatctcttcaaatatttaaaaaaaaaaaaaaaagaaaagaaaagaaaaaaaacctgctccaggcagaactgcagccagtagaacaggaatccatttttttctgcattccagtgtacttcagccagtgttcttagtggcattatctattactcagcaattcctttaactctgaacctcaggttgacctcttgtttttcccctgaaacaatttttaaatgcttttttgttcccatcaatttacattttaatgtttactgggttcatgacactgttagattctttgtaataggtgctaaaatgtatgtaaaatttcttcaatttttttcaaagataaatacaaggcaatgcctcttagaaggttataatcaaaccagatgtcattggcatgtagtatatgcatgtaatgaaattcagaaaatactgtaaaaacattaattttcccccaattttatatatagttgattttctttcatttatttttgaagaaaaataagggttaggaggaagatatggaagagatcagagaggtaaacagaagagagaaaagtaagcaggaggattatgaaaaatggtaagagattgagagatgagatagcatcagtgaaattttgtctggacctacacaccctttcaagctcatgagtggtgccacaatgcaactggcatcctgtgaaagcaagccttgaactctactgcataactctctgtatgggtcctgaaccactttatctaacctctttcctgttctgcaacttggtttgcttcaatccctcatgcttctgatcactagatttactttcctatttttagcctaacctcatatcttggaattgacatgtggtgtttatgacatctactctcatccttaactagggttcagagttctcctgtgtggtaggcagaataatcaccctccccttcaagatgtccatgttctcatccctggaacctgtgaatatgttgcttacattcaaagaggaattaaggttgcagatggaattaaggttgtcaattagctgaccttacaatggggagattatgcttgattatcttgatggtcccggtatagtcacagggatccttaccagtggaatagtgaggcacaggaggagctcagagggatgcgatgtgagagggacttgccttgcctttgtgactttgtagatggaggaagaaggtcacaagccaacaagtgtagacagcctctagaacttggaaggcaaggaaatgtcctacctagaccccacagaaaggaatgcatgcggccttgccggtgccttgattttagcctagtgagacatataccagatttttaactaaaagaggactataaaataataaatctgtatggtttttagccaccaaatttgtggcaatttgctatagcagcaataggaaactaatacaccctgactactttaaagctgttctcctggtctgtcctaaagccctttccaccctttaacttcatggagtcttctatgggcactaaaaaggaggttctgaatgtggccaggaaatggactgccttgttcagagacaagttgacctactcatgtgtttctccttccatcccaactatactttcactctttcagcaaagagcttcttctcagcactgtcccaagatttggaaacagagtgaatggggatacatgataacgggcatgtatttgagatatgattggttttagggcagtttcagaactggatgactgatcccatataagttcaatggaaacagcttagcaaaagctcatgattatttatggccagtggaagttagattgctgttctgtgctgacagtcaagtagaactatgctaggtttgggctaatagatacctgtgtaaatgacattggggattcactgtccacgctctaaatgtgaatgaagtcataagcaatgggattggggagtgggagaaggcatgctcctctgggggcgtggtcacacatggtcttcaggtgggcgtgtggaaagccctcccagattctgatagagaaacaaacattgactgtataagataccagtcctggtagattagtcattcacaaacttctgaatacatgaaagtcacctggagactttgttaaaagatgtagatttctagctctgttcctactaattcagatttagtaagcctaggatgtatttttgacatgtatccaagtgattcttatgcagacagtcagtgcagctcacaatgagcacggcattgaagaacactgtgtgggagagagataccattcaaatagtctagtgctttgacttaaggaggaatctgtaatttcccagtttgttttctgctttgatcctcttcacatgtgtatactctttcagcattttctcattacataagaatttgcaagcgatgggagccaggagtgggagagggcatgctcctaagggggcgtggtcacacatcagggtcttcaggtgggcatgtggaaggcccgcccagattctgatactattcctctatttcctactccactcaccaataggtaattcttagctccaagaaacacagatgtcccttagtggggcatttctgggtgtgaggagacactcgcaaacactcaaggcaccgtgggacttgcgctgtaggtgagtagcagacaagacctttcacttggaaatgttcctttccttccaaggtagggagaaatgatctgatctcttctccgagaggatttactctccaaagtcaagtcttcctttgatctgggtgggtgggaggtgggggtcctgcctacggttgcgcaggttgagcgtgaattcccaaagggtaagtgtaggtggagtcctgttcaggtcctactcagcaagctggatgctggagcaagggcaagggtctggctagaggaaaagctgccctttaaaagtccacacgaggtctctgctggttgtgaccctgccaggtggcaacctcaagggtttctcagtcttaactctccccttgaattcagtaatttcaggactggggtgataggaaaatgaaaatagaatgaaattcaggaagaattctgtttactgcgacattttccaacagttggaagtctccgctttcctgacaatatttgggtttattaaaagacccacctgtatgactttaggtggcactcactcatttacccactggaaaaacaaatttttttttttgtcaaatgcgactgagtgtcgcattatgctcttgtgtcttgtcaatcctcctatttgccaatttccagcttatcagctagacttgcttaatgcctgaggccaaggtactgcagtatctcttaattaactagttgcagacagctaattacttaactgcagtatctcatcagtatacaaagtatattgactccaaattggaaaaatgcctctgagcatttttaaagtattacaaaacttctactagaaaaggcatcttttaaaataccacccatggaagagcgtagacaaagggaggataagagagaagtgtggaggaaacacacttgaaagagtagtttcatttttcatctcaatcccttaccctctatatttcctatgtcaaaatgatggctttagagattctgtagaagtactcgcctcttcacaacctactccactctcctggagatgaccataacccctgaaatgctgcgccccaccctttctgagcaggttcccatcctgaacttctgactgcagtaaaatttagagagttgcctgctgcccagtctacaggccactgaagatgcaggaaacgtttctgatgaatgttttcaggacttggctcccaagcacttgctgaccagcctctttggtccagatccagccttgcctccaaccttgctggctggagtatctgtggcttcttgtaaaaggccggacatactctccttattaaagtgagattaacaggtgctaaggagggtattacagatcattagctacctaatcattaaagttctaactgaggagttctcccaagtagaccatttactgttctctcactagatggccaggcctgcgctgggcacttcatacagaatcaaactcagtctctacacactatgagctagagattattcttgatttttatttgataaactcgaagtgcagagaattggaataatttgtctaaagccacacatataattagaaaaaaaaacaatgcaagggaaaaaaagtgctttagaggaaaggagctagtgaaacacatcatattgagagtaaatgctcatttgggatgagtagatttttcttttggactcctctgccggttcagcagatcagtgctgcagtaatagttactgggttcagaaatgatttcactttgttggtctcattttattcttcgattctttacagctgaagcctgtcttcgccaaaatggagatctaagacatatgttatttccacttttcctctgtcagtttaatatatatagtgaccattttttttccttgagaagtacatatcctgtgcattggtgtggaggaaaagaaaatgccagtatgtcaccaaaagattagcagttccacaaccttggctgcacattagaatcacatagagagattcgggaagtccctatgcccaggccacactcccaacctgctaaattagcctctgtgtgtgtggcttcctgatatttctagcagtgcttctctaactttacatgaacacaaagcacctaggggttttaaaatgcagagtctggttcagtaggcctgtgtgggtgctgagaccctgcatttctaacaagctcccagttgaggccactgtttctgggcatctccacgttggggttaggctctaaattagtcattttcaaaatatggtccctgtatctgtggcatcagcatcaccagggatcttgttagaaatggaaaggtttgggcccctcccagacctagtgaatcactaactctggaggtgcagcccagcaatctggtttaacaaacctccaggtgattctgacgtacactaaagtttgagaaccactgctggggaatcatttgtagtttactccaggtttaggcttttgggaggcaagagagtttatccacagtttatccaaaacaatggagaaggcttattacaaggatacttgtggaaatgagattaggcttcataggaacccaaggaacagttgcacaaccaggacatatgtgacaaaccactcacagcaaggcatcctagaaattgggatgtgtccgggagcatctggagtgaccacccaggctgactcattgcttgcccagctgttaagagttcactgtttcttcctatagtgccttctcttatcatgactcagcaattcttccccatctctgctcccagcatagtggcttagttggagtcctggaatgagattacttgagttagaattctggcttattatgtgtactatcaggcactttacctaatctctcttggcttcagtttccacatactaatgctacctacctcatagacttgttgtaggatcaaatgagataatgggtgtaacatgtttaaagcattgctcgggacccagtaactgttcaaaatatcaagctgtcattattgtctttttgtgtctttatgcttctagttatatctaccattaactcactctcaatctgagttcaaatgtttgcaaaagaggcacagattgctggagtgagtcactgtcacggttattggtccaatctctcccaccaagcatctgtggacatcctgtctttttgctgtctggggttagatgccctcctctggtctctagtacttcacgtacttgagaagatccattcacgttaggactaaaagaaggaagaaagcacatgtgatgttgcgtcagtccaaggcagtgtgcccttcagggtgccttattcccttcgcttggcccaaccagtttcaccatctgctgatgaccttttgtgtctgactccacaatttagaaacctattattacatgaatctatcagattataacttggcacatgggttacaggagtggggactctgctgcactatcacttctgccttctcctctggaaccacgtgatcaccaaactagtgaatttaaataaaagggagaggtgctgctcatcaatagaggcaaagaggatgccaatctaggaataaacactacacatttaaaaagccatgcccttcccaccctccccagaactttaaaaagaaatatctttgtcattgtttaggcttgaagaaaacaggagctgctatcagtcatttagaaacactttccagctgggttcctacaacaaaactgctgggttaattcactaagatgtgtggactttgtagctcacaaatattaagagcagttttgtaatgaatcctccacggacaagacagtccttatttgactagatgggaactactagctctttccctgtctactgacctctgagtgatgagataaaaccatgcaaagtgtgagatgcttccctttatagttttgaatttgcatggtagcatttcgttcttgatcaggtagaatatctctgctgtctttactttctccttgtaggaaagcagacagaaagaatagtttgggctgagcatggtgactcacgcctgtaatcccagcactttgggagactgaggtgggaggatcatttgagcccaggagtttgagaccaacccaagcaactcactctcaatccttgtctctaccaccaccaccaccaccaccaccaccaccatcaacaacaacaacaacaccatctaaaacaaaacaaaacaaaattagctgagtgtagtggtgcatgcctgtagtcccagctacttgggaggctgaagtgggaggattgcttgagcccaggaggttgaggagtaagctgagatcatgccactgcactccagcctgggtgatggagtgagaccctgtctcaaaaaataaaatagtttaatgattataatgaaaagtctcataatgatctgaggacacagcattggttcctatcccttccgtctgtctcctgcacttattagtttccttatcatagggttttcaatgtgaaagagataatctcgtttaatgtctgaatttgagtaatccagggtacatacaaatctcttttaaagaaaataaattcttgcagatcttcagcatacctttattactttttattataaaatttctgaaatatgtaaaaatataaaactacatgtgtgctatacaatcataaaaacgaaaacaaatttgcaaattaaatataagctgggcatggtggcttacgcctataatcctagcactttgggaagccgaggtaggtgcatcccttgaacttaggagcttgagacaagcttgggaaacataatgagaccttatctttacaaaaaatcaaaaaattagctgggcatggtggcgtaccctatagtcccagctactctggaagctgaggtgggaggttggattgagcccaggaggaggaggttgtagtgggccgatatcgtgccactgcactcccacctgggtgacagactgagaccctgtctcaaaaaaaaaaaaaaaaaaaactatctatagatatagatatatgtatgtatatataaacaaagtgacaaccaatacaattcaaattcatgacagtttaaaaagcagatactggctgaacttaaattgtcaatgctaggtgtattaatagaaagatgagttggcataattatttttactcatgacaatcttaattattgctaatcattatttaaattgtaattgttattattattttgctattttaattataaagtcattttaaaatactgaagattgctcaatttagaatgcacgctccccatactgagaaataataagtataatttaacaaaagagtatttattgcatctttatcagcaacatatgcatggcacttagcaaaggtacaggtccttggatgtttgagttttcaacactgtcatgagccatataatgattcaattttcccatcacttgtctatgtccaaattgcctcaaaagtcttgcacgatgagtggtaacagcatttgccctccgtttggtgtacacctgattgtgaacacaaatacataggcagctattagaatctcatgttcatccagatgacacacctgtgttgcattaatatttatattatgaaaatgaaaacacaaggttacattctcacggaccttttgaattttgaggaaaatctgaggactctcagaggacctagggctccaaattaagaaaccttggttgaggccgggcgcggtggctcacgcctgtaatcccagcactttgggaggccgaggcgggcggatcacgaggtcaggagatcgagaccatcccggctaaaacggtgaaaccccgtctctactaaaaatacaaaaaattagccgggcgtagtggcgggcgcctgtagtcccagctacttgggaggctgaggcaggagaatggcgtgaacccgggaggcggagcttgcagtgagccgagatcccgccactgcactccagcctgggcgacagagcgagactccgtctcaaaaaaaaaaaaaaaaaaaaaaaaagaaaccttggttgaattatcacctaagtttcagccccatttaattctcacagaaaccctatgacatagacacgcgcatcaacccaactccaccaatgaggactctggggcacacagaggttaaacaacttgtccagcaccacacaggcagtgagagaggaatgacgatttcatcccaagcccatctgtctccaaagcctctcttttgagaactctcaatacccctactctagaaaatctgtccagaatcccgacggaagtgcataggagtgatcactgggcagacagggacacatgcctagcctctttgcagttactggaaaaagttaatcataagctgaactaatgcagtgcctgttttgtgggacaaagatctcaattgtaatgacaactgatttaccccacatgtactttgtctcagaatcagcctcaaagccttcaggcctcatctggacatttgaggcccttacctgaagccagtgatgagctatattgttggatgaaaattgctttttgtgccttgaagtctggcagcttgttcattcatttattcattaactaattgtacagaatagtgggctacccttccaggtattctatcggtataagaaagcaactcacaggtcctgtctctctcatttacagacctagaatattgcctctggttcccttgctattgggcatgagtgcctccttccctccctctcagaagaaggcatgaatttgctgtagggtggtgaaaaaatattaactaatctaggcatcagaaactgggtggaagtcctgcttctgctcctaaaagctctgtgacctcgaacaaatcatttatctcatctgatcacaattttcccacctttaaaataagaatattgataatgaatttattgtgaggggtctataagaccatgtgtatgacaacactagggattttgaaaattttcaacagtagaacaggttattattttttatgtcccccaaacacttactgtgtacttattaaatgtcagtatctgtgttggcactgaaaatacaaagattagacatgatccctgatcttaatgagcttgtagtctagtaagggagattagtgtttagataagaacattgtgatgtagtaagatggataattgtagaattatgtgcaatgaaatagaggcagtactcaaagcgacttgagtaggacagtttaagctacatagagcagagacatgaacttagcttctaactaccattacaagtcatagaaacacccagaagcatggtgtgtttgggaattaagatcactgaggtggggcaggatgtgaggtaagtatccctatgtcacagaggaccaaggctccagacttgttctacttttgctgtaccatgattagataccgttgtaatgctcacccatgctatttcctttctacccagaactgtagaaagtaattgttttgtgccagtttagaatgcacttggaggatgaaaaacatcattctccacttaattggcttttgttgctatttttgcattatggttgcaggaccagctctgagaattttagagccacctcaacagggtgttccatcttgttctttttgataggtctcctttccttttggcaggctgttaatttcctctcaatatataatttggcctctgcattgttgctcttttgatggcctatttaggcccccagaactagaatacacttggccaaatgcattataaacaaaggagattttacctctgtagttctttaggaaacaggtagaatttccattccttctatgaagttgatgcctggagcactgagtgaattaacttgtctttttgccttattgaattgatcagaatatttggcatctttcatcttcaacccttgtcgtcattattgccttgtgacttttgtgaagaatgtggtttctatcacataattctataaattcaatcaaaccatgactcagaaagtgttgatatcttctgaatgacattttcaacaaatgccccaaacagtatggattgaacagcatcatccattgaactaatgaaagctggagcctgtattatcctcagtccactgccttaaacctcagggaacaattaaatacctgtgtattggaggcaatgaaaagagaaagtgagtatcataagtctgtgggcccttttgatttggtttgactgcgacgtgatttcacagcctacatcacagccacaggcccttcttataaataactttttcagtctgaatttgaaaatgtgcaggtagtttttagaaagtctggtctggatcagaggtctccaacatgggatgatcacacccacaagacaatccattgccacactggaagaatatattataactaagtatatatatagtatgcataaaatattagaactaatataaaatacagtacttaaatataaaattagttatcatatattagaactaatataaaaaaggatgaatcagagctttatgcaatgaagaaattggtagtgccctcagatggtgtagatttcagatggtcaaggtgccatgagggaggggtggtgccgcacaacagtgctgtcattcatcctttcctttcagcatcttatgacggtttgcagtttatatatataagcatgggaaatgggcaacagtcttaaaagatttatgtattgaaatcatgtgataaaggtaatgcaaggtcaatggcagaggtgatcacatctgacaagaaattgacccataacttcaacattataaacaaaactatttgaaatatggattttcttatgagctgaattgtgtctctaccccacccaattcatattttgaaatcctaaccctccagtatctcagaatgtgacattttttagagataaggtttttacagaggtaattaagttaaaatgagatcattagggtgggctctaccaatatgactggtgtccttataaaagaggaaatttggacacagagatatgaatagaggcaagaacatgggaagacccagggagaagaaaaacatccacaagccaagaagagagacctggaacagatccttccctcgcaggaacagctcacaataaaccgatgccaacactttgattgatcttggacttcccgcctctagaacagtgagaaaagaaatttctgctgtttaagctacccaatcttagctctttattaaggcagccgtaacaaactaatatagattcacatccagtctcattagccatgtgccttagtcattgtatattatgccttgagttattaattaatgatagtgtgaagccattatgactagaaagacatttgaaactatgctttcagaacatgaagacaaaccaagactttacaaaaaatgaaatatattcaattcactgctgccactgaaaatattaccatcaataataagatctctaagaggagaagaaaggattttttgtgccattaaaaaataaaaattttaaaatagtgacatttattttaatttggctcctaaaattattttatttctactttgctatatagataatatgatatctatacagtagtacatgtatataatttacaaataaatatacataaatatgatcaaatggtaaaatgtgttttattgatgaggtatgtaattaaaaatgtttagggaccactggccatgataatgtggcttagattcctcctttctaaacctagctattttaggttcttcagatataggacatgttagggtaatttatcaaggaaatagaagttctgaactaaccaaagtttcactataagaggaaaggatttatgaattggatgactcatattctcctatgaagatttaaataaaaatgttttctttataggtatcaggttttaaagatagtttctaaaatgatttaaatgaagctgtttttagaaagtaagttttgtttattttttaaacatttgacttccattcaatactattggtaaaattcccacagtggcaagaaagtcaggcacagccctccaaagtagtgaagggtacttaacaacccatttatttggaagtatttttggtattttgtatagaataaaatcaggaagctcagcagctacctctggagaatgcagtttgattcagtcaaagcatcagtgtgtggaactgggtaaggagagaatttcacacacatcacacacactcatatacacatattaatacatatacacacatgcacaaatatacacttacacatacacacagacttacatactcacaaatagacacacacatacacacaccagcatttatgtatcctagggtaaagactttttaccagagacaaagctactaacttccatggtagaagaatatataaggctgggtgccatggctcatgcctgtaatccgagcactttgggaggccaaggtgggagaattgcttgagttctggagttagagaccagcctggacaatatagggagaccctatctctacaaaaaatttttaaaaattagccaagtgtggtggcaccacctgtagttccagttacttgagaaactgagattggagaattgcttgagtccaggaggtacaggtaagaccgtgttggctgtgattgtgccactgcaatccagcctggccaacagagcaagactctctctctctctctttttctctcattgtggaatgattattaaatgatgattactctatatagtactatatatatatagtcatatatatatattcatatatatatagtcatatatatatatacacacacacacacatatatataaagtcagaaaactccacagacattagacctcataaggcaagtcactctgtgcttacacatcccaaatgttttgttcttcggagcctttttaagaatggaaggaaaataaaaaatgcaagaactttttatgattatttattgtgccactgctaatttgaagcctgccactcataacaaggggaatg

SEQ ID NO: 2213 - DNA, 1373 bp, Homo sapiens
ccgcctcaaataaataggtaaataaataaataaataaataaaagtaaataaataaataaataaataataatacctagcttatggggctgctgtgggtgtttgtaaagtatctcaatggtgcctacatattgtaaaggcttatgaatatattagttcctttctcaacttcctcaattcattccaccactacaagtcaatctagagattaaaataggcaaaactgtgatctacgttaggatggggttgtttgagtggtggtttatttctgactgcttcattttatacttgtattttaaatatacaagtttttgtaaacattcctaaaacaaaacagatctgtttttattttgaagaagatcggacagattctgatataatgtttggagaactaaattatacacagaattttgtctctgaagagttaactctatcatgaaaatgcactcagtgaaaagcaaacatcatgccacctttccatacacggtattatgtgtatttgaatgaacgcatatggaaaaacatggcaattcttcttttatgcctaaatcctatggaatttgccggctcctgtatttaagtctgggctgtgatggtaaacttggttcctgtcaactgagtgttgttatgtctttggcacattcccacagccgaacctcccgtctgtaacctgcacctgcagttcacaggattcagctcggagagctctgtacttccgggccactcagtggtttgagatatgtcttcttcgtgatgcttgtgtgagagtaaaggaggactccaaacaaacaaatgcaggtagcccagggtggaaagggcagtagaaggggtgtgtacctgccacacttagggcagccaatccagaaaggcttcattgaggaggtgttttgcaaataacgagataaacaggaagtgaggaggaagtggtggtgacgggatcctgtggaactagtttgggcaaagggaaaaagcatatgaaaactaataataataagagtgactagcacttgttgagagtttattacaggcagctgctctgctaactattttacatagatgatctcattaaattctcacaacaaaaaaactttgggtccaatttcatccccattttaatccagagaaaatcaaggcagagcaaggctatgctacttaccctcagttgcacagctagtaagtggtagaagcaggatttgaatctcagagtccagtctcttaacctgtttttgcagaaaggatctgctctgtttgggccctattaaggagcttggtaaacttagagcctagcctgcttcctaggtgggagattgttggatttttacctgggaagtgatatatttcctaatcacaagcctgatcagaattttgcaactggg

SEQ ID NO: 2214 - DNA, 8836 bp, Homo sapiens
ttagaataacagaatttggtcccctcccacttccgtaagttgaattcttaattgctaaatttcaggcttttttgttgttgtttatgtaagaatttcaaggccacaactccatatttgaagtaaagtgctcataaaattaattgcaaggaaatccatcactatgattcagtaagtaaacaaattcaaggtgtcacatcatattgctttttatgcttttgattttagtaatatcctttcacattcataatccagatagagagataagcaagattgtatccaccaagcctcctctttattgatcttccaaactgaaaaacatagctgccattttagtcagcagttaaactttattatagaatatttttataccttttctgctaacattacctgcaactcccatggtgatgctcaaatcccatttgggaattcagtgaactagcagaatgaaattctaagagactggggcttgttgatgtgtccacgctttccatgggaactgatgttaaatatttcacaaataccataacttccaggaattcacatattctttattgaatgtagaattgtgaaatctttaagaaataactgaatcattatttcttcactgtctcctgcctgtgaaagcagaactatgaaatagctcaagggaatcagtgagagatttgtatccattatattcagtagcctgcatgtgtccaaatcacaaatgaaatgatgtgggcaaatataaattaaaattgaatgttgcagaagtggttgaggaacttcaccaggatacattaatgtacaaactgaaaactgatgaaagacttctgaagagagatttgctaggaaaaataaaaagatatataaatttcagtgatgctgaaggagaggaaggatgtgatgtctttccccatccgtcataagggtcatggccaacactcctataacaaaaggtaggctaacgagaaaaaagcatgacaaatatttaatcatgcttttacgtgacagagaagccttctgaaagaaggctcaaagaaccagggaaaactatccatctttatgcttagattcaatggagtggacagttgtgtagaaatgtgatcggacaaaggaagaattatctaatagtaatggactgcgtgtggaaacccataagaactgtctattctgattcttcttggcctctctgtgtggcatttcttcctcctgggtatggggcatgactccttctggaattagggtttgatgacctactatcaaataaggggaggtcagagaatgtctttatggccagctcctagatagaaaggcaggacaaggttagactaatcattctagcttttatttttggctttgaggaaaagcagatatggtttgtatgacccaccttagggaagaggaattccagtttttatggttcaccttgagggagaatgaggggcaaaagacatctgaatccttcacttcagggtatcattttctgaggctcaatatggacaagtatttataactaggtgcttaatatggccttttgagatacacagttcctatgctgcaatctcacaggcaatgaatggtctttataaaagtgtgttaaagttgaaaaaaaagcaacaaaacaaacaaaaacctgaagaaatattcctcattgaaggtccagcttacattaaaaagaaaactataataatttattctcttgagaagggttgtatagcaaaggaaaattcttgaatgttccctctgcttgccccatgcatcaattctattgatattaaagtaggcctagcaaatgtacttccattctcactgactcagtctttgtaattcaacaccaattctgaaaaatacttagaaattatttcagtaaacagctcttataagtgctacatgcataacaatatttcaatatcagagacttctatcccatgagaagatattttcaacctaaaatttattataaatgacctaacaaagaactattttttcagtaattggctattatggttcaatctgttatacccactttacactagaaactatcctatattttcttgttgcctacgtaaaagtgggcacgaaaaggttaaacagtaaacttcctgactcctgccagccaagggaagactactggtgttacctacgaagtgtcatggcattctcatttctgaataatgagggaaatctgctttcaatacaaacccccataagacagtcactcttccagacaaattaagctaaataatccatcatgacagctgagaagacaatgtgcaaaatgtcagtggaggccagggagagaaaggcagagatggactgtaagagctgcagcatgatgcaaatactgagaaaagacattctctgttaatacagctcttaattgtaggcattttttacagaacatattgagagtgaagcaaagcttccttagcagtactctgatgtcttctcagcaggataatgtagggtaattcacagtgaaggcaaggggttaggaaagtcacagccctaaaaatcaatgggctgcttacagggaagaaggtgcaacagatcttggagagcacagaaaagaagagatgagcagcctgtattgaacagaaaccaaaatattagttagatatatccagcaaagccattccacaagttcgttagtgagtaggtgccaaaagccaactgtaaatcctagatacttgtacatatgcatgcttatattacttatattttaagcagtcatatcctcaagctatattatgagttcagtcattctaaaaagatgcttccattgtcttcttggcacttactcagaatcttcagttatcttattcatactgtgtgcttactggttgtcttaacaggtgagggcaggggccctgtcttattcacctccatatctccaggatatagaatagtgcttggcacacagcaggaactcaataaatattcatactattttgagtcccttaatcctcatatcaactacaggatttagattttattgttatctccattttacagatgaggaaaatgaggaacagagaaattaagtaatttgcccaagctatgcatgaataagtggcagagtcaggatttgaagccaggcagtcaatccctagaatttacactccaacaactactgcctctagtggttatgtatgtatttatacacgtatatatttgcagaaataattgaaacttatttctgcctaggtgcatgatatattaaagcatcactaaatccttctgaatataattcaaacttcttcctaccatagacaaagtaatggcctatagtgaacataatgattatcccatcatacaccttgtactgtattagttttctttgcaatctcaattacacttgcatttttattatcatggttttataaaactttatgactggaaagtaccgtattcataaagagttgtgcctcatatatgttagacatatatgcatttttattagtaattataacttttatgcagccagatagccccaggtttatgattccacatcttttgtgttgtgtcatcttttgtagctagttgatattgtaatgtttgctgacttaattcattcagttattaatttctataaactagaatttaggggacatttcaatggactatggagagaaaataactgaaaattggaaattaagagcatctgagaaaattcaagttgtttgtacatcctggacataaatctcaggaaaactgacatattttccttccttgtcaagtcatacaaccaatgctatcactaaaactggtctaacatttaaacattcagacaatcagtttagtcaatgcttcaataagtttactgaactagcagtttcttaccaactagttacagaacagtcacagctgaaaatgatctatacattgtattataaatgggattaattattctgccagacaaccccaggtgtgccaaataacccaaccccttcctccaagacactcattgagaaactagacagcatctgagcattgtaggaacaaacactgaagtaaatggattctaaatccctttgagttctaaaatgctgtagagatctgagaagcccacaaccttataacagcaggcaacatagattacgcttaaaaagcaacatactttcaattgattgataaacccttttgttgttcatttattgcaaataggttttagagctcaattcacacttttgtgaataaacattgaaaatatttgattcaatggttatatttctgcctgacatgaggaaattatagaatctattaaccttaacaatttaattagcatgtcccagacttaatcactcactatctgggtagaattggcccaattagttaaccactctaaaccacagtttcctcatctgtaaaatgggatggaaaataataacaactcatagggttgttaagaggaatacataaattattcatgtgccctgtatggcacacaataagtccttattaaatgaaccggttgtagaactgtattaagaacaagtagtagtagcttccatatttagagagccatcaattctgttttccaacagctccattagtgagaattgtgctgtgtgttttccccccaccccgccccactacaactgcattgctatatgcaaggatataacttctgtctctaaaactattcaaatagtgagcctgggaaaaacaaacttaggtcaaaagagtttgactaaactggctgagaacatttaagttggataaaaatagatgtattttgtttgtataaatagattttggtcatgagaaagaaataaagaggttcctctcaaaagaaagcctggtttagcagtcagtaaacattgggaagagtcagcagttgacttccccactgtgtggaagaaactgccaaaagcccatccagaattaggtgtgtgggagggaagaacaaaggagaggcaaacaagaagctgtcactattcaccactttcaccttgaataacctttaattgaaaaataaagttgccaaaacaaggagtaaaagaaaaactaccattttattccctccttgagattgaattagagggaaacatactgaccacagtaatcccaaggttggactcacatgatggcaaatgtcacttagttctaaagctctaattagaaacagggctgaagttttagccagctcctgctactagaaataaaacatgaggcaacagcaacccaagccctggacaccccctgacagtgaactctgaggtgctttctgagtgagttgagtataaagctgacagagcctagagaattcatacttgagcaaatattgggaaagaataaactgggtcagttaccacctgtttctagattttatttttttctagacttcaactaagattgtctttcacattaataagaagaacgatgaacataatctatttcatccaacttctacattccaggcacagtatcaaccactttattacattttatcttctgtaatattcacagtgttattgggtagattaaacaacttgcccaagttcacacaactggtgactggcagaaatgggatttgaacttatttgatgccagaggaggtgtatcctttaatattttagaataacttatttatttcattatattttatgaaccttgaaatatgtttattgtaaaaaaaaaacgcagaaaatacagacaggctaagtaaaatgtgtctttacattaaagtatttaatttgcaaaagaacagttgttattttaaaatcctaccccacagtttttcatatttctctttctatgtagggttaatctcatcaggaatttctcttatccatccacagtttgtaggacaattctttgcacataatgggcactcaaatgtacgcagatcatattagtccaagaaaaagctgcttgttggggctaccaagccagcatggtaacaccttacaatcaccctttctacctgcagtcacattgttcccagagtggggtggtgatacttgccagctagcccaagtttctggatatagacctttaacaacttcacaagtacccttagaaaattcggttaagaccgaacatggacatgcttgctccatttttttccactctcaaaatatccttgagcagtaactcattcatagataagaaaaactttttctcttcagttttttcttttctttttgaatattctttgattttagcagaaataggcacagtaaaagaataaatataagagacgaagaataaaatttatgaaatttagaaagctcatgttagagaattgtactctttaggtagatccttatttaaagaataattagaggaaagaaaacaaaagatgaaagagtacaaatgagattcctgagcagttttttattttgattgataaacttttaaaatgtgtttgaattacaatatttatatatcaggaatatgaaaggtttaatcataaaaattacataatatttcttccaacattttcatcttgtccatttcttcatatctatagtggagaattatccctctgtaggcaagaagaagtctttattctcttcggaagctgctcctcttgcactccaaaatatagttctgatggaagctgccaatcactttatcccattcccagaacaggcatggtaccagactgaggtcaatcctatactccaccttatttgccatggaaaatagcctagcgatacttgcatgactcagggcagttggagtagtttgatggaattttttaaaccacagctgacaggaagtagctctgttccttattagttgcaaatgctgcaagcatatgaccctagagttatctgttgccagttgttgccttgtggagatcataggcttaagatgatgaaggcagcaatcagcaataagcagaggtgtgcttgtgtgtgtgtgtgtgtgtgtgtgtgtgtgtgtgtcagaatgagagagagagaaaaattactgcttctgaaaccaaatccatttccaaggtgtggttttagaagcaaataaattgccaatttcagagctgattcaagttgaatttttgtcctgtaaccaaaagagtcctgactaacagccaaaactcaggctgtcaagtaaacataatctgtaagaatccgctttccagcctccattccccttgacatcttcctgaaagaagatttgtataggaaatgctgacgtctctttggcaactgcataaaaattattgtattcaacaaatttattatatgtctctttgtggccaggcagcttgcttggcactggaaattggctagggagattggggcaagaaaaatacctctctccatggtggaggcatacataaaagccgattgctacacaactgcgtaagaagtgctttaatcaaagcctgaataaagtgttgtggaaactcaaaggagcaagcaaaatgcttcacatgaaagttggacattcgagtcaaagactcacaggattttcccaagcagaaaagaaaggagaggacatcatggacagaggaaatagcatggtgcaaaggcatggtatgaaaaaaatacacgacaaatttgtggaataacagaacttttgatgtgatcacagcataatgtggagttgggtaacagtgagggattaggctaaccagcttggcagaatactgactaaaaattcttaaatgctgtgctaagttgttagaattttatcttacaggttttgagaagccatctgcagctcacaactagatgagtgacacaatcagatgtgcgtatgcaaaaaaaagcctggagacattgaactaagatcaaatttaatgtattaaatatggtagaaagaagagagaatgaaaaataatgttaacaatctaggtgaggaattgctgaggagacaaattaagtaaatcctgtggaaggaaagaagaaaggaggaaagaggattggatggaagaatctccacttctcataggtgtagtccttccttagcctgctttttaatgagtgctgctaaagcccttagcctgcctgtttacccttggagtggagcaatgaactgaagatatttgagtgagttcaagagagactcagaagagaagaattggaggcagcaaacatagacagcacttttaatgcttttctcatatgctgtaagacatgaaagcaatctattgggatgaaagctgaaaggagaagcgggacaagagaagtgaatccgtggaagacccccaaaagaggctgcagattcttagtggacagctctcatatcccctccagggaaaatgatgaaaaatgtcttcagaaaaatagctttatgaaggcaagaggactttttgcacctgcaagacatgtctgaaagctcctcaggtcaaaacacaagtagtcaagagatttgtccatctaattcatcatactactctgatccaagtgagacccacactgggtcagctccatcaaggagaagaacattccacccacgtttggattctggaatatcatccttgcttccatcagattcttgtaagtacctcacttggcacaaggtagacatgacgttcaaggaagtcaactgcgttgcccaagagtaagagaaggaatctctgaagaagagcaacttttcagacaggtagagtgtgccttgctcccaaggaaaagagttcttgaaaaaaacaaatgggaaacatggctacaagaaaactgggaagactgcaagaaaatctcagaatctgcttgagaatccggtccttcttcctccatacacccatggaacactcccaaactctgtatgctgctcactaattctgattaaggtcttcaccctccctaccttggaaattgctacaacataattgtgtttgtatgtataattaatatatacaatacattttaaatgaataactaaagttgacaaaaacctc

SEQ ID NO: 2215 - DNA, 8642 bp, Homo sapiens
tttatgcttactctccttccctctagtttgtgaatagcacaatggaagaagctggactttgtgggttaagagagaaagcagatatgttgtgtaactctgaatcacatgatattcttcaacatcaagactcaaattgcagtgccacaagtaataaacatttattggaagatgaagaaggccgtgactttataacaaagaacaggagttgggtgagcccagtgcactgcacacaagagtcaagaagggagcttcctgagcaagaagtagcccctccgtctggtcagcaagctttacaatgcaacaggaacaaagaaaaagtcttagagagacaaggtctttccctgtcacccaggctggagcgcggtggtacattcatgggtcatggcagccttaaactccctgagctcgtgatcctgtctcttcagactctagagtagctggggctacaggcgtacaccaccacacatggctaattttttatttttcttttgttgtagagatgggctgtcattctcttgcccaggctggtcttggtatactgtcctgtagcagtatattttggctacctgtactggcattggcttttccaagtgtcaagattacaggtgtgagctagtataccctgcccagtgtttctttcttacttggctttggtgtgaatgagaaaagaatttagtactaaaattttatgtgcatacagaagcattatttgaagtcagcctgttttccctcaacctctagtactctgtaaagtataccaaaagtcaaggttttaaagaactgtgttacatattagagagaacaaatcaaaagttacctatctccatcgttaccagtagaacattagtatgtattttgaagcaccatttgactctttctatttcagctacttgcttgtcccttgcaaagttattatagtactcttttaaaacttttcttcaagggaagagctattttgacttccttttctttgatctaaacctaacacccagaatatgcttagcagatcatcccaaaacaatcataacttgtttaaattgttcatagcaaaagttacatattataaagagttatgagtgtcttaggcagtgaatagtaactgaatatccttttatagttgtccttcactagcaggaagccttattccctgcccttttacatatcttaacttagaatgttactgtctaaatagtggttaggcaagagtagttcttaaacgtgcagtaattatcttgcactacatttaagggctaaatagctagtagtggtgcttgataattgaagaaatttgtacagctggaggaagtacctgctaaattttcaaaagttacctgaatttaataggtaaatctgtttttaattagagctatatcattttactctgaatgtcttaacatagaagtttacataaaatttacagattggattgatttcagccttcttctggtactttttaaaatcttattaatcattaggaaaagaagttttattattgatgcaagccctaaacactctttcgactccagaggagaagctggcagctctctgtaagaaatatgctgatcttggaaattcacctcttctatagaagagtttgttttgaactatacgatttgaaacaaaattctttttttggagactatggaaacattctcaacagggaaaccctactagactttgtaaagcaaataatggaaaagatacagaactttttgaagaatcatgggaaatttttataattaaataaatgctaaaattctgttttgtgaaacatttatgggaattatcactgacagtttttgtacactttcaaatagtgttaaagcagcaactccatgttgtaaatgcacaaaacaaatatttagttaataatcaactccaagaataaagctgtaacaataatagttactattctctcatgtggtccatatttacctccacttagctggcatcttcaagtgccacatacttagcagcagcctggcaccttctgatattttgagaagcaggaatccctgagcataaatgtaaatagcttagaactgtccaaaagcaaagacagcagaaaataaaattgttgcttgctatgttcaggaaaggaatgcttccattggatatggaagccagtctcaattgttacatcagcctgaggaaactcatgcgagaaatgccagaaaaagaagacagcaacaaagaagataaaagaaagactgacaaaagcattgaatttctggtagaaaaagcagtgtactagaaggttaggagatttcctagctgtcagccatgaaagggttggggaagaaagagcaatttggttgcatactgtagcatggtcatctagggtggtcctcaaacacatagaaatcacacaagaattgtcaaattgaagatttggatttagtagatctgaaaacgcactttgtaaaattggccacagtagaggtggaagtgactgaaatactgcattatttatttatttaattaatttattttagtcagagtcttgcactgtcgctaaggctggtataccatggttcagtcacagttcactacagtcttgaactcctaggctcaaacaattctcctgtatcggcctcctgagtacctggcactacagacatgcacaagcatgcatggctaattttaaaaaaatttttgtagaaatggagtcatgaactcctgggctcaagtgatcctcccacctcaacttcccagagtgttgagtgagattacagttatgagccaccatccctggccaataaaggtgtttttaatacctataagaatattgcctgcaaggatgtttgataggtttcttgatatttcattctctcttgaaatgtttgcttcgtcaattttttatttttcataaaagctttactcaagaattaggatgaccactatgttatctagtagtataatttggaatcatttattataaatctgaaactgacttgactgatgaatcttgagcactgcttattgtgttctaattttggtagctgtttcaataaagtagctcttgtagaataggaaaactatatcattttagtctgaaataagcttttgattaaaaggttactttttcctattaataaaaaatggagattaagattgcttttcttgctacacaaaattatttacatactttcctgtcactagaaaagaggggaacataaaatgttccatggctgtaattgcagtgcttagagctataactcagattactatacttcctaaatgtaaagtggttattaattttagctggaggaaagcaggaatgttcagaggcaaatgaagattctgcagaataagcaagctcagattgtcaaagagaaagttcacttgcagagtgaatacagcaagaccatcttggcaagaagcaagctagaatctctttgcagggaacttcagcaaaattaatgtcaaaataagacattaaaggttagttggtttattttactgtatttcaggaactacttaggctgcttttataatcgccttgtaactacttgaaataaattcttgctctatgtcttttaatgggaattagttgctataatggcttcttgttaactggctcaggtacacttgtgctggtagatcagattcctaagcagacaactttgtagacatcttaacacagagatcccttgctttttgttttgcttgagctgatgctgcctgtgaggtaactctctaaagactcactctatgtaaattttggtttcagattcaaggataagctctaccttagtctactgtatacttgatcacagggaatctagatgacattggtttttatgttcacagctctcctgcttaaaaagctcacagttgccagatatttttgttggcttttggtgtagttggttatcatgtccttttttggtaatgagtgaaaatcttagctgaaatgaagaaactggtagccatagtcagtgtgagtttgagaaagaaaaacacactgtagagctctactataaaagttaataggatagattgttaaactacattctgccatctttggctatttggttgctaaatactttagaatattacttacagctaggctgattataacagaagaaggattaagtatgacagcttgtctcaataatggaagtaaaaagcagagatcctggaaagaatctgccatccatcagaggaatttgtctgactttgtggtattgctagggggtgtatggttggagtattattttgatggtgctggatcaccctcatcacagtaaactcaagaacataggacagcttgtgaaataggttcttacttgtaaggaggaacatatgcagcagaaaaaagaggaggaagaagttcttaaagaagtaactgcacatttccaaattactttaactgaaactcaagcccagctggaacagcatgaaatacacaatgccaaactgcagcaggagaacatggaaatgggagaaaagctaaagaagctcactgaccagtatgcactgagggaagaggtaaacggcgtttggtttgtttatagacagctgctcaccagtagcaaaagctacaccctaccgtaaagtaaaaactctttcacaggacagtattttagaacttttgtgtatgcacagtggaaattacatgtttattaggaaaagagtagaaacctgtaaacagaatgactaaattggagcatcacttggcccaagtgtcagtggagtaggataagtaaagggatttctaggagatgtgtaccacttgtctcccatatgatgctacaagattgtcaatatagcatacagatatttttctcttatgcagtctaataatacagatttgttccctaaatactctgtatctcagatttctgtgacaatctgaacaatataaataggagaattgtgctatttgtgagaataaggaacctactaattacccatcaccaagtcacattgtttgtgtaatcaatgaagtaaaaagtttgtggaggactcaatagttgtcgaacctagtcattggagttattttataaattgatgtggaagttgtatgatggctaaataaaaaacaaataggtgataacctgcttatttgtttttattttttctttacttttagaggtctatacatagggtaagatttcaattttcaaaggatgcatccccttcctttattatgctttaagctagtaaaatatatatttaaatccttacttagtagattaaaattggaaatagaaagtgacaatttaaaaattaataaaacagtaaatattactttatgcatatcaaaatgttattttgagttacaccttttcatgctacttttgaaaacatttttctttaagattttgagtatcttttaaaccattttcctctatgtttcaagaacatttcaaacttattatggaagctgcaaacttatagtagaatatatcacttggctttagcaattatttacttttgtttctagcaactcttgtttccatctatttttaagcaaatccaagatattatatcattttatttattactattcaaatatgcatcatgaaataagattctttttaagccataatcactgtactatttttactccaaaaggttaaacaattgctatgtaatcacataccttctcactgtactatttaaatatctgttacttcccttttccttcaggttgtttacatcaacatcaaaataaggtttatacattttattgttttaatatgtctcaagtctttttagtatataagcttcccccccctcttttttttccttggaatgtatttattaaagaaattttttaggcctatatagtgaacttttaaaattaaatttgttttatattataaagcatattatgaatatcatcagtttttttaaaagaatcctttaaattccattgttttaaataatggtattaaaaatgattaattttattttattttttattattttactctttaggatttatattattttaactgtattaaactctccaaatttgctatagaagtagcagattgggagaggacatgtgttcaagttgtactacttgtatgtcttgtttagatattacagtctttttcttttatcagaaaataattgaataatgataaaatcagttgcagattaagacagattatctgttgcagtcttctcaaaacttaatttaagtacattattttcagctagcatttcttccttcacatagaacctccatgtgtggagggatttcctaatgagtctattgtatgtacaatagcacttaatgacatagcttttaaataataacaggattttaccaaatgtttaatatgtgccaggcatcaagcaccttacacagtttaattattgcatagatttggacagcaactctgcaagttaggtatggtcatgaacctttgcagataaggaaactgtgtttcacaaggagaagaaattgtcctggatcatacaataagctaggatttgctccagaccatttttttcattttatcaggctacctacaattaaggaatttcagaagattttgtgaacaaaaaatgtccaggaattatgtgtgtaataaatgaatttgatattttgatctccttatccatctttttcttgataaaatatcagcttttttttttccaatgtagggcagaagcaagaagtacagatattttgatggggacagcccacgtctgatagggtgggacatggggcagcagttagagggttgtgctctttctagtgtgggatagtttgcaagatgatatgttgtagccacttctgcagtgacggggacagaaggagtcagtgttcttaactacagtggtagcagcagaaaagaagggtaagcagggttctagaaatttgtgttatgttttctccccactgtatttatttctttggttagtggtgcaagaaattctgttttcctgtagcaaattaataaagcgttcaaacataaggaattacgacaacagcttgtagatgccagacttcaacaaacagcacagctgataaaagaagctgatgaaagacatcagagagagagagagtttgtaagttctacttcttggaaaaaaaaaaaagatcgccaaaattgtaaccaaagccatttaaaacaaactcctcacttaacatagtgccagggcatgcaattttgtttcttactctctggatgtgggatatgcgagtgtgtgtgtgtgtgtgtgtgtgtgtgtattaagctttctgtttctgatgaaattttcatatgaaatttactggagataagattaaattagtggaaaaacaagataattttgctttctatgtagtggtcaccaagttaaagaattgtgccagttattaggcaagataggctttgagatttagggacagttaaattttacaccaacttagtgaacatgagacttctacctagtgttacatttcatttttaaataagcaatttaaaaattggtaaatgatttgtttactttgattatattctggtataattttctgacaaaattatctgtgtcttggtcagcattgttgctagaatatgtattcagattttgtctgtccataattgagaacacagaaaaaatctaatttgactatacccatttacccccatggaaatgaaactatattctatgaatgaaaaatgattttaataatgtggtgtattacattttcttcattcaagtaatgtaggccctgagtagagcatgttatgaatatttagttccttagtgttttctcattcaagcctctcatattgaatgagtctagggtttggagagatgtttcacacagcatgtctcttcagtgcaagctgacagatatcagtgcacaattaaagaaacttaattgcacctttcaacttggagtataaattttgtatgtatctatgtatatctatgtgtgtattttgtggtttaaggcttatttacataatatgtgacattttacctcagaaattcagtgactgaatttcacagctgcttcccatgcatctttattatctatgtttctgaaaaactcaaatactaactaatctcttttcttcccttagctgttcctttcctgtggttttaaaaaagtgaccagaaactaggtctctattttcattgctttgctgcatattcttttaacctgcttttatcttttacagagttgaggggctttctaaataacctagacaatgtcaagattcttagctgcgttttctgtctaaaagtgtagatgtctagttattcctcatgtaaaacacaacatttcaaccctgagtactataaactttattatgcttctaggttactttttctctttaagcaattattcctacattcctaagtgttcaccagtggaacagataagagatagaagtagttagaaattgagataattgggttgacctgtcattgttgccaggataattactggaagattaagcctatctgttagacattttgaccatgtttataattgttgttagtattctgtcagaatgtatctgttttctagttattaaaagaagcaacagaatcgaggcacaaatatgaagaaatgaaacaagaagaagcacaactgaaagagcaggtaacttaacaacagagaatagcagaatttgtgtcttcttgttcccagccacagactagaacagaggatttgattc

SEQ ID NO: 2216 - DNA, 4026 bp, Homo sapiens
cggatttgccttcttcgtttcatggccacctctgtgggccagtagttcaagctgtctgaatcctcacttgatcaggatgcaggacaccagagttagcgtctcctcagggccactgatgctcaaaactgggcagaacaaggccagatgaggggcttctaatgcacagcctcccaacactcaccagccatccagctgaaacctttaaagctgcagaccagaactggtagtcagacagacaccccatgggaagccttctcaaaagagccagcaattaatgatgaggcacttctgctgggtttctcaagtgcctttgaatccatttgaaggttctaaaaattatgatgcactaaagttgaagtttgtctgtgtttacactaagtgagtctgtagagagaggaggatcaacggagagggggcaggttgtatgtgtgcaaagctgaactctccagagcacaaagagagcacaaaagctggatttgggagatgggggatcacctgggatttagcccctgtttgtagatgcctcaagggtcctgcatcctggccagggtaggactgggcctctctattccatggttggagctggccagccttgacctgaataatcatcgtggttggttttgtgaacagggacaccgaggttttaaaggagagaaaggggagccggggttaccagggctggacggactggatgccccatgcccattgggcgaagatggcttaccagtccaaggctgctggaacaagggccagagtccttggttagtcgccaagaagtgaagccagcaagcccagagccctggggaaagcgccttgccttggaggaggaaagaggtggagaagctgcccctggacagagggtcgccagccgaatccttccagggggtacctggtttgaggggatgatcaaagtgtattgtgacctcaggagtgcaaggatgggcctctgtcctctccaagggctagagctcagccaggaaagccaaggcccccacatccgcacacctccagctctcgtggcctgctgaggtgtctgctgcagccccagccaggaccctctgctgttgctgcaattttgagggctctcggactcctcttgctcatgaagaattgtggttctgtgagcaacctctctgcagaaggggctgtcagtaccatcctgatctgactgggaaagcctcctcccgaggcaggccaggcagctgtcacctctcccacctcttctcaacagagttccttcaatttcctttggtgctgccaccatcaaccctgttacttcctgggctctttccagtgtcataagcagacgaatgtaccaagctggaaaagcaaggagcgtttgtcttagaaaggacggaaccgcaacataatggaggagagaagcccaggagtaatactgggtggccatgccgggtgcctgggctggtcctcagaaccaggagcctcacacatctagtccggtgcccagaggtgccccagccagtactaaactgacacagacggaggcagcagtctatgtagtttcaggagggtctgaagtaagccctcttagcaaaattgttgaagggacagtggctggaaattaaccaccttacatctccctttgtcatgacactcaaaccaccttgctgcttgcttcttcagtgaatagaatgaccatattttcttgttctatccaggacactttgcaattaagaagggccctggtagtcagtaggctgtgacagcagatgtcaacctggcaaaccagcaggtggtcacagtgacaatgacccaatacccacgtcatcctccagcccttccaagccaagctctggcaacagctcaacccctcctggtgccttgtagctgcagccattcaccaatggcctcaggtgtccacagggccaggtggacattgtgtggagaacaaagtgaacacgcccctgttctcacctccatgcacctgggcgagtgggatatgatcagaacacaaatgacaactctcaccgaaggcaggacagacaggccagcggaaggcagaaatgaagggcaggggacattcaaaggatagaaagatcttgaataaacaaacatttggagggaatttttccccgacactattttaagatggagaggctgggtcgccagggttaccaggccattctggtgatttgactttaaatgctgggattctgactttaaattcataacaacatctttcctcggccctggtgggttaaagaaaatgctttagagcaaatttagtgttttctcccattcacagtatctggcccacaaggcttgtgggttaaagcacactcctgatcttcatttgataacctcatctctctcctctcttttggtgcttattgtaaagtaggaacagcagcctcattacatggggaggagcagtatgtccagggctgcaaacaaattgcgcaggtccattgcggccccgttggggtcaagggcacatgtgcatgactggatgcagcaaaagtcacagctaatgcaccccgatggtgatccagatgtgatgtgaggctcagtgggtacttagagatttttcacagccaagttaaccagtcacccaaccctcctgcccttcccagggcatggcagaaataaaaggcatccctatttaaaatgacacacgtgtgagtgggtttgaggattccagatgactcacaggatcctgtacatttgtatatagtcaaatggtcttcatctcctgccagcaaaccaccccgctctaaacctacaacagtcgaggaagacaaacccatcacgaccaccttctaagaagacacagccaagtcccagggctcactgtaagatcacaaatgcagtgaaactgcttgctaagagacatttttcttgcactccactcattccaaagacaaagcaatttattgcaaagtctgccaaaataaacgtgcctgcagctcccccagccagtgggaaagcacttgggctgggatgggagtaaggagatcgggtgcttgctccggccacagcgtgctagcagagtgaccgtaggcaagtgccgcccatgctctgagcctccagtccctcatgtgtgacctggggcaggcactgcctacctcccaggtgatatgagggctatctctgtggaagcacttggaacacagtaaagagccatgcaaaggctagacaatgcgattgctagtgtttgctgttcagaaaaacaaaaaacaaaaaataaccttgcttttcatagacaaacctcaattacatggaatcacttaagaatggttcgttaaaatttctggtgaaattaggttcaaagaggacctccttggaggcatgaagaaggcctgactgataaacactgtggacactgagtaatgaagatgtggaaatggtggccagcttggggaaagacatgaggatagatctaggaagttgctttttcaaactaaagtccataaatgttcataagagatttttttccctttctcctagaaaagtcagcaacttaaattatttttgctttaaaattccagttccccatattgctcgttaaatgaggtttttctcttcagagggctccagcctgcaatgtttcctccatcctggtcctgcccccacctccctccttctatctcctgcccccctgtgcccttggagacacgctgggcagactccccatgtgatcaatctgacgtcttaagtttaaacgtcattacctcagtatatcagcagaaaaagttctatttcattgtgtcttgtggcaaacttcagttcggttaatggagggtttcgtatacttttaaaagtaagtcaggctgggtgcagtggctcacccctgtaatccccagcactttgggaggccaagatgggaggatcacttcaggtcaggagttcgaaaccagcctggccaacatggtgaaaccccgtctctactaaaagtacaaaaaattagccaagtgtggtggcgggcgcctggagtcccagctactcaggaggctgaggcagaagaattgcttgaacacaggaggcggaggttgcagtgagccaaga

SEQ ID NO: 2217 - DNA, 569 bp, Homo sapiens
aaataacataaattgtcttagctaacactgaacaaatatcgattatgtgctggcacattatctgatttaattctcttaacatctccttgagacaggtctattgtgcagatgaggaaactgaagccctatcgcaaggtgatggctctgttgaattctagagactgcaaagatgaagaaactaagaaactgtggcacaaattattaactatactgcccaaggtcatacactggaaatgggtggtgaagctttgagaacttaaaaactgtttccctgcatcacttttccgaatctaacagagacttcaagcatggtttaagggcagagatggcgctgtgtgtttgattgttaaagtgaaaatgcagactgtgaggaaaatcaagactcccagagcatttaaaatggaatggtatttttcatttccatatgagaaaatatacggatttattaaaaaattatttgtaaaaatcctaataatgagatgtcatggatattttattttgttttattatatatattttttaaattaaaaaaacgtaggtagaggcaggtcttgctatgttgctcaggc

SEQ ID NO: 2218 - DNA, 11931 bp, Homo sapiens
agaaattagaaaacttagaaaatgctatttaaattaaaatgttcatgccaatgtgactgctgactgaaaaaatggcagtagttcaagaaaaaagaaagaaaaaaaggaacaaaaaaagataagatgaagaggaaagaggagaaggatgaagaagaggaggagatgaagtggaaaggaggagtggaagggcaagtgtaggaagaaaggaagaaaagaagaaagaagagagaataaaagaggaaaagagatttgaaaagcaagagttgtccatttacttttattctttcccttctgttaatctttaatttgcgttgagtggatattcactaaggtatttaatggagcctattattatttttgatatggtcataatgtaaattttgtgagtcagagatttcttttttactgttttctctccagcatctagaacagcatcaggcatatggagaacattcaatatgtttgttgaataaatgaactttcaggttgtacttttaaatatactaagacctagtcaattagatgattaatctatttcttatattgaataagttaagaatacagagaataactgtctgttgacagaatagacttttctaagtgaatgcatttccatttagtacttaacatgtcaacttggtaaatatttcagaattaacacaacaaataagcaaaatttttgccagtcggatctatgtactgataaattcctccttcctttcagaaagcttcaatttattacctctgccaacagggaaaatgttattgatgttgaaataaaatagaatgacggagggggcctgataattttgaatgtgaaatagttctagtaatgggtgtaaggagaatgtgggccctggtagcttcttcccttttctattttatcctggaaaatgtcagacaatcccatagacatttgtgtgggtgtagccaccaccaccccaaattgacaaaagcaataaaactaacagccatcattttatcacttattagatgccaaggattgctctgagtgttttacatgtgttaactcatttaatcctcagaacaactctttgaggtaagcataacttgacttccttttaagttccttgccttttttttgtttcctccctctctcatcattggagccacaaggacgtattttgaaggttggcaaattctgatttactgactgttttagtaaataaagtgattagaaaataatcacacccatttatgtgtgtatcatctagagatgcttttgcataaaaaaaaagtcattgtggtggagaccatatggcccacaaagccaaaaatattttctatctagcaatttacaaaaaacaattactaactcatgatctgtatgtttcacagaggaatctggaaaattttatttctttctttccagctctctaaaagttctgcctccacttttgcttctccatttcccacttctcttggcattttattttgcagagctagttagcttaagactaagggtgcagatctagctatgtggaatgaactcattatatgaaataaactctaaactaggggtgaaattgcctggattttagttcttgctctacccaaaatagctttatgatcttaagctgtccctttaccttttctgtattttcctttcctcacttctaaaatcaagcatgctaggtaatctctaagttccctctttgctacaggatttttataaagctgtataatcctgaacccacttaagggactcttaaaacttgcccaaatgaagtctattcaaacagacctgaatttgatatgggtgaaaatcatcaactatctgggctatcaaagcaatggcctttgtcttagcaaaacagcctaatgggtcatctcctctgagggtcctttacgttaaacaggttcaaaaattatagagaagaaaagaaaatagcttgcatagtcttttttcatctagatcaactgtttcttgcagaaaaagagaaatgactttcttttctttacaataatttctacacctcaagctgtattttaacacaaacctctaggctcctggtggaggaaacatatacggcagtatattggaggagtttaaatgtcagatatattcaatgctttctaagcaatagcttcagtataagtggggaaaaaaaagacagccagggactgaatttggggcaaagattaaaggctatttgtgtgaagaaggggaaaaatgatgacatgatgggttgggaaacaaaaataatctgaaagtatagatgtttaaatttcaatgacataaatttcaagctattcttgacacattctttaaggtctttatttgtaattctacttcaagagaaagggattaaaagtattcaattttggtttgtgaggagacattgctaaaattccatttctgaataaggaatgagtatactaagtacagatatttgggccctgaatactgtaaagaagtctttgaaaatgtgttcgtgggccatgttggtcagtgacatattgaagactatattttgcaggtgttatttcaagagttctgtcacccctgtttaaacccatttagaatgaagaacagagaaattaaattcaaaagctagtcttttgttttagtaatttatgtagcctaataaaggagttcttacaagtgaatttttaaagctttttgcagaaaaaaatatagagattcttcaatttggagagagagacacagagagagagagagtcggcagggaggactgttgcagagaagagatgacaaatggcagaaagtgcttgtgcatgtctttatctgggtgaaagacttatgtttaagcagcagtgtgcttgttaccaagaagcctctgaaaggcatggcaacatgtgccttgacaacatactcactgatggcagcagcagcccatctggagtggcccctgaaaagatgccaggtacagctgggaagccacagctggggttacgctccacagggctggtgggagctgggaacagatgggagccccatcccccaccaaaatggcagggcaggatccctgcactctcaggtgcagttgcagcctcctagccatggcaccagatctgggcatccctgtgcactcagaagcccagaaagccatcctgccctcttcaggcttagaagggcctgctcctgctccctggcttctcctggtgcctgatctgattttggagcaaagttatggccaagcctgggtgctgtcacaacctggtgggtgtgtaaacacttggggcagcactgacacactaccccgccccccacatacccactgccatcttggccacctctgggcatccatgagtgtgggaggtaggccaggtggggggtgagggcagctcagcagtgggtctgcaggtgcccctcagcacaaatagccacggcaccatggaccacatgttgacagtgggaggcagacaggttcctggatggaaaggggtggttccctggtgaaaccccaccttcaagccactgactgcctgaagcctgagggccaggctgccagttccagatggagtctaaggccagagtaagagcttatggtgctttttctgggctgcccatggccacctgtgaaccaatcaacacacactccctcccttctgagcacaagaaaaacccagactcatccaggctcacacagatgtcagggctatcagctgcaggaaggagctacccacttagggtaacccccacttgtggggacaacctgcctgcagaaaggagctaaccactatgggtctcctctctgctgagagctggacactcattgggacgacccgcctgcggaaaggagctacccacttcaggtctcctgagagctgctctgttgctcaatgaagctcctctctaccttgctcaccctccagctgtccacatacctcattcttcctggacatgggacaagaacttagggcccaccgaatggcaggattgaaagagctgtaacacagacagggctgaaacatggcccctgctcaccacattatgggtgatgaggagagaagagctgtggccccttggggaacccagacctagcggatccccaagccagggctgtgacaccatctctggggctctgcagttcctggtgtctccaagcttccccagtgcctgcagtggaagctgcttgcagtatacctggtccagccgcagcctcacatagagacggtgcctgtgctgatgcctggagctgcccaccctgccgcagctggcatgcctggctgtgcacagtggccagaccccatgcttgcttacacatccctcatggctctgcgcctagctcacccttggcaggagtgggatccaggccattagcacttctgagcacagccttccagcccaagtgggcagaacaaggccagtgggccggagcaaaacttgggcaaaggtgctgctagccacagaggtttctggctggaaaagcaataccctaaggattctgtgacatcacgaggccagaggctatgggaggtaagcttcactgcccagcttccactgacttcagcctgctgcgctttgtagcacattgtcaaagctagaatttctggaaacatattcaaaagaattaagaaaaattcaagacagcatcaaaaagtcactaatgataacaaaataattattatagtataacagtgattcacatcatctagtaaagcatgccaagtaatatgatttggctgtgtctccacccaaatctcaacttgaattgtatctcccagaattcccccatgttgtgggaagggcccagggggaggtaattgaatcatgggggccagtatttcccaagctagtcccatgatagtgaataagtctcatgagctctgatgggtttatcaggggtttccacttttgcttcttcttcattttacccttgctgccaccagaaagcttggaacgtcttagagacttgggaaagcttgggaacatcttgggaaagcttggaacatcttagagacttgttgaatggctttgacaaaaatgttgatatgaacaatgaggtccagacttaggtggtgtccaatggagatgaggaacttattgggaactggagaaaaggtgactgttgttatgttttagcaaagagactggtggcattttgccctgccctagagagttgtggaactttgaacttgagagagatgatttagggtatctggcagaagaaatttctaagcagcaaagcattcaaaaggtgacttgggtgctgttaaaagcattctgtttttaaagggaaacagagcataaaagttcagaaactttgcagcctaacaatgcagcagaagagaaaaaccttttttttttttttttttttcaggagaaattcaagccagctgcagaaatttgcttgagtagcaaggagcccaatgttaatcctcaagaccatagggaaaatgtctccaggccatgtcagagaccttcatggcagcccctcccaccataggcccagaggcccaggaggaaaaagtggtttcatgggccaggtccagggtccttgtgctgtgtgcagccttaggacttggtgccctgtgtcccagccattccagccgtggctgaaggggccaatgtagagctcaggccatggcttcagagggtggaagccccaaaccttgacagcttccacgtggtgttgagccttaggttgcacagaagtcaagaattgaggtttgggaaactccaactggatttcagaaaatgtatggatgcccaggcaaaagtttgctgcaggggcagggccctcatggagaacctttgctagagcaaactggaaggaaggaaaatgtgggtttggagcccccacacagagttcctagtgggcactgcctagtgcagctatgagaagagggccaccatctttcagaccccagaatggtagatccactgacagcttgcactgtgttgctggaaaagctgcagacactcaatgccagcctgtgaaagcagctgggtgagggctgaatcctacaaagccataggggcagagctgcccaagaccatgggaacccatctcttgcatcagtgtgatgtggctgtgagacctggagtcaaaggagatcattttggagctttaaaatttgactgcctcactgaacttcagacttgcatgggccctataacccctttgttttggcctatctctctttcggaatggctgtatttacccaatacctgtacttccattgtatctaggaagtaactagctttcttttgattttacaggctcataggtagaagggacttgccttgtctcagatgagacttttgactggatttttgggttaatgctgaaatgagttaagattttgggggactgttgggaaggcatgattagttttgaaaagtgaggacacgagatttggaggggccaggggcagaatgatgtggtttggctgtgtccccacccaaatctcaacttgaattttatctcccagaattcccacatgttgtgggaggggtccagggggaggtaattgaatcatgggggccaggccttcccatgctattcttgtgatagtgaataagtctcacgagatctaatgggtttatcaggggtttccgcttttgcttcttcctcatttttctcttgccaccaccatataaaaagtgcctttcacctcctgccatgattctgacacctccccagccatgtggaactgtaagtgcaattaaacctcttttggttcccagttttgagtgtgtctttatcagcagtgtgaaaatgaactaatataccaagctatcacatcactgagtgtgatgggccatcagcactgctgtgatgtcctgcaaaagtggaattatttcttgacttgacctcactcttatgtacttgagaagctgagttctcttctcgcatgttctaataaacaagtcttataagtctggctctggttagcccacatgttgaacctcttacttgcaaccccactgatgtgtctcccctatgcctggacataagagcctctcaatctcacattcatccaacagcatctctaggtgtatactcacttgtagccaaagtaaattttacaccatgataaaaattagtgtaaagactttacagggaaccaaagtgcctgggaattctgatgagtaactactgagtggttttttttaatctctttattcaatagacgtaaaagtttaacaattgaagattttaggtgcctcgcttttacattatgatttttaactagtgcatgcacaaatatgctttggcacacaataccctttccagagccatcaagatttaagtcatatttttaaggacagtgttaaaatgtttacaggtttatgacccataagtatctggtttaactactctgtgctgcaaccatttttataattattttctctttcacaacttttacagtaattttatattcatccttggagatgccacattgtgttttcttttggcttactaagtggacatcacaatcggttaaaaatttgccatttgtgtgtatcagggcatagaaggtggaggataatagtgggggttgtaaatgtattggataaattatatggtacaatatgttagtgttcatttatatccatctaatatgagcttatatgtcacccaaaggtagccccagttaggctgtgaatactgtggcccagtatcaaagtgatcgtaagttattcctagaagagcgtgtccctgccaaacacatatcagggcttcacagttttgaccttatttcatgtggtccctcttgcagctagagtctggcacagaaggcaggacttccagctggtactttaggtacattggggcactagagataatgaatgcacttgacatttacagttgggtctaaattcacaactgtgtcagataacaagagctggattaacgagtggccagtatgcagagatacagaccatctcaatggagacctccctggagtatcaagacttacaaagagagatgaacacattggaagccaagaatggtttatggattatatttgctaaatgtgtgcaatcctcaacaggaaaaccacagccaggtatccaaagcagaactggagtgtgcttatatgtgtcaggggaagaggtttttatgtctaataggcacagctagtttaatatgaaacttgcactgacagtttatacctaactcgactcaagactttcatagttatctgtaaagccaaatactagatttgactggctattaaataagcatggcagaattgtgaagacagtattatacgactatgaagcgaattaaacccttcttatcacccctctccaaaatcagaagaaaaaatattctttcactcctttttttaaaaatcatgagatacatttttttgttaaaaaattaaaaatgcaaaagtgcaaaaaggaggatataaaaatcttcacaacctcagataaaccccattagtattttggttaatatccttccagtctcttttcaatgtatgtgtgtgggatcaattttaaaatatataatatgaagtataaagcataaaaatatactttttcacaacctgattttagtctgactcaccaaaactttgcgattatctttccatgatattgttcttcagctgcttcaggtttagtagcacatgatattccattgtataatcttattttaatttacttaagcagcctcgtactgttggacatttgttatgtccaagtattttgttactacaagcaatgctgtaatgcacactaagaagaaacatatcccttgaaactggttctacttttaatattttcaagcgttctttctgccattcccatcattataaattaagtttcacccactcacttgctgagcatctagttttcctctttgtctggaactttatgtatgtccccaaatggaaatgacaagaaatatttaaaccccaattggtttaaaaattaggtatctaccttatttagggacagttttatttataataattctaaatgtctgtgaaatttttaaaaggattgtatctgcatgatccagtttcttgatgtatgtattgccgtagtttatgcagtgatgcatctatttacagagtgtgtaacactcaggacatatatgtagagcattgttgatcagtgtgtggccttgggatcaagaggaagctggagtaagttagcactggttctcaaaaaaagagttcaagctaaaagcatgtggcatgaggaactagtctactcaggctacatggttgaaaatcctgagatagcaaacactgaaatccagttcatgggtattgatgccagggaaggataccagcaagtaaaaaagtagctttttgtatggcaaattttgtctgaagcaggaagtctctctcctttctgccaaagttatctgataatctcagaaagtgggcagacatgagctcaaaattatagtttagtaaaaggttctgtttttgatggcatgaagatacaaacagagtagaacgtctctgacactaatagcttgtggatgagcagcttcataagcaaccaattatgcttaaaaatggtatcgattggcctgggaaagtctttcagagattttctaggctgatgagcatgtggtgccctctggagtgacacagtctatgatacaaggagaaacatgaagaagctaagcttctcatctagtctgcacaggaaaagaatgaatcaaactcataccttaatactctttccagggcagcacaaagtcaatccctcatgttttgtcttacaaaagcaagacagctaagaaggtacatatgtcttttaagatgctggcgtggtccccactccatttgcttattcacctacagaaataatagctgtagaagtcatttcaaatgcaaaagctgctgttatacatatttaatatttatatatgactacatagttatccatttattttttgattttgaaggaaatacacttattcattgagtaacctttattaattagctgtttgttgacttccactgtactaagtactattaagtacataactaaatgatttctatgcttaaggaaattatgttaccgagaaacatatgtgtttttaatgtgtttttaatgtgtctcatgttatatgttctataaattgtttccatatatgttatctcatttgttcggctgtatttcagaaatttccatctgaaagagatcaggatatcgtttcacccaccaggtgtacagatgagcagaagtaagacccacagagattgtgacttgtttggacaatcaatatcagaaccaaaatcttctgattaaacagcaatgcacctttttaacactttttttcttcctatgcaaacagatacaaaaatgcctcttctcctttccaatatatattctaactttcagtttgtccagtcaattctaagtttgtcaaacagctttaattactttcaaatacttgaggtttgtcctgatacaaatcatatttatgaagaacattttttaaactttacagagctgttatatttaagggagagctaacacatatgtttctgattcattacaattaactcaaacttttatttgcaatacttatttgatgcttaaatacatcattttggcttcagtacagtttctcctaaaagtagatgccattgttcattaaaattaaatttaccactaaaaatcatcatttagggctcaaaacttcataacattctattagatttcaagcttaacaaaattgttcatttttactaaaacaaacttttcctccttttacatttattttcaactccctatttgcttatagataaagctatttccttttacattttctaagaatcctttagactttgtatatcacagttatttaaatggcttttgttgtcaaaaaggaaagaagaaggaggaaaaaatttgctgatttttttctaaaaaataataacaagcctttaaatgaatacctcttttcaccgttcagacatgactgaacttggcattaaacctgttcttaattcaacccatctgttcagtgcccactactttatttttagtgccaccctttaaaactgcctgaaatacttcatagtaaaaattatcaaagaacatgccactctcaacataacaaacacatatatgttcaccaatgaaccaccctttctgacatggtggtatttatctcatgtctctctaataccaaatacatcttttgaaaaaaattctcaacttaggcagtttaaaccactaatcatgtggttttattcagtgtggcatttgagtttaaatcattaatttagtatagtgccaagtatatacactggattttttaagttactggcaataaacggaagatggctgcatattttattaatgtctgaaattgtggtggcaatgaaaacaaatgacctcatgtaattcctcaaatggcatagatgggattgttgatggtggactgcatttagttgaagttcaggctttgccactgtcttcagacccacggacatccttgtgctggagtgagaagccacaccacagctacagagcgacgtggagggcactgtggtgaacccaggacaacaaccaacagactttgcctgggacatgcccaagcttctcctgaggatcctctgctttccaaaacagccctgagagtttctcagaaaaacctgattgtgctgcttggaactacagtttcagtctctgtatagttcggaactagagtttcctatttcaccaagaattcttggtatttattattaaagccaaaaatcagtttcccatactttaaaactttttattttacacgagctgtacatcaaagatacacgaccattttttatgagaattctgtagttttaacttctgggataacatgttttatgcataatcttttttttaaataggactttcattgcgagtaagaatttgaaagcattggtggggttggagaaagcaaaaacttgtgcaggaactgcactgggaatacagcaatacaatatgatatggactcatttcttaag

SEQ ID NO: 2219 - DNA, 5948 bp, Homo sapiens
atttatatatatgtctttatatacacatataatgtaaataatatactatattattatataggggatatagagcattggagccaccttgtataccctaaaaaggttttgacagatggatgaaaggaggaaaagacattgttgacattgttggcaaagggagccatgtgcacaaataatatatatataatgtaaataatatatataaacatatataagtataatacatatgcacacacacacatatatatctgtttcaaaataaatatcacagatcttgacttttgggttagttagttcctcctctgtgccataggcctttgcatttatgtcttttagtgcatttgttatacataaatcatttgttttcccaattaagtggtgagttttctgagtggctgctcagtggtacatgctcaaagaaatagtggtttgaactgaagtaagatttaaatctgtttcagtaaataaaattacctaaagctgggacaatatgatattgaccttactcgttcttatataaatcaacatttaactcttaggctttgcctaggccttcttaatgtttgaaaagtgatgataatagctaacattgactgtgcacatactgtgcatcacactctgttgtaagtacttttattctgttctaaatttctgttatttgattttctgttatatatgagaaaactgagatgtagaggttaagtaacttgctcatgattgcacatctgttaagtggtggacttctaccagagcctaatcgtaacaatgtctgagatagtaattttaccctacatgtgcatatgacttaattatctacaagtgctttagcacattatcttatattattcttatttaatgagcaaatttactctaacaactgtacgttttccttgatgaacaaaatacagaagtagtcagctgacctcaagacctcagaatctagtgggagtgattttggaatactgatgacctagattcttgttctgacatagtcaccaataaatatcgtgacattaggcaagacatttcatctctctgggataaactgaatggtagggttataatcaaataatcatcaaaagcttgaggatctttttaatcagcagaatacaatgaatctgcagtatgttcaagatcttggaaggtattagtgacagagccaggctaaatcccaggggttaaacagcttgttgtttataaaggggttctcccaaagctgatactaggccatcttagtttacatagaatataagaatgagttttgtgtcatttgattcaaaaattaataaaattagttaacaacatttaaatctaagacgaatatctcattcccttggtcagggtggctgtgtatatctgcacaggctatgcactgtacaactccagagagcactgttcacatacactgtggggaaaatgacacccttggaactggaaaatatggtggcctggtctttggcgacccaattccccataaaagctgctcctttggtattattgtcattatttatttgttaaggcaaaaccccatattgtagaatgagaaatgaatataatgggaaagtgtcggcaggtctgtgtggtgcacagggtagacacctcaggtcctccacacctgtttagtctcttgatccagcctggatcacttttcatagattctaagaaacttcatgtggtcacatgtgactggcgttgcctgccttctgtgagagtgaaaaggaaagcaaatttgaaccaatgatgtatttgcatcagaaatatcaaaccagtagcagatgctgctggaaccaagtccaccagactacagttgaagatcaagggatgagggagatgcagaattgaacaggtgctgaggtagagtccagtgatgaggaatgcgtggtaggttcaggctacaagagggaagaaacagagcagaggaagcaggacttgcatttatttcagcgaaccagttttgcaagccaggatcaaaggtcccaagaggccctcttgtttttcttaaaggtatctaatcccttctctggttgtggtcattctgaggggtctaaaaactggctttagcccacatatcccagaggttcttggattttaaatatacacctagagatgacagtagagggtaataagtggattccaagtgctgcctaggagggacattttgggaaagagatgcttcttagaaagccttgaatcatgtgcccctgcaggtgcttgtgaggcccactgtgttccgagtaagcaacaaagcacaaggatgcttcctacatacttgatcccaaaggaaaaatgcttacctaaaaccgagaaacacgtttctttctactgaacagtacataatacatagtgcatgtgttatggagtttctttgtgtcatcttctaaagatttttttgtttttaatcattttgacattatcacttattattcagagtcttgaggacgacaaaaaattataacaataattttcctgattctcctggagtgccttcatggctgtatttcatttaaaatgaaagcacctaattagttactcaatttgagataattatccatatcactcacctaaatagttagagtcttctggctcccaggaaaatgaagtcaattagcaaatgcccaagttctttatagtcctctagttccagatgactaattttctctatttctctgtcatgcacacatcactgacacctcagactttcattatgttccctgacttcctgtgtcattttaaataagtgtttatattatattccttatttgttcttcaaagtagtaatagtcaaaataagcttgctgttgaaatacacactggattacaatattttattcccttaaggacctggggtgtttgagatgcatggacttcttagttctgctaggctcagttttgatatattccacacatggctaattactgtccaacagggattgaagcccagcttttctatgctaggtagtgtttggcaggacatccttttgcactcaaccatcagtcatcccctttgcctttctggtacttctcagaggatgccttggtcctcagcactcacgagcccacactgtggtccttttcctctgtcctctcaccttgtagtatgggcagtgcccccagctctagagtgtgctgcccctgtcataacacctgcagtcttgtggcataatgaaaagcaaacatttggtctttctcctaggctctcagcacagagctcttaaaacccttggagacatctgagccataagagtgtcctttgtatgctaatcagatgactcatggtagagagttgggggtggagtgggtagatagttccagaatgggggctggtcccagaaacagcccgtcattattaggtatggtcattaggagcaggccattattggaacttccagccccatgcctcaacctcccaggaggggagaagggctagagattgagttcaaccaccaatggccaatcatttgatcaattgtgcctgcataaagaaagctccataaagaccctggaacaatgggattcagggagcttgcagggtggcaaatgtatattcatgtgctggtgcatcctgactccatggggatacacctcctgcacttggggaccttcagtcattgctctatgaagttcttcatttggttatttctttgtatccttaataaggaaagtgctttcctgagttctgtgaaccattgtagtgaattactggacctgagatggggtcatagaaacccgtggatttatagtcaatagaagtgtaggtaacctgaacaccccatctgcagctgccatctgaagtggggcagtcttgtgcggctgaacttataacctgtggggtctatgctaactctaggtgtcagaattgaattgaattgaattcttgaatgcccagttggtgtcagagaattttgggggaactgattgttgtcagaaaaaacccacacacatttagtattagaagtggtgtctgaaaacactacacagactctgatctctgttaggatcatttcaatttatattaaaattgttaaaatctcaatgaaaaagtttttttccccaggcaacagattggcatttaatgagactctctcaacaccttactttagaggtgtccgcaacagtggggaggctccagtgtggcaggctggtgcagaaaagctatttggccagcactgtagcaatacagaaatcataccacattggcaatgggtgcagcagaacccttggatataccattgtatccacagtaaatcattattttttatcactagtgagagtgatctgagtggcaagagtgtctgcagcacatgttacattataatattgatggtgatggtaatgctgataaacctttgaacatttaataattcatttctgtagcttgttccaaaatgccctgtgatgtcaaagtactgtgaacagaagtgcagtgaacattttgacttaaaggatgcaaggtacattattcttccctattgtagctatcatggggccgtgtgttgagatgatggatccacaaggcagaagcatccagatgcctctgtaacctcctggcagagggctgtactgcacaattgcggagatctacggtggactttgtgtgagcaagagataaactgttacctgtttgaggtgctgagattgtgggttgctatttactgcaggattgtctagccaagttccctccaagagttattttcttcccaggaagctcaaagtagaagttccctttttctgtgcgtaaggaaacaccccactgatgaattcatttcgtgtcaatatggctaagctagaaacacattttccagaattcccttccccttgtagttcctatttagcataggcttcaagaaaaactttgtgtaagatttagaagagggagcgaaggggcggtttgttccttcacatactcaggaggtgggtgcagtgcacgcatgcggttgcttatctactacctcacctagttggtttgggaccatgctgggcccacagctccagctcctgcaaacgttctgcttcagcttctctgaatcatgggttagctacatatgagcatcctgacgaagagtacccatttcttacccagaaagctgttgtcatctgagctgagggcttggaggtggggagacagcccagactccagtcttctctggtgggttccagctcagccttgctagttcccacttgtcctccacttcatgtacagtctcctttcccagctgcatgccctgtggcctttgggctctagcaccaggcatggaaacaacagccttgcctagactaagtgactagctggtccactgtgtagggtgcagtcctcatgatgcgtattccctagtggttctcattctctgagcagacctgggctggtgcataaaccatggctctctcctcctcaccattttagttactgctaacttagaacacaccacctgtctctcaccttcactgctgctgccacttctctgtttccattccagccccaaccattcactgtccacacaacaattaaaaagggatcattttccagtatgaatggaatcacatcccttccctgatcaaaagcctcccagggcttcccattacttttaagaacaaaatccatatgagttatttaaggcctgcctgacttggccccatacgcctcttctccttctgtttccacgttctgccagactccctctctgatgcacacaggccccctcccaccttcctcctccagagatagcttagaaaaagagacgagtgaggagaacgttaagcaaggtgagaactatccttcataccatgaaaataagcttatggtaagccaaacaagatggaaccatggatttaaagctttgtggatcatgatctgcagtaagcaaatgcagtttacacacacatacacacacacagccaaaaagagtcatttcattaaacaatgtaatatggtcttatgtggtatatactct

SEQ ID NO: 2220 - DNA, 17048 bp, Homo sapiens
cagtgtgagaatgaaaattagtgtcagactgagtgtctagtaggttaggggtaagggtcagagtcaacattagataagtgtcaggttcaaattaaggtttgggaaaaaattaaggtaagggtcagacaaagctcagggtgagggtgaggatgaaggtagaatcagggtaagagccaagttcagggtcaggtgcttatttagcatcacgttcagtgtcaagctcaggtcatggtgagaatcagtgtgaggttcaggttaagggtcagagttcagtcaggaagagagtcatgtgagtatctagatcaaggtcagggtcaagatcgtgatgaaggtcagattcaggatctgagtaattgtgaatgtcatggtgaggattaaggtcagattcagaaggagtgtgaggtatatgtccagggtcaacatcacgataaaggtcaatgtcagcatcagggtaaggggtagggttaaattgagagggtaagtgtgagggtcagagtcagcgtgagggccatatgttcggggacacggtgagagtcaggttcaagattaggatcagattcagggtgagcatagggttagcctcagagttagagtctgcctatagacaagttcattgtgagggtgagaatctgagtccatgtcagggtcagagtctgggtgagcatagctgagagtcatggtagtgtgagaaacaggatgaaggacaaggtcatgtcctgtgtcagagtgaatggcaggccaggctgaggctatggttcaacaggaggctcaaaatcagggtcagggtcagcgaaaggattaggttcagggtcagcttcaggctgagggtcaggtcaaggtcagggtgtgggtcagagtctggggaaatgcaaggccaagggtcaccaacactttttgggtatttgttgtatagaataaccaaaacacaccctaggccttagaggtgcattatttatatgcaccgaaagccaacagctgcttcattgatcctccgcatcccctgctgtccaacctactactttaggtccttggaaagaccgacctgaagaaccctggctcttaggaagccatctagaacagcaggagtatctgcttttgtgttccaaatgcctccccagttgcatccttcaggctcattgagctagtgacctggggttggtcccagcctcctaaaggcacattttaattctctttattaggagcagaggacgacttgtcagagattccctggtcttttctactgataccccaccccccccccccgccgcccactgcaggttgaggccgatgctgggctcagccaatcctgttataagcattagatcttgtgccagcgacttctcttgttgcctcatctgtaaaataggggagttaggttttatggccttttcaaactctatgggaacctttcaagcattgactccttgcaacttttaggccttgcttcttttctgaagactctatgaaacagtgttttccagctttttagattcaaatccctaatggctaaaaatacacggtgatgatctcagctctcacaattcagaggccgcctcccgtttcattgggaattgccataactcttacataatcccaaaggtcaaaaaggttctggacagctttaatttctatagtttgtactatgagaataacagcttttgggggacatttttctaaataacaaattgcaatatgaaatctgctttttcaaacaccgcgccctaccactcactccctaggagagcccaacaaacttcctcaggctgtcattttcaggtctcttctcacctcccatttgggaatttctgctctcgaatcatttaaagatattgattatctgctccaccacggaccctgttctctttctttttgtcctagttgcctgtgcttcgtgtcagttttcagataagaaaagagagtgctgtcaaggctctatttataatatatccttgaaagccaagtgctgtctttgagctaaaacaaggcaaggccacccttagggagaatgagagccctcaatgcccaaatgtgggcacacgggcacgctcccaggcaggcttgctcatgcacacacacacaacatccaggtccaaacgaacaagagaaaagacacgcaggtccagggaaagaagaggaaatgcctggaatgtgatagaaactcaatacatgtttggtgaaaaaaaaaaaaaaaaaaaaaaagacaaggggaggggatcagggaaggaggaattcagagggactgcaaatttagtgaggaaagcactgaagttggagtcaggggatctggatttgaagcctggctctacttttcttagaaatttgagcttggacaagttcctttcctctctgaattttggtttcttcctcccttgagtgggtgtaagatttccttcccaactaatctcataagattgctgtaaaaatcaaatgaaataatagctatggaagtactttgtaaactgaaactactataaacaaatgaggtgctcagtgtcgtagctagcattttttagggtgccgtttgccagtaactacgacatgctctgtatacattaaagtatttaacctcacaacaatcttgcagatataagctgttattgttactctcctacagatgaggaaacataaagacacaaagtaatttgctggaggtcacactactagtaagtgatcaactgggatttgaaccaggcctaccttagtccagcagccaattcttttaaccactccactacctgctaggccttaatatgtatccaatgccttgtcacatacacaagtgaacttcaatctgcctttcagtgttaaaagacattgtattagttgcctagaactgccaaacagaataccacagaccaagcagcttaaagaacagaaatttattttttcacagtactgaaggctgcaagtccaagatcaaggtaccagcagggttggtttctggtgaaggctctcttcctggcttgcagacagctgccctctccttgtgtcctcccatggcctttttcctgtgtatgtacactcctggtgtctctttctcttcttataaggacaccagtcctattggattaggtccccactcttgcaagctcattaaaccttaattacatccttatggccctgtctccaaatacagtcacactgggggttagggcttcaacacatgaatctgagggggacacgtttcattccataacagacaagcaatagataaatactccaaaaaataaaaagtttgtctacttcccctctctgtcccccaccccgcccccagtgaaggattttttaaaaaaatctcatcaggtcaacaacaggcactgcagcaaaatttttcagctctgacttctgcccagataacttgctctcccataatgccaagcagctctgctgtgaaggaacgaagcaagttttgtgcaaaacattgaacatgtttctgttctctgcctcctgctcaagagcattctgaagaagtggaaagatctgtcccacctttccctcttgccagccattcctatttatagtttctgatgctggtgggtctgaaggagtcaagagttttgaaatcacttccgttgctctgcggcatgttccctgcccctgcattggcttctcctaggccattagaaacttattatttctggttcccatgtggtaggggttggggtcaaagggagacagagaaagaaagatttgcagcatgcaaaagtgtgggttcttttttttaaaaaagcctcagaggaaaataaattgtggttgtatccccgtagtgttttctgtttaggtctgctcataactacgcctcccagtctgttcctggaaacctagagaaaaagttttaggttgacttcatccttgaatcctacttcacagagatgctgatgaatctgagggcaaagagagaaaggcaagaggagtttgttgcctggatgccagaagccagtaaagggttttgcaatgcatctccctattcctggcggcacatgataaattaccagcatcaatctatctaacagtatcagacttcagaacttctgtcctttcaatctttgctttcaaatatatgacaaaacgtacagataaagctgaaatcctctctatgctgcttgcaagcctcatgttcctgtctgcctccccaaagccaccaccaccaggaatttggaaaacatcctttgaccacaaatatgagcagccattgataacgtaagatattgctttgtgtgtctttaaacaattatatacatacctgacggtatcattcttcaacttaatttttccttctgcattatactttcttgaaggttttctttctatgttacttgctggcgtttaaaaatttttaatttttaaaacaatttccatctctttaattagcaggacaagatgattcataacgttaacaaatcaaagtaactgagagacatctagaatctcaacaccttacagaatgttatcagggaatgctactccctcgatgtctcagtttgggactccctaagataaggacttgtatgctcttagtctatcaggagaacccagaaagtaagagtgagggaagtggggcggtgggcagtggaagccaatataaatgtacattactgaaactgctactgagcttggacaacaagggacaacgtctgtcagtacctcacgaaaagtgcaccaaacgctgcccagaaacgctgccccaggaggcggggatggaaccttcatctgccagctcctcttccccattggttgaagatggcctcagggcactgacttccccacacttcagactatcccttccatgagccaggaaggcttcagaacaggtgctgaaggaaaacaggaaagaaacacagtgcacacttccctggggctcagtcacccacctagaactgttgggccatctgaacctggcctccagctaggaccattgaagctggacaacagctagtagcaggcctctgtcttccttacacatgaatctgacttgactatatggagtagtgctgccctgcttcctgaaattcaacgaatgatggggagagtaagttttccaattcccacgagctgtctcagttagaaaattccaaacaaggggtcgccatctttgaagtcacccatctcttacagccccaaacaaacacacacacaatatcaatgctatttacgccattcatctttccacattcttttctgtatgtagaataaaagagcagctgcccagcagcatgaaaaagtcaacacctttctgggtggcctataccagattacagttcaagggaatgagccacatgtatttctaaaattccagcgcatagtagatgctcagtaaatttacggtaaagtgttgactcctacttcatatctaaaaagtcagctttactttgcattactcttcaaaggatgagtccacaacctaaggtggtttcatacagtgttcaggtcccttatttatctcactccttcccatcccctgggcagtcacaggacagacgatgggtgtgttgtgagaaataaagggacccacagcataggctctacatagggcaaaaggcaacagtggggatttaatgtgaggtggagggggaacaaggagttggtaaggaagaggtcagtagctcaaagggtgagtgggagaaactaggaagtgttgtgggttgttgctgatgaaaactttccgtatcttcacaattgctaggagtctgctgtgattctctttatgtgcaaaactccattctttccagtcatctctctggaataatttctatattcagagccttcttgttacttgtcattgtcactcagattgcttaaacttacatgataatctattgtgttcagtccaactatgtcagcattgccaacattctgcagggcagagaacatgtcagctgacttcactgtggtgcccagcgtatttgcagttctcagtgaacccagttaactgcccattccctcaacccagatggcctttcttttgattaaacatatgaggcttccaatgccaaagggagacagaggatgatagttattttctggaagactccagccataatctcacttttgcctaagtgtgattttgtttaccttaattgcctttgtagctagagggagactttactctatagggccagaaaaagacctacgaaggttatttatcatcaggataacaggcttaattatctgttagaaatagagactagatccctctaccctttcatgctgtctctgggaagaaggtcgatttcccagggccttcccttttcatctcaccacctttcaccccttccccaattaaggcaaccaaaaataaaacactcatcggattctacaaatcaggagaggacccttaggagaaataacaatatgaggtgtcttttgcgtcccatccacaaataataccttttatgttattggttaggtatgatctgatgttagactttcaaaccatgagtcaagtaaacacaaaagtctgagacttgctaaactctaacaccctgttttctggctaccgttttttcccctcaatagtctcaatttttaggtaatatcctgtaactgcaaataggttttagaagactgatttgattttttttagttaatcaataaggttcaaatgtatttttgatttactaggctgcgaggcatacactgcatttatattagagctgagcattataggaagcaaggactgtcacttctaaaggatgccaccatccacacacttcctctgtgttttcccccttctggctacaagagcgttcatcattcctagttctttatgcttatataacatctcaacactttcttagtttcgatggaagacaccagaatatttttttcttaaagaactctgtgctatagatatgcatagatggcttttcaaaacaattaattagagatgtagcttattcttgtactccataccaaacatacaatgaaacactaccctaacaactgggtagggtaccaatttcaagattaaaagcattagccaggtgtgttttttcaaagattccatttttccaaacatcatgttcaagcaaaaggatcaagtgcattgatggttttctaattattaaaggaaattttttttttaatttaacaaccattactgttttgctgagtggttcctgttgatagatattatgccatgtctgtatgggtgataattaattttatgtgtcaacttggcagggccatggatgcccagatatttggtcaaacagtattctcagatgaggttaacatttaaaccagtgcactgagtgaaacagatagtccgccctaatgtgtgtgggcctcatgcaatcagttgaaggcctgaatagaacagaaggttagccctccctagagtaagagagaattccttctgcctcgctgccttttatctgagacactgggttttttcctgcctttggacttcagtgaaaatgtcagtgtttcctaggtctcaagcctgccagcctgcagactacaacttacaacattggctttcctaattctccagcttgctgacacaccctgcagatcttcggacttcccatttccataatcacatgtgccattttttaataataaacctttatagctgggtgtggtggctcatgcctgtaatcccagcactttgggaggccgaggcgggtgaatcacctgaggtcaggagtttgagacgagcccgggcaacatggcgaaactgtgtctctaccaaaaatacaaaaattagctgggcatggtggcatgcacttgtaatcccagctactcaggaggctgaggcaggagaatcacttgaacctgggagatggaggtttcaatgagccaagatcatgccacaacagttcagcctaggtgacacagcaagactccatctcaaaagtaaataaataaataaacctttatatagtaaatctgtgtgtgtgtgtatatatatgtatgtgtatatatacatataatgtgtgtgtgtgtgtgtgtgtatatatatatatatatatatatatatatatacacacacacatatacatatacatataatgtcctgttggttctgtatctctggagaatcctgaccaatccctaatacagcaggaatctaaaagtcaagtttgcaaaccaccattatgcccagtgtaccagttgggcttcatttaacatgtaagtccacatgcaattctactcattttctggattaatgaaggtgtggtgccagctggaccaagctgtactgactacatctctagagcttcaagtggcatcctctgcatagcaatattttgtgacttttcatagcgcattttttttttctttttttttttttctttttgagacggagtctcggagtcttgctttgtagcccaggctggagtgcagtggcgcgatctcggctcactgcaagctccacctcccgggttcacgtcattctcctgcctcagcctcccgagtaggtgggactacaggcgcccgccaccatgcccagctaattttttctgtgttttttttaagtagagacggggtttcaccgtgttagccaggatggtctcgatttcctgacctcgtgatccgcccacctcggcctcccgaagtgctgggattacaggcctgagccaccacgcctagcctcatagagcattttcataagcctgacatcatttcattttggccttcatttagaaataatgatgagtattaataagtgcttaaggcacaatgtctcttttctcatgagagccttgtcaaatgagtaagtgagcttctagaaagtttggtgcaaaatggaaatgtgcatataaatgcaaaagtggggggatatgggtgttctaagctctgtaaacttaggtacaacttcccaagctactgcttatctctggtaaggagttggagggaactctgaattttctggagagagctgttcaggaactatctgtcatagaagaattaaataagtcttgtttggaggaatactgaacaggagcatcctatctgttttctgctacttaatattttaaagcaagcccattctaccaatggttttgttagactttcatgttttttttttttcttttttgagacggaatcttgctctgtcacctaggctggagcgcagtggcacgatctcggctcactgcaacctccatctcctgggttcaaatgattctcctgcctcagcctcccaagtagctgggattacaggcatgcgccaccacgcccagctaatttttttgtgtttttagtagagacagggttacaccatattggccaggctggtctcgaattcctgaccttgtgatccacccaccttggcctcccaaagtgcagggattacaggtgtgagccactgcacccagccagctttcatgttattctaatcaacacacagtgccaggtggcagacactgtgtcactatgaggaatgcaaatcaaaccccagtaaaactcactccattttaaccaaaggcaattatgttcttttatataattggtctttatttggatcaaatgctactcaaggaggggaaaggaagtttaagtaagtcatcaaagagaatcagaaaattccacatctgcaaggcaccttacagatgatgtaagttcaagtaagtgaagacaaaggaagcctagcaagcttaaacatccactcccggcttatgaacctggatggcaccaagctagcagaacagcattacctacaagactgtagtggtcaggtcttgtccacttatgtgaggcctctgctggtaccagtaccctatttttcttctgtggaccctcaccctacctctactctcaatctgcattataccattagagctgacctaaactctagctcccggggaaagcatgtgacccaggaatggcaaatctgaatcttccaatccccagacaggcatcgggttggtgacaggtatgtgatccaagtcaggacaaccacagacaattctaagactttttcttacaactggacaaaaaatgcatctttccgattatggagctcctggtagcttatcacaatttggaaagcgcctgaacaataatgaagtaaacacagagagcagggccaacagatggagagaaagatttctgaaaacactgttgaagcctgttggggttgaaatgtgtccgcctccaaattcatatgttgaagccctaaccttctgttcctcagaatgtgaccttatttggaaatcggttccttgtagatgtaattagttaagatgaggtgcctagggtgggcccctcatccattatgactggtgtcctcataaaaaggggaaatttggacacagagacatgcatccaggaagagcaccatgtgaacatgaaggcagaacttggaggatgctgcatgtgagggaacaccaaaaattgccagcaaactaccagaacaaaaattgtcagcaaactaccagaagccaggaagagaagcaaaaacagattatccctcacagcttcaaaagaaaccaaccctggtgacacttgatctctggactctagaactttgagacaatatatttctgttgtttaaaccagccaggctgtggctatggcactttgctatgacagccccagcacactaatatacagccccgaccagtcttgcctgaaggaggcttaccctagaatttttagtttcctgaactgaaaatttatttttttctttctttctctctttctccctctttcttttccttttttttttttttttttttctttacaggtatcactctctggcccaggctggagtacaatggtgcaaacatggctcactgcagcctcagcctcctgggcccaagcaatccttccacctcagcctcttgaatagctgggacttcaggtgcatgacaccatacctggctaatttttgtattttttgtagagacagggttttgccgtgttgctcaggctggtcttgaacttctgggctcaagtgatcctcctgcctccaccttctaaagtgctaagattacaggtgtgaactgctgtgcctgacatttttttaaaacttaatccaatttgattgagtttctagcatttgctacataagattcctcacaaatactccattaacctacaagcatcagaggaggggagcgcaggatgttgatggaataagactgtgtcacctaggaaaggttgagggagctgggaatatttaaccagcaaaaagacaactttacaggaaagggggtaaggaagagtagcaccatcttcacataagctccatgagagaagggatgtcttctgtgtgattcctttctgtatttccagttcctggcacatagtaagctgctctacaaacatttaaagaacaattgaaatgaacatctcagggccgggtgcagtggctcacgcctgtaatcccagcactttgggaggctaaggcaggcagctcacttgaggccaggagtttgagaccagcctgagcaacatggtgaaaccccatctctactaaaaatacagaaagtagccaggcatggtgatgtgtgcctgtagtcccagctacttgggaggctgaggcatgagaaatacttaagcctgagaggccgaggttgcagtgagcaaagattgcaccactgcaccacatcctgggtgatagagcaagactctgctcaaaaaaaaagaaaagaaaaatctcagggtccttcattgcaagcaatagaacatgtttaagagaacaaaaaaagtaggggaaggtttattaaaaggttattgttgaagagaccaaataactgctagggatggctggagaacccgactagaacgagcagccagcatcataaccaaaatcatgccacaaaaccagatgtgaggactccactcacatttgtcactgttaccaaggactaagagaaattttttacaaaaacattgcattccaatctcagtttacccatgctacattctggtccacaaatgtaaaatattcataatgtcttcagggattagaccatgttggggatagctctgctgccaactcttctaacacaaagtaatgttttcaatgaaacaataatcacggccgggcgcggtggctcacgcctgtaatcccagcactttgggaggccgaggcgggcggatcacgaggtcaggagatcgagaccatcccggctaaaacggtgaaaccccgtctctactaaaaatacaaaaaattagccgggcgtagtggcgggcgcctgtagtcccagctacttgggaggctgaggcaggagaatggcgtgaacccgggaggcggagcttgcagtgagccgagatcccgccactgcactccagcctgggcgacagagcgagactccgtctcaaaaaaaaaaaaaaaaaaaaaaaaaaaaaacaataatcacatctattaaatgtttgctgtgtgctgggcttcaggcactacatgtgtccggcactatgtgtgtcaggcactgtgggattatagatggatggaatagcagagttctgcagggatatttaacaggtgtgtgtctttagttaagtgactgaactcctcagtacctcagtttctcaatttataaaatggcaatgattcttagatgacatacctcatacattcttaggaggattgtattaaaattgagttagtatatataaagtagctacaacagtgcttggcatatagtaccatgcgctcttcatcacaattctataagtgtggtgtgacattttatgatgctgaaactaaggtccagtgagcattagtgtcctgtgcatagtaacacaaagtggttggtcctagattcaaatagaaatctatctgattccatactctgaaatcttaggcatctacaggattgacattagaagcaaattatgttgaagtgcctcagtcatacctgaggtgtaaagccgtgcacagttttggacaacagagaaattagcacaattttcaaaatatatttcctgctccatttttgcatatcttacacaaactgcttagatacctaagtagtttcaagtatttctttaatagattattagtaaaaccacaaaggcaatacaagtgcttaatttggaacttgcttagaacctgaatgcagggtgcccgagcttgcaaagcaaaaatactggttgcccaagtgtgtgattttatggagcagaatcgggttagagtcagtctagattagcagcaagtcagcctcagccagtgccacccatcccactggaagtatgaggaaaattattgctcttctccccagaaaaatatacatataatttcagagggttcatggacatgtaaagatatctgtaaattccaagtgaatatcccctcttcttgattagtgactctaaaatagttttttaaatctgcaatcattttttgattcagcatcacaccatagttcctcctaatgttcagtaaaaaactaatatctgcatgctagtatgtgaagttgcatagaagccagattttttcatccaacaaatatttatcgagtgcctagtatacatttgacattgtttctaggcactggtgacatagatatgaacaagataaaccaggcccttgtcatggagctgaaattctaagggcgaaacctacaataaacatgaaaaagcaacatacgaaataaaacagggtaaggtaaccaagaatggctggtggctattttagatggggtgggacaaggaaggcatccctggagagtcagctgagctgatacctaagtgaggggacggagtcaacagtgtgaagcactcagaaacggcacttcaaggcagaggaaatggcaagtgcaaagccctaacaggtaagggattggtctaactgagaaaccgaggcaggaccagtgtagtaaattaatactgaatttaaggcttcagtaaatctaatactgcactaagttcagtttctggatatttaatttgagcaagtactaataactacttagtaagtacttaatagatttttaagaacactctggtcctgcataataatgaaaatctaggaagccaaaagatgtcaagaaagaacgaggattttcttttcttttagacacagggtcttgctctgtcacccaggatggatagcagtaatgcgatcatagctcactgcagcctcgaacacctgggctcaagtaatcttcctgcctcagcctcccaagtagttgggactacaggcacacaccaccatgccaagctaatttttaaaaaatgttttgtatagaccaggtcttgctatgttgctcaatcgggtcttgaactcctaggctcaagccatcctccctccttggccttccaaagggctgggattacaggcgtgagccaccatatctggccattttttcaattatcaaataccctatcaggaaaacctgcatggctatcgatcaatttttaagaaattgctgaactaaattcttccttgggggacagccccaaactacctctatgagctggaagcttacatgcacccatcttttagatcctgcctcagtccctgcttttacttaaagcagtaaatcttcaacatctctaaattatattccaaacacaagcttatttttggaagaaagacaaagtctcatgtttctagtaggcatatttcaagtttggggaaaaaaataaaagtaattacagttctgaccataagtcaaaactccaagactttctaaaaatgccttacaaaggcaagactttctaaagaaccaaaaaagaaggaaaacattaatttaaaaactgcaaaagtttttatcctgcctcagaatttcaggaatgctgctataatggattcatcttagtgcagatgaagtcgaggacagcaatagagttttctatcacccgcaacagcagccatttcactgccatttaacaaaacatcaccaaagtagtggttccctgaagattcttcctataaagtaatgtaaaaagctggtggcattcaactttgagtagatatatatgtgtgtgtgtgtgtgtatatatatatatatacacacacacatatatatatatatattttttttgagactgagttttgctcttgttgcccagtctggagtgcgatggcacgatcttagctcactgcaacctctctctcccgggttcaagctattttcctgcctcggcctcatgagtagctgggattacaggcatgtgccaccatgcctggctaattttgtatttttagtagagacgggctttctccatgttggtcaggctggcctcgaactcccaacctcaggtgatccgcccgcctcggcctcccaaagtgctgggattacaggcatgagccactgcacccagccagagtagctatatatttttaacccatattgaaataacacagagatctttccgtttattatctagtttattgagaaatttactagatgaaatgcattagcttaatgtcaagggaaagaaaatggaaggttttccccatcatcagggcattaagcctgcaggacagaattgaatgaaataatatttattaagcacttagagacatgttgaaagattaaagtgttagctcccagagaacattactgcatcttttgtgtagggctttcaaaaattttattttacttggcccttataataactattatagttatcatattagtctttgtggttgtaagtcaaagaagcatgtcttaaacctgcataagcataaaagggaatttattggcttatataaagtgtgatgcattcaggtctggctagatccagaagccaaactacctctcttactattctctctcattctctattgttcctttccctatgtcttggcttcattttttctgttaaatttaacatgttagtgtcattttctcctgttgcagattatttcccacaggcagctaaagcttacatcatccttgcagattgcaagtccagatgaagtggacgtcagatcgtgtggaaagtctaagtggccctactttggccatgtaccctttcctcgaaccaatctctatgaacaatggaaccctttaccatctgtattagtccattttcacactggtgataaatggactaatacccgagcctgagtaatttataaggaaaaagagatttaatggagtcacagctccacgtggctggggaggcctcacaatcatggtggaaggtgaaaggcacatctcacatggtggcagacaagagaagagaacctgtgtagggaaactcacctttataaaaccatcagatctcgtgagacttattcaatatcatgagaacagcacaggaaatacccgcccccatgattcaattacctcccacaactgggtccctcccacaacacgtgggaattgtgggagctaccattcaagatgagttttgggtggagatagagccaaactatatcatcattgacgaggctcatgtctgtggccattccagtggccaggcactggatatgattgacagtccaaccacagccatatggaattagggttgggggtactcactcagcaatggaaaagggagtgctaagctgacaaaagctacaaatagacagtgccaatatggttagccctattttgcagatgaagaaactttaatggtgaacttaaccaaattaaaaattatctgttaatgcctcaaatctctacccgaagattaagccttccattccaaaagacagataaggtgtaaattgtacagtaacacaatgaattaaattcacatcgaagtaaaactatctgttacaagatccttctctgagagtctgtcttatttaggggacaaatacagtgtctaactaaaggaggaaaaagaaatgcagcaaggagagttgtttgagtctttgtcattctttctctaggctgcaaactttctgaaggaaaaatctgctacttcctcttctttatctcctgcagggcttggcaaatgatagcacacagcaataaagggagccaaataaaaagaaataaattagcaccctttgcttgtcttcttttcctagtaaactgatgtcagatcagtatgtcaccttcaattctatgttcatctgatagataggactgaccttccacgttggcagaaactgaaggcgtttgatagagatttgagagcagagcaaataagccagaatcaagaatttacagaatatcaaagctgag

SEQ ID NO: 2221 - DNA, 5301 bp, Homo sapiens
ctttgctctgtctctctctctcttgcttcctttggttctggcctcataaacaccccaagggtaaaacacacacagtgtaagattcacacaaggctaatccctgtcctctttccgggggaatgcacttctatctttgtcatggtctttgttcacccctaaaaatcctcattcatacatgaaggacaatttcatgatacttttctgaggctgaactttacatcaaagtgggtgattaattactgataagggtataataaaacattaatgcattttgtaattaaccagcttaggaatgacatctcccatcgcttcatgagtgacatgttcacacacacacacatacacacacagaactttttttaaaaaattctttatttggctattaatctcagcagtgccctcaatacattacattctttttaaaagccacatatattttcctcaatgaaatatctaatccatcttgagtgtaaggaaagcccatacataattattccgtcgtgacagacagtgagctttctcgctattatttttgatggtgctgtcatggatgccaaatgtatgttgtggtgggagccagccagagtcgggaacccacctggagagcggctcctttcttctctcaggaaaggttccccacgcctgacagccccaccattctggttaagcttaattagtcaagagagaaaaagaactgacttcggagtgttgtgttacgtttggggctcccccctttttttcccctttccactcaaaatttgacattctttggagaagatgaagttccaagtgggatctgtgttggcacttcccaccctctcgtcatcctcacgtgggacccgcttctcacggcccatcttttgtctaccaggggcctcgcaggactctgcacagcccgcacaaaggacgtaggattctgcactggcagaactggatgtaatgttgccctgagaaacattcatttatttcagagtgaaacccgttaaaatggaagtgtgtaggatttgggttggctggatgcaagcttccctctgcagcgggatgaggctgccactaccaggagcacgctggcctgccggcgggaggaacagatgccagaggagacctgactgtgtcctcaaggccatgccccatcagccatcccagcagagcccacagccacccacagaggaatgaggatccccatccaggatcaccggaactgcacaactgactcacaaacgtgtgaagagtaatgggtaacgtgttgaactgtgagcctttgagcctggggaggtttgtgatgcagcagtagctcccagacccttgaggctcttcggcacgaaggtgctgagccatgcacctatgcaaagccaaactctgcactaggcctactggggtgtgcagagagagagggctgaacaaactgcggttccacccagaagacccagaagaacatttacggaggagtcagtgcaagaggcgagagagcatgcgtgaagaggctcgttcttgtggtgtagaaaaggaggccagagtctcccagaccacgattcttttcctttaggtgtttcttgggcattttcaatcttaaatctcttcccatgttattgagatttctgattgaatgtccccattttccctcagacagcaggccgtgtgtgagtcaccacctccatctttctatgtcctgggtgtgggcccagtgaaggacagttatggaaatttagagagaagaggtcgcaggtgtggtgggggtggtgaagcttcagaagagaaaagaagcatggtggagagggtggactctggaggctactgcagagctctcccccaggctatgagggggcatgatggtcccaatagcctgagtctgtgttcatttcaactggctaccttgtgacgaggaagatggcccaggttcccagtgggaaatctatggttatcattaagaacgcagggcctgagatgaaacctggcaggtgaaaggcacctggttttatgcaacctggttttgcagaagcctgtgggagggggcccaggggggaagggagcagagggcagtgttggctctggttcccccaccaggcaggtgggctagcacctgggtaaggggctttgcatctggagctggtcatgcctcagtccagatcctgcctttatcagttgatgggctgttacctgccagtggttatggtgaggactaaattacggaaagtcatcaaggatcttcattcattgcccaccacagagcaggcactcaatggagaacactcaccaccatctatgttgttaatgttgcatctgcagcccttggtttcctggaaagactctacagtacaggggcaggttaggggccacaaccaggaaacaagacacatctgagagaatgcatgggagcttatggaaggatgtacaaggctgggtgtgggaatcccggcacttcgggaggctaaggtggaaggatcacttgcatccaggattcaagcctagcctggccacgtagtgagaccccagctctacaaaaaatcaaaaatcaactgggcatggtggcatgtgcctctaatccaagctactcaggaagcagagatgggaggatcgcttgagcccaggaggttgaggctgcagtgagctgagatcataccactgcactcattctgggcaacagagtgaaaccctgtctcaaaaatataaataaataaataaataaataaataaataaagaaagaaagaaagaaagaaagaatttacaagaggggagttttagtggttgaaaaatcattcactcattccaggagcaagagccttgtgggttttcttcctgttcttgcctgggttatctctactgaaccaaagaatccttgttaggaatgctctggtggtgtcaatcaatgcgtttataaatcatttgcttttaccatggaaaaagatatcacaaaacaacacagctgtagtgcaggtgcagatgaccatggaacggcagcctggcgttttcagtagagcactgggcagcagagtccctgggcctcggaaccccggcctgttaccacccaacaccatccctgggcaaaatgcgaaactcccatcagatccatgaatggaaaatgggcgtaattataattgcaccccactctctacctctcagctaaggtgagaaatgaatatgaggatgctcagtgaaaatgctttgaagtctgtgaaatgcgaagcaaatgtgaagcgagaggaataataaggttctaaggacccacacttgggcgtttgctctgagctggcccctgtcctccacactgaacctacagcctctcctctcacctaatctgcacaaaaatcttacgaagcagacacacttaccatgctggcctttccgtgaaatttcaggtcttagtgtcgcccattactggtggcatttcatgccacaagttgggccatctgcacctccaagcacagggtcacagaagactttatcccgtcccttgggctgactgaatggttggtttgtgtcaacccctgttgtccctttgagcaactcgggggcaatggttatgggtagggcttaaaaaaccgtctggctgcaaacccagtgctgatacgaacaaggcctagtcaggcactaagtgttttgtgttccccaaagagatcttaatgaaatcccagcatgccactcactcctacacttaaaataccttttaagtgtaggaaagaaagtgctttcaaccccaccccagccatttggattcggagactccatttaagatgcacagctttcctccagcacaggggctgggtatccaaacgcagagcctcccccagactctctctaggcttagcctggcttggtgggctcaggagggattcaagattatttcatcctttatgtccattcgatgacagtttatcatcattgccacctcatactctattgtagccaaacatcataaccagcaccatgtgaactacgtcactgacgccacattctttttctcggctgtcactaggctcaggtcaggacagccctcccggctgacttccgcgatactttctgtatctccttttcagtctgccctaaaatgacagctggacttccgacagtggtttcttatgtgggacacatggctcttatactctgggtggcacggattcctttattgccagtggcttaattttcccagatctatttccatgcagacagtgtgaggttggacttcatgcctcatgctcctgattggggctcggaagtctaacccagcttcctgcagtgccgcccccagcttattcaatgcccaacctgcaggtcctaagttgaacccgcacactgcacgctcacctggtctgtgctgccagctgcattggaaatggaagcattaaacaccgttctccactgtcagccacctgctagctaatgagtgacatcatttaacactgttttgaaaagagagatttaaagttgttttgaaaactgaaggaaaaatacaaatgtttgagtgttaaacattttgcccaaatactaaaatgtgaatgtctttttattgtgacagttcacaggaaagcgggctatagcatgcctgtgcttgtcaatgaaaatcttagcactgagtttggtaaacattctggcagtcgggaagccacttaaaaataaagtttaaagaaaagaaagagaagtgttcactttccttctaattttcccagatacgctcaatattctgctttattttttagtattttaactaaaataagaaaactcggattctacctctatgtgtcctatgattgttgttgttttctctgattataaaatacaggtttgcagcagaaaacttggcaaaacagagatatgaagaataaaataaaaatcacctgtagttctaagccatgagaataatcatatatatattccctaggtattctgaagcatatgtattacagtccaaatatttaaaaacaaaatttgggtaatactttagatagagagttgtattctgattttttctattaatattataactttgaaacgagggacttcaccattgcttttatttttctttgctatgtaagtacttatgttctttatgaggaaaataaaaactatagaaaagaaagataagaaaataaaatcagtaataatcccctcacttacaaatgactgctgttaacattttagttttttggtttctatctatttatgtgaaatttgaatgaaaatagtataatttcgctgtctctatattgcttggtaacataatgatttaactgtataataaatagtatattacatgaatattttgagtaatagtctgtgtgataatttttattcggtgtgtggtg

SEQ ID NO: 2222 - DNA, 2185 bp, Homo sapiens
tgacagagcaagaccgtctcaacaagaaacaaagaagacagaggagctcagggctcagggaagagcatgcaggggcaccaggccagcacccattaggaagctcatccagaagaaggcttgaggtcccgggggacccagagggctagggcttggcggaagaggtcccctgcaaagggaaggcaggacagagcgggaggatgagccaggctttgcagggtctgcccacacccccgtgcccactcctctctctcctgcagatgatgatgccaattcctacgagaatgtgctcatttgcaagcagaaaaccacagagacaggtgcccagcaggagggcataggtggcctctgcagaggggacctcagcctgtcactggccctgaagactggccccacttctggtctctgtccctctgcctccccggaagaagatgaggaatctgaggattatcagaactcagcatccatccatcagtggcgcgagtccaggaaggtcatggggcaactccagagagaagcatcccctggcccggtgggaagcccagacgaggaggacggggaaccggattacgtgaatggggaggtggcagccacagaagcctagggcagaccaagaagaaaggggcgtcaggcagggaattctggtgacttcaggggcaaagaagtgggcaccgggtgggtctcccaactccactgcatcctcctggctgcgaccttggaccaagtgacaacctcccagaacttagttcctcacttggtgcccacctctcagagaagacatcgcacacacggccgggcacggtggctcacgcctgtaatcccggcactttgggaggccgaggcaggcagatcacctgaggtcacgagttcgagaccagcctggccaacatggtgaaacttcatctctactaaaaacacaaaaaattagccaggcatggtggtgggtgcctgtagtcccagttagttgggaggctgaggcaggagaatcatttgaaccctgaaggcggaggttgcggtgagttaagatcacatgcactcaaccctgggtgacagagcgagactccgtctcaataaataaataaaaaaacagacattgcacacaaagcctcagcccagcaggcactcggtcaatgctggaaacagacaggaggcagggacgttgggaaatgtaacagtggctgagacgcgctgaggagccaccgcaggccagtgagatggtgcggcgctaagcgctcacacgtgcaccatctcttagcacccaaagccacagagcagttaagccacctgcccaaggccacatcttgaagtaaggggaggaggagatggaatccccagtggtcagacatcagacatcaaagcctaggctgggtctactgcttgggaagcacgatggacccccagagggccttgaaggctgcccaaagtccccatctgggagacccaggccgtcatctcagcgagcaggctggagggtggaaaccacagtgaacctgggtggtcaagagtcagccccagaggcaggtgcaggagtttgagccaaatgtgcagagccccacgtcattcattcaaccagtatccactgggcccctgctacgggcaagtcctgctctaggtgctgggaacaccaacataaagaacagcaaacccctgaccccttagaacttgcattctggtaggagagagaaaacagatagggctggacacagcggtcatgcctataaatcccagcacttcgggaggctgaggcgggaggatcctttgagcctctgagtttgaggccagcctgggcaacatagcaagacctctctctctacaaaaactttttttttttttttttgagacagagtatcactgtcactcaggctggagtgcagtggcgccatctcggctcactgcaacctccacctcctgggttcaagcgattctcgtgcctcagccttccaagtagctgggattacaggcacacgccaccatgtccagcctctataaaaacatttaaaattagccaggcatggtggtggatgccctagagtcccactgacttgggaggctgaggtgggaagatcacttgagcctgggaggtcaaggttgcaatgagccatggttgctgcagtgagctgtggtcgtgccactgcactcaagcctgggcaacagagcaagaccccatctcaaaaaaaaaatttaaaaa

SEQ ID NO: 2223 - DNA, 507 bp, Homo sapiens
ttaagccagcagtacaaaaagaaaagaaaagaagctatagcaaaagctccactaactgacctgtggaaagagagtcacaagcatgggcgaagtatctcccttagggagaacaagaatttgttctctgtcttgtgtctcaccaacaaaatccagcatctgatagacaaagagtcacagtgcataaaagaaatgtccgcctgagtgccgtaatcaccatgtcatcccgtcctcctctggccatcagcctaggcagctggaaaggtgacttcctgaccagaatgaaagaatcctagcagccacgaggagctgagccttgtggggtatctcaggaccaggcatgggtgacagtgatgctggcttctgacagggaagatcaccctagccagcaatggaactaactgggtcgtgggaccaggaagcatccctctttccttgtctgtgattagtggttcacattggatctcacagcctccttgggaggcagacagtgcctctagcatcatctcc

SEQ ID NO: 2224 - DNA, 25505 bp, Homo sapiens
aaagaatatatatataaatatatataaaagaatatatatttatatataaatatatataaaagaatatatatttatatataaatatatataaaagaatatatataaatatatgtaaaagaatatatatttatatatataaatatatatataagataaaatatatatatatttttccattttgaacgtattgggttttttccatgctgtttcctactctcctcttttgcacccctcccatttccttcgtttttcttcgaaaatttcttccccctccagttcgctgtccggccctcacatgtgcgagaggggcagtgtgtcgttaatggccgtggcgggcaccgggctgctcctgtagtgctgggacatgtgaagttggctggggcggcgtgttccggcacctcggcgcgggtaaggtacgtgctgatcaggtcccggaggtccccggcctggcagggcgccctggagtgggaggaagaggtaaccacagcggggctggagtagggtgccctactgcgagtaggacgtgctgtaggtgggcgagcagttctcgcaggtctgcgaactggtcatggagttgtactgcagggcgcccacgtcatagcggtgtatgggctgcatctgcgcggcaccgttggcgtggaggcccgggtgctgtgcgtagcccagctggtcctgcatcatgctgtagctgccattgctccagccgttcaggtgcttgtaactgtccatgcgctggttcacgcccacgcccagaccggcgcccaccccgaccctgttgagccaacttttaagttgccacatgacacatcttgtccatcagacctatatcacatgatcacactgagctgaaagagaaactttaaatgtcttcattctgtatgtccagttgtataccaaaaactggaagaagggaaggacatcttgggggacaactggctctcttatgacaatccaccgctttgaataccaagttttcatgcctcatttttttttccccagtgtggaagatacccatccacaagagagtgggctcaaagtgactgcatttacttctaaatgtgccatactctctataaggtcttaaattagctccttgttatacttcataaatgaaaagagtatcttcccctacgtacccagagtgtagtaacaatttcaattcagaaagggaaagaggccgggcgtggtggctcacgcctgtaatcccagcactttgggaggccgaggcgggcggatcacgaggtcaggagatcgagaccatcctggctaacacggtgaaaccccgtctctactaaaaatacaaaaaattagccgggcgaggtggcgggcgcctgtagtcccagctactcgggaggctgaggcaggagaatggcgtgaaccccagggggcggagcctgcagtgagccgggattgcgccactgcactccagcctgggcgacagcgagactccgtctcaacaaaaaaaaaaaaaaaagaaagggaaagaatgggcaacacaactctcactagttcctaccagttatcaaatccaccgccactatcccccagcagaaaagcgggataaaatacgggactcatctatttgaaggcagtagaaatctgtccaagcaggactctaaaaaggagtgaacatttctgaggtgagctgacctgtggctgcttttagtttgggggcacttgtccattctggttgcagaccggaggctggtaattttgattttgtatttttttaaagcttgcctccagaggacagcaaccaagaaagcttttggtagagatatggaacagccttaaacatgggcaatttccactcagaaaatttgcaaagttgtggtgctgtttaggagagaaaacaaaagtaggcagaaagcttcataaaacaaagattaaaaatcaggacttgccagaaggaggggatctggagaatatcctaggtgaccattagaaaactctgaggctaggggcacgtcaaatgtagaatgagccttatgccaagatttgtaactctgccttgatttatcatgattcttggttggattaagttctagcagaagacaggttgcctcactgaagaaagacatcacccaaagccagtaacattaaaacatctggaaaccaatggaaaattacaagaaatgccaaaaccacatggaccacgtgaccaaaaactaagagaaaaaaaagtgacatgagaaaccaagccacagacaattcacatattggagttcactggcaagaactctaagataactatgactaatgtgtttgagacaattatggataagataataggcaaagactttgatcagaaaagtaatctataaaaatcaaatggatattctagaactgaatacagtgtctggagttgagaacacagtaggtggatgtaatagtggatttgtgtaacaaaagacaagattagtgaactacaagacaggtcagtagaaaaaaatacatactgaagcatgtattggaggcatgtaaacacaatgaaaagcctttagaaagataattggagtcttggaatagaatggggccaaagtaacatttgaccaagctcagaaaactaaagcaggacaaagaaaaatagaatcacacttaggcacatcaaagtaaaccaactaaaaagtaaagacagaaaacatcttaaagacagccatctcccacagaaacaatggaaaccaaaaagactagaataatacttttaaagtgcttacagaaagtagctgctgatctagaaattcataccctgcaaaaaatatccttcaaaaatgaaggtgaaatggggctgggtgcagtggctcacgcctgtaatcccagcaccatgcccggctaattcttttgatttttagtagaaatgaggtctcactgtgttgcccaggttggtcttgaattcctgagcaaaaaagattctcctgcctcagcgtcccaaattgctgagatgacagctgtgagccactgtgcccattttgtttttggtttgtttgttttttaatttggctcttttagttgattttcatgggagcattgatctagagcaagttagtacatcagtagtttccaacctcgagatgattgtgtcccctccccaggggacctttggcaatatctggagacatttttgactgtcatagattggggtcagtgaggatactactggcatctagtgagtcaagactagggatgctggttaacatctgtaacaggatagccctctgtaacaaagaattatctttccccaaatgtcattagtatcaagattgagacatcctgcattataaagttttgattttagtatttttttaaaaagctctctgatttcagatatttttctgattttacatttaaaagaccttaaatggcacacaaacggtataaattcaagttgatgaacattgagttcaatgtgagttaactgaagagaatagccattggattcttatgtcacccctatttatctctctagagatatatggaggataacttggtggacaaaatacagttagaagctgagaatattggtctcaatttcagctgagaatttgagatgaaacatgtatgcttggaagtcatttatacacagctgttagttgaagctattgtaatgtataagtcttctcatttgtaaagcacaagagagcagggccaaggacagaactcttaagggcaggggaaggagggaagaccattggtgtttaaggactccattcctccatatgatcaactcaatagatgcaaaaaataaattgacaaaatgtaacacaataatcaaacatccatacatgatagaaacttccagcaaactagaactagaaacgaacgttcacatcctaataaagtgcatctgtgaaaacttacagcaagcatcatacttaaagtgaaagactgaaatgctttctctctaagatcagaaacaaggtgagggtgtatgctcttaccacttctagccagtgtaataaggctaaataaataaatgagtaatatccagattagaaaggaagagatgtcttaatttgcagatgacacaattatctatgtagaaaatcctaattaatctaccaaaaagctaccagtaccaatacatgtttctcaaggtggcagaatataagatcaatttgccaaaatcagttgtatttttatatagaagcagtgagcaatcagaaattgcaatttaaaaataatgtaaaaaataataaatatttaaggataacctgccaaaagacatgtgagacctgttcgctgaaaactagtaaacactgctgggataaataaaatctaaataaatagacatattgtatttatatattagaagattcaacattgttaagatataatttattctcaaattcaactatatatattcaatacgatttcaatagaaatcctagcaggcttttaaaagaaattaccaaatttatatgaaaatgtaaagaacctagaatagccaaaacaatactgaaaaaagagctaaatggaggatttacactatctgatttcaagatctattaaaaagctacagtaatcacagtataaagaaaggtaaacagagacaaatggaacaaaatttgtccagaaatagacctacagaattgattttcaacaaaggtgccagggcaattcaatgggaaaatgataatattaacaataaatggtgatggagcaaatggatatccatataaacaaatagtgaaaacaaagaacaataacaaaaaacaaatgaacttcaatccttatttcacaccagcattcaaaaagtacttcaagataaatcatagtcctaaatataagaggtaacgtataaaacttcttgaagaaaacgtaggagaaaatctcagtgaccttggcttggcacgtgtttcttaaactggacacaaaaagcaagaattattaaagaaaaataaaatggatatcatcaaaataaaaaatgtttgcctttccaaagataccgttatgaaaatgaaaatataaactacaaaatgggaaaaatagttggaaaacatatatccaagaagggacttctacctagaatacataaaactccaataataacaacaaataattataataataaatgtaataatataaaaagtatacagatgatttgaaaagtcacttaaataagatatatgaatggcaaattagtatatgaaaatatgctcaacataaatagtaatgaaaatatgaattaaaaccatacccactagaatggctaaaactgaatagctaaaattgaaaaaaccgataccaagaattgacaaagatttgggacaactggaacgtatactgatggtaggggatgtaaaatggtacaaccactttggaaaacaggttaccagtttcataaaaagttaaacatacacttatgactgagccattccacttcaaggtatttatgcaaggtatatttcataataccttgaaatgaaaagaatgtatatgtccacacgaagacttgtgcactaaagttcatagcaactttattgccccctaatagactacaaaacctaaatgtccatcaacaggaatatggataaacaaatcatggtctatctatacaacataatacaagttagcagtagaaataaactgttgatacacacacaacttggatggatctaaaactaattctgctgacagaaaccagacaaaaagagtacacattgtatggttccatgtatataaaattctagaaaatgcaaactagtctatagtgatagaaaacatatctggttgtctcaggatggtgaaagggcaaggagggcataaaggcagggattataaaggggccataaggaaagtcttgggggtgaggaatgcatttattatctttttttttttttttttttgagatggagtcttgctctgttgcccaggctggagtacagtggtctgatctcggctcactgcaacctccacctcctgggttctagcaattctcctgcctcagcctcctgagtagctgggactacaggcgtgcaccaccatgcctggctaattttttgtattttagtagagacagggtttcactgtgttgcccaggctgatctcgaactcctgagctcagccaatccacctgccttggcctcccaaactgctaggattacaggcatgagccactgtgtctggcctccccgcatttattatcttgattgtgataacaggttcacaggtgtttacctatgccagaacttgccaaattttagcagtttaaatttttgcaattaaaccatataaaaaatacccctaaaaaagaaaaaaatgggaaaacattaaaaatcgttactgctataagatcaccacgcatcctctgggtaggaaataatttctaactcttctttatccccaaatcactttttactttcattatagtacttatcagatgtctcagttatccattatcccaaaacttagtggctgaaaacagtaatttgctatttctcacatttttggggtcagctgggcaatttctctgctggtctagcctgagctcactcagggggctgcagccagctggtgagttcgcagaagctggagggtttaacatggctttggcatagatggcttgaaggcggcgactctcactacatggtctttcatcattttgtagtctaactgaatattttttttcagtgtccataaatcaagttttattggaatacagccacatccatttatttacttttttagtgagatatgattgtcagacaaataaagctatatatattcaacgtatacatcttgatgcattggaggataagtatacacctgtgaaaccatcaccatattcagtgccctaaacttaaccatcacctcttaggggactcctgtattagggtcctctgtaggggcaaaacttacaggatatatgtatatatgaaaggaagtttattaaggagaattgactcacatgatcacaaggtgaagtcccacgataggccattttgcaaattgaggacgaaggaagccagcagtggcagtctgagtcccaaaacctcaaaagtagggaagctgacagtgcagcctccagtctgtggctgaaggcccgagaggccctggcaaaccactgttgtaagtccaagaatccaaaggctgaggaacttggagtctgatgttcaggggcaggaagcatccagcatgggagagagatgaagactggaagactcagcaagtcagcttgctccaccttcttctgcctgctttttctagctgcactggcagccaattggatggtgcccactcacattgtgggtgggtcttcctgagggtgggtcttcccctcccagtccactaactcaaatgttagtctgttctggcaacacccagcaacaaccagatacacccagaaacaatactttgcatccttcaacccaatcaagatgacaatgttaaccatcacaccttgtacactattggtgggaatgtaaattggtacagtcactatggaaaacagtatggtagttcctcaaaagattaaaaatagaactaccaaatcatccaacaaacctgctactgggtatatacccaaaaaaaattgaaatcaggatttcaaagagatgtctgcattctcgtgttcattgtcccattattcacaatagcaaagacatagaaagaacctaaatgtccagatgaatggataaagaaaatgtacatacaatgaaatactatttagctttaaacgagatgagaatcctgccatttgctacgtcatggatgaatgtggaagacatgctaaatgaaataagccaggccaagtgcggtggctcatgcctgtaatcccagcacttcgggaggccgaggcaggatcacttgaggtcaggagttcgagaccagcctggccaacatggtgaagccccgcctttactaaaaatacaaaaaagtagctgggcatggtggcgggtgcctgaaatcccagttacttgggaggctgaggcaggagaattgcttgaacccgggaggcagaggttgcagtgagccgagattgcaccactgcactccagcctgggcaacagagtgagactctgtctccaaagtgggggaaataaaagtcaaacacggaagaactactcaattattccatttaggaatctaaaataatcaaactcgtagaagcagaagcagagacttgaatggtgattaccaaggtttgggggagggtgaatcagagagatgttgatccaagggtacatagtttcacttatgcaaggtgaataaatcctagagatctactgtacaacatcgtgcatatagttaacaacactgtattgtgtacttaactgaatcttcatgtggcagtcgggtacctaatgaataaatgcagaagccatgaggtctcatgggttgcccgggtcctagatattgcactgtcactcctgccacctttgaccctttatcaaaacaagttttaaaaaacagcccaaattcaaggggatggagaaattgatgccacctttctgatgtgagaaatgactatgccatattgtaaagggacatggacacggagatcattaatataatgatttgcccttccaggttatgccttataggcatttttggtacctgtatcccttctattaaatcataagttccttgaaggcagaaattagatcttatttacctttgtatttccctttgcaacgatcacagatgttgcacgctatgcaataagtgttgaatttttccggatgacaagacaagtaaaaggtaagggcaaaaaaaaaaaaaaaaacaaaacaaaacagggttgaagacgaagacgcatcgttgtagaggtaggggagaaaagatatattccaaataatttaaaatcatgatctccaaagcaggcaaaagcaaagggcaaatattgatgagccatcagagtatcttttttttttttttgagatgtagtctcactctgttgcccaggctggagtgcagtggcgtgctcttggctcactgcaacctccgcctcccgggttcaagcgattctcctgcctcagcctcccaggtatctgggactacaggcacacaccaccgtgcccagctaattttgtatttttagtagagatggggtttcaacatgttggccaggctggtctcaaactcctgacctcaagtgatttgcccgcctctgcctcccaaagtgctgggattacaggcgtgagccactgcgcccagcccagaatatcttaataataacatttttatagccaaataggtaaaggcaacagataagaagagttgagtagctgcttaagtagctagagctttatttaaatacagctcttttgattccaaattttaggctttttttccccttcttcaaattttgcaactctggggtggtattatgttaggcaattgaagggaggggtggataatttaggggttttaaattcacagagtaaacattctggtggttggtaccatgcttttagtatttatatttcccagtgtatgaaataaaagattttagagggacaatgctgaagatgcctaaaataaactttccttatttatttctaggcctttctaagcagttagattccaagagacaaagtatgttgtagagctgttctgtttagtcttttcctgaaattgcagccagtgttttgcctatctgctattaacacattaccctttgcctgccatctcatatttggcatattttataaacaggctgaaagctctaagctgaatcctggctatatcaggttttgtaattatatcttcctgcaatattcttcccactcagacagctaataaatagtttaactgactgagattcagcctttctctttgtctctgcaaaatttagaaattcaaaatgcaattcaaaataagtattttcttcatgtactttccccatgatgtatttggtgtccaacaatgaaccaaattatgaggaaggtgagtcaacagaatcatgagatccaattctttctcttgagactcttatggtatcggagagatttgcagtctatttattttttattttatttatttatttattttttggaataagatctcgctcttgtcaccaaggctggagtgtagtgacacgatcactgccacctccgcttcctgggttcaagcgattctcctgaatcagcctccccggtagctgggattacaggcgactgccaccacgcctgctaattttttgtatttttagtagaaacagggtttcaccatgttggccaggctggttttgaactcctcacctcaagtggtccgtctgcctcagcctcccaaagtgctgggattgcaggcatgagccaccgcccggccagatttgcagtcttttgggtattctgcaagctccaggattctgggattctgagtgacccacaaagttcacagtgttgctgccaagttctagtaaagcattatgttatacttttttgtttttacataattcaacgtattgggcaataagtcactttgctagtattcatattagttaatctttactctgcagtaagacttaatgtaaatgcaaccttttaaaataaaaacgttgaattattccagttgaggaaaagtgcaagtagcaatcttagagggcaagacatcagttcggtttaaattagtgaattaaattctccatgatttcgtggctccctgtggataccatgaacactctgttttacctcagttgtgccatgcctcaacattgagctcctagaatgcaaaggctatttctaattcatttgttgtgtctttggtatttgtcataatacaatactatagattattcctctttctatgtggttttaaaaattaggatcattatcaattttgaacttctgaagtcttgatgagagagttgtaaactcattaaagataaatgagtagatttaaactattcacgattcttcagggttctttttgtgccttgagtctctgaggggaatggttgctgctgataagcctagccaccagtcacgtaagaagatattaatatacagcaatttcacagctgaaggcttttgcttttccacagctatgttaatagtatttgtcatttggaatcaaacaagtccaggttattcaattcccgggggtgggaacttacacaagagaattaacttctctgagctcaagtgcccctgtttataaaatggggacaataaaatttataaaatggtgacctctgttgtagggttataaggattgaaattctatgtgtttagtgcctggtaaaatccttgacatgtagaaggtgctcagtaaattattgtagtaaaaatacaagttttttttttgggccaggcacggtggctcacacctgtaatcccagcactttgggagtccgaggcaggtggatcacttgaggtcaggagttcaagaccagcctggccaacatggtgaaacatggtcactactaaaaatacaaaaattagctgggtgtggtggtgcgtgcctgtaataccagctactctggaggctgaggcaggagaatcacttgaacccaggatgcagaagttgcagtgagctgaaatcacgccactgtagtctagcttggggtcactgagtgagactccatctcagaaaaaaaaaaaaaagacaccagtttttaacagtctttctcctcccttcaatttggttgtaaaatattcgaaaaaaaaattggaacctgtacatgttttgacctgaaaaatagtgggaaagtgaaaacattccactttccctttcggcatttattgtgtcacttaattattttaagtattgaattttcagtctgtcagacacatttctgatgaaagttaagtgtgatcagggctcactgcaacctcaaattcctgggctcaagctatcatcctgcctcagcctctccagtagttgggactatagggatgtaccactgtgcctagctttttttttttttttttttttgtagtgatgaagtctcactatgtcgcccaggctggcctcaaactcttgtcctcaagcaatccttccacctcaacctcccaaggtgttgggattacaagtgtaagccaccacgcccagctaaaaaacaaattttaaagttatttgtgccactgctactcctaaaatgaatatactgaaatgcaatgatttggatcctcccaatattttcttgtgttatgagaagctgataaagtcttatgaaactcctgtgggattattgaaataatatttaaatctaagtcttaggtcttgtgagatcctaggcaagtcatttagctcatatgaaaaatgagtactacacattattatgatctcagatttgctttaagattgaatgaaactttgcatgggaagtggctttgtcattggaacagctgttatcttataataacactgaacaggccgggcgcatggctcacacctgtaattccagaactttgagaggttgaggcaggagaatcacttaagtccaggagttcgagaccagcctggccaacatggcaaaaaccggtctctactgaaaatacaaaaaactagtcaggcacacacgtgtggtccctgctacttgggaggctgaatcaggagaatcgtttgaacccaggaggtggaggttgcagtgagctgagatcgcgccactgcactccagcccgggtgacagagtgagactctacctcaaaataaataaataaatacatacatatattcatacattacaataacactaaacatccatagggtaaaaaatgggggctttcatttgatggaaaacttcagacacagctcttttctcatgtgaaacaggactgactaatatccgctggcttcctcagaattggttaagaggagatacttgatatcccggcacctttttctgataggctgttgactgtagccttagcctttctcagcccctggcctgactcctccccttccctgggttgtctatatctaccacctctatatctaccacattttatttatgatggttgtgttgtggggtgaggtgggaaacttggcactggctaggtctcctttgcaatcagcctccctacagagaaattggccattaataattgtattaggaaacattttattcttgcagagggagacccatgctttacaaaagattcctgacatttggtagcttggcctagttctggggtgcaaaattaggaagcccatcgttgcggcatacctcagccatatttccacccctacctttatcagctgtaaggctgttatttttatcttcaactacctggcttatttattttctcaaaaagttcagaactcaaatgggaaaaagtagtattctttattaccccactgaaaagtaagggctaatttatccaagtctggttcctcacaggctggcccctgaaacactccacagaaaccagctactgctgtgagtttaagacaatcaacccaacttatggtagaattctgaagtggcggtttggttggattgatgctcacccaacctaaaatactgagttagtagaccatagacctgggctgcatatggaggttctacgttgttatgcagctgcagcccccaaagcttgaccccagccttttgattttgccaactgctaagtgctgaggtgatgacccaaaaatggaggccaaggttctgccacatcatattgctgggaccatgggtttggaccccagcccttgatcacaccatgggagcagcttatactctctcaatcatgcaaatttttttttttaaagccctacagccaaaagactgaggtttctcttccaatgcttgacgtttggccctgctagattcttctgtgctgtttgaatgcaatgggcaacagggctcacatacctgcgatgggtcttttctctgaatttctcccctccctgtcaatgttccagaagggcctgctgtgtgtgtgccctgcttgacccttcacctctggtactgtcacccgtaaccctcagcatctgttcagaaacagtgatcataattcatccagaggtctctgatgattcatccagaggtttcctaggcagggagcttgaattctgagaacttcaagatcacaatgaatgacagagatggttctttaacaccgaggtctttggtctctaaattttatgttatttgcctgggagttggtacttccataaacaactattgggtcacagagaaaggcctgattcccttgttgctgtgggaatagttaaatgccttgtcttccagaagtctttttattaaccccagacagcagttccagtgatggatttcactgtaaataagaatagctcatttttctctgccctctagagttctttttttttagtagatttttcaaaattttactgaagctgaagaaaaaaaaatatatatcaaaattgatagcacccagatgctgcagaagtagtgctgcaggtgaaagataccaggctgagacgaatctggaaaaacgggactcttgtagtcggagctccaaggaaagactggataatagaaaaggaaagatggaaaagccagaaagaaggagatgttataagaaagaaaagtatacaccacacacatatgcgcgtgcacacacacacacacacacagagagagagagagagagagagagagaaaacttataaaattttgagtctgtccattggtaaattactctgttacaagccggcaatgaaatttgaatggtagtttccattgctcaatcccatgggaagttctgagtgtgtagagcagtcaggccactttcagtactcttgggacctccgcagaccaggagggactgtgatcttgagatcttgatgatgctcaacatgtatcttggttcgcaaagcatcttcatgcaaaggatctcgttttagtttcacaacccacccgctgaagtagctgagtggaaactctccccttctacagataagggtagaaaacagtgacacctaggtccaggagtaaagatattcaccccttccgaaaataatttatgaatgatttaaaatagttttgttgggacgcagacacaggtacgggatacaaaatgtaaatgtggagccttaaacattatagtattttatttgattttgtgtttttttattattattattattattattattattattattattattattttgagatggagtcttgcttggtcacccaggctggagtgcagtggcatgatctctgctcactgcagcctctgcctcccaggttcaggcaattctcctgcctcagcctccagagtagctgggatttcaggcacccaccaccatgccaggctaatttttgtatttttagtagagactgggtttcatcatgttgcccaggttggtctcgaactcctgacctcaggtgatccgcccgactcggcctcacaaagtgctgggattacaggcgtgagccaccgcacctggcccattttggtagtttaataaccacacacgcaggaccatctagggcaagttctgagtttgggggctcccttgtgtagttccttctttttgaatctgtgctgaggatgattttctttagatcgtggcagaagtggtactatgctcattgcaggcctcagtcttaagaagtcctaatgacctcttcttttgtactcttgggaatcttaagctgccatgtaagaagtttggttgccactgaagagatcacatggcaaatccacatgaggagaagccctgagattacatggaatgagagagagagagagatagaggagaggagagaggagagagaggagggtaggggaggagggagagatcaaattggctgaaaacaatagctgaccccaggcccagctttcctgtagctaaatgcagccacaaaagtgaccactgtaaagaccagcagaagaactgctcagttgagccccaaaccagattccagaactgtgagaaaatggaatgattgtcattttaagccactaaatttgggggcggtttgttatgcagcaatagctaaccaaatagaagttagctctcagatgtggtttcttctgtaacaagaacacaaagctagtggccatggcttttggcctgggtggtgagtagaagctggaggaggctccaggagacttagtgaaggctggaagggcagtgagcagttggtattagagtctggagaaaaaacaatctgtgtcatgtagtggttgaaagtttggcaacatgttgactataaaagatagcaaatgtgtctaaagaacttggggatctgactaagagactatttccagacagaacgttgaaagtgctaactgtcttcttttagctgtgcctgataaggcacaaatagagagagaaggataaaaaataaaagtgtcaacacaggaaaactttccaacccaggacttactgagttggaaaataaaactctctccccttgcagcttttccagtctgcaaaaggttcccaaatggccttgggggaagaaagatcaaatctaagatgctaccagtaaaatggaacatgtgagtcaagatcaagtcacaggccgggcgtggtggctcacaccaaaatgctggtaatcccagcattttgggaggccgaggtgggtggatcacgaggtcaggagttcaagaccaacctgaccaagatggtgaaaccccgtctccactaaaaataccaaaaaattagccgggcgtgctggtgggtgcctgtagtcacagctactcaggaggctgaggcagagaattgcttgaacctgggaggcagaggttgcagtgagccgatatcacaccactgcactccagcctaggtgacagagtgagactccatctcaaaaaaaaataaaaaataaaaaaataaaaaaaataaaagatcaagtcacaagtgtggctataagaccctttgttaagaccccagaaagattagcagtagaacctcctagaacctcagcactagataaaagtgtttccaagaatctaaaggacatcttctcatagtactctgacccaaagtataaagaggtctgtcacaaagagatttgtgagtatagctcttatctaatggcatgaaacctaataagacttataggaatcctacatagtcttgaagagaactatattagcagaaacacagagttgtactaaaagaaacagctctgcggccataaaaaagaatgagttcatgtcctttgcagggacatggatgaagctggaagccatcattctcagcaaactaacacaggaacagaaaaccaaacaccgcatgttctcactcataaatgggagctgaacgatgagaacacatggacacagggaggggaacatgacatactggggcctatcagggggtggggggcaaggggagggagagcattaggacaaatagctaatgcatgcatggcttaaaacctagatgacaggttgataggtgcagcaaaccaccatggcacatgtatacctgtgtaaaaaatctgcacgttctgcacaagtatcccagaacttaaagtaaaataaattaaaaaaaaaaggaaagaaaagaaacagctcaacttgaaaagaggcctctggactctttctaaaggcaggaaacaggatgagaaagctattcacctacagacactggccatcccttatgggaaaagaagaaatagtcagaaagcagagtaaggaaccatgaagaaccactccctaggaacataactgtccctggagcaggggtaattggtgatatatgcctgtctggacttcagaattgctgtggactggcaagtcctgcattccttccattctccttcatttagatgagagtctgctgtgattattgtatgctggtctcactggtatatggggcgaaacaatttgtcttcagatctagaagaaatatacccaaggagtcttatctacacctggacttggtttagatgacaagatcttgaaccttgagccagactgctgctgtaatatggtgctgcttcccagaggaggtatcagttaacctaggactgaaaggatggattggatgtcacccagggacgaagcgactgtgacaagatacaagcacaggtatgttcgagattcacaatcacatgaatcgaaacaaactactttcctatattgagcagctactgtgtgcactggcacatgtatatagattatttcctttaatcatggcagagccctgcagggaaagtcatagctcctaagtcacaggagtgggattcagccccattcctgttagacctcaaagctcattttctttccatcccacacgttgccactctctacagatttcagtctgggctcagagcacagaggaaaaacagtggaggcttggacagcctcacactcagaacagtggaatcagatttttttttttttttttttttgacacagaatctcactctgttgcccaggctggagtgcaatggtgcgatatcggctcactgcaacctccgccttctgggttcaagcgattctcctgcttcagcctcccgagtagctgggattacaggtgtgcactaccacacccagctaattttcatatttttagtagagatggggtttcgtcatgttggccaggctgatctagaactcctggcctcaagtgatctgcccaccacagcctcccaaagtactggggtgacaggcgtgcgcccccgtgcctggccaggaatcagatttttaaagagccttgacagcttagtggctgctgaaacttggtctctccagatactttcagacagtgtccacacccctaaggggtctatgccaattgaagtcagatgattgcctggagaagaggggcttggttgctgctcctgtgtctttgtgtttctctcttcatttttctgagtccatgtcttcttggtgaaatgagaagtcaggagaaacagttctgggagcaggccacactgagacagggctgttcagaagaaaaggaggacccagagaaatttcacactcttggccaggatttggtgaatggggctgaagcctgggctaggcctgtgtaagacagcctccaccaccccaagcctcttgacagatgcaccgtcctggagtccaggtgctgactgtccctgactaataggcccagttgaggggcagtatggagggggaccgttaaagcatcagtggaaatccattgatagcatcaggtcctcaacacgccaggatttacctgggggcttggctgggaactaaatatcccaagggatagatgtattattattaggcaggtgtgaaagtcattgcggtctttgccgttacttttaatggcatcatatcaattacagtgagaccgggtggggagggagatgagcactcaaagaaccaggagtagcctgagtgtggtttcccttggcccaggctcagaccaggtgtgaccaggatcaaaacaaccatggggactttaaaaaacaaacaaacaaacaacaacaacaacaacaaaaaacaaaggttgggggcggtggctcatgcctgtaatccgaacactttgggaggctgaggcgggtggatcacttgtggtcaggagtttgagaccagcctggccaacatggtgaaactccatctctaccaaaaatacaaaaatatccaggcatggtggtgggtgcctgtaatcccagctacttgggaggctgaggtagaagaattgcttgaacctgggaggcagagaggttgcagtgagccgagattgcaccactgcactccagcctgagtgataaagtgagactccatctcaaaaacaaaaaaaaacaaaaaaaaaccaaaaaaaccccaaatattgtcaaatccaaagaatgtgacttacttaaaaatgaacaatatggctgggcatggtggctcatgcctgtagtctgaggtgggaagattgcttgagtccaggagttggagaccatcctggggaatatagtgagaccccatctctacaaaaaaatttaaaaattagccaggtctggtagcacatacctgtagtccaagctactctggaggctgaggtgggaggatcgcttgagcctgggggggtcaagtctgccgtcagctgtgattgtgccactgcactgcagcctgggcagcagagcgataccgtctcttaaaaaacacagaagaaaataaacaatgttttgcatatgtgttatactaatttccatgaaatgaccagggcccctcaattctcagtgtacttttgatcctctttgctctacatgaatatttctttatgtcttttagtacacgtctttctaccattgagtccctgccattgagggatacagttcctcctggcctgactccagggctctctcttgctgtctttccaaaggctctagaccctcgccccttagatgctacctttccccactgtggccttacccatcaagagatttattttcttgctgcctctaaagacaagcagatggactcctcttgtttgaagattttttattctcaacttgtcacagtggggacacagacagctgagagacaaaaataacaagcacaggaggttatgaagttttggaagccttatataatccgtgctgccacagaccctttcctgcaggcaccgacagcggagcccgaatgggaagtgtaagatggatccgtgtccaaatcctgctcgagccacttcctagctgagtgatcttgggtgaatcaacagcttacccctgctagcctcagtcttccctctggaaaatggggataataataccactgacccctctgtgttatctgaagatcaaatgagtttacacatacccagtggccagcctagtgtcaacacgtgagaggtgctccataaatagctttgtttacagctttgtgtttacagctcagatagtattggaaaggtccttggactccacctctctttgttcctaaaggtaagggttattccttttccatgccaaccactttcaagcttgggggctgcaggtggaatgggtggcaccagtgcttctccagctgcctcacctgtttacagagatggactcacagttctgaggctacaggaggggctggcggcctcttcattgggtcctggatgcatatgggtaaaatgttccctcggaatgccttgtacatttcgtttctcactgaaaagtaaaagctggccaggcagggtggctcacgcttataatcccagcactttgggaagtcgaggcaggtggatcacctgaggtcaggagttcaaaaccagcctggccaacatggtgaaaccctgtctctactaaaaatacaaaaaattagccagggatggtggtgcacacctgtaatcccagctactcaggaggctgaggcgggagagtcgcttgaacctgggaggtggaggttgcagtgagccgagattgcaccattgcactccagcctgggcaacagagtgaaactctgtctcacaaaaaaagaaaacgaagaaaagtaaaagacaacaattttattttcttttacatgctctcctccatctcagggtagtgaacataaggcctggttattgctctccagggcaggaggcaaagatagccaactgccttggaacatgctttatatcaaagtggactttctgttggattctcgagcatctctgcagttctgagttagaggttttgttggaatgcaatctgaccagagctttcacattagctgggagagtaaatcactgtccctgccatagtgggtggtcacggattagtccagcaaggcgtcaacactgctgtctctgagaatccacatccaaggcacacctgccactccaggtctccctaacacacagttgtcacactttgattcttagttaggatttgagattgggttggggtttgcatgcctccagttactcaacaaaagctctcccggggacatctgcacctgtccccttttctctatgataatgctatgggatatggagagtgtcttagtccattcgggctgctataacaaataccttagactgggtaatttacaaacaacagaacttgattgctcatacttctggcagctgggaagtccaagatcaaggcaccagtagattcggagtctggcaagggctcgcttctcccagatggcaccttctgtgtcctcacatggcggaagggatgagcaggctcccccaggcctctttaataagggcactaatcccattcacaagggtggagctcttaggacctaattacctcccaaaggcctcacctcttaatagcaccaccttggggattaagtttcaacagtatgaattctgaggggggacacagatgtttagatcatagcacagaggtactaaacatgctttattactcctggaaaaggaaaccaacattatagaccatctaattgtgccaagcacgagtgtgggaatgttgcaggcattgtctcacactctttttcacaccagctctttaaaagcaggaaaaaggccagaggcagtggctcatgcctgtaatctcagcactttgggaggccaaagtgagtggattacttgaggtcagtagttcaagactagcctggccgacatggtgaaaccctgtctttactaaaaatacaaaaattagccaggcctggtggcaggcacctgtaatcccagctacttgggagactgaggcaggagaatcacttgaacctggaaggcggaggttgccgtgagccgagatcatgccactgtgctccagcctgggcgacagagcgagactcagtctcaaaaaccaaaccaaaccaaaacaaaaaaaaagcaggaaagagacactgaaccggggcagccagtctaatgtttccctggaacccagatgaaaagtttccctttgggaatcaaattgggaaaatccacacctggaggttaggagcaaaccaagcaatcatctgtggatgaggctctagagggcttggaaccacaagaacttgtactcaggcacgacagggagtaatcccaaggggacaaaacagaatctttggaatctattcacttgtactttatagtgtagtgaaggagtatatgaatcgaaagtgagagacaggctggggaacagaagaaaaaaaacctggaagtgccaggagcaggctgagcctttcaaattccatcctgcagcatgtctgctgcgccatggatgccactctccctattcttgggttggtatatcctgttatgtatccacctgcaagcactccaacttggcatccccagtcatcaagcaagctctggttgtaattttgacgtctaggtatttggtgtacagggaaagacggttggttgacattttttaccccattttaccccatttttacccctctggatgtttagtgatgttatttatttatttattttgaggtagagtcttgccctgtcacccaggctggagtgcagctggttgacagttctactcctctcctctaacaaacaggcctcgtgacctatatagatcagtcctaggaagtggtgcgtgccccgtaggcaccgaggaaggttctttcctctgacaccctcctgatctcgacctttggcagtatgatcttgcactggctcatctatggaaggtctaaggaagaagacaatcattgttactaactcaataaatctgtaggtacttattggtttccaacgaaaagtggcaatctggggagaacaatgtcattaagtggaaaaaatgaaaggggcaaggttattataagtattataaggtgatgctcgtacatggacagaaaggaggaacatcaaaatctcaagtagcacctaatcccttccattcccagagacgactgcataagtcaggtcgttttatccctactgtgcaattacgaacatccagagtggacgtgatctgatccaaggagctgcagcatttatctaatattcaccagagtctttttctttccttgttgacttttactgtttttctcattgaaggaaaacacttcacttagaaatgccagtgaatcaataatatttataaagggcattttagttgctcagcatgaggccgggagggtaatgaatcatacaagacatagtttctgccagggccgctttgtacagctgcgcagattgtgcactgcacagccctagtgtgtgctctttacattgttccatgcacttgtcccctccccccaggggttgctcagtgcaacgtgtgggatatgggggacctgtgcacatccaggaggctgatgatgaggagtttggatgtgaagttacagctacattgtggagccccccacagtgcctctgatgtgaaacactttgctcagtgtgggaactgggactggaaactgtgaattccttttgtgggaggcttggtgcctattcatgagagacaagttcctgtgaagggactggaaatgaaggtgcagaaggctcctagccatgggaagaagctgggatgggaataagcagaaagtgctcctgccttacctttaggcgtcaggggtctcttcagggaaaataatggaccagaagaaaagagtgctctccagagctgtggctcttccctccctgccactgttgaatggccccttaaatgtagctggccggtaatggaatctctaaagccaccataaaatgagtcagcgtgttttatctcaactcgtgagttgatgtcatagatgagtctggatgttgggaaaaataaatagactgtcttagtcatcggggctgccgtgatggaatatcacagactgggtggcttaaacaacagaacttaattttcttacagttctggagactggaaaaccaaagtcaaagtgttagcagctttgctatctactgaggcctctctcggcgtctccctgtgtcctctcgtggtctctgggcacatgcatccctggtatctctctgtgtccaaattttcttttctcataaggacaccagtgaaatggaattaggtcccactctaacggcctcattttaactgaatcgcctctttcaggacctgatctccaaatacgatcacattttgaggtactggggtttagggcttcagcatatgaatttgggggagatataattcagcctataacatagaccaccagaagtatagtaggggaaaggaagcttgtgctataagagaggaggaacgacacagggtccatattgaaattgcaaggctgctggtcccagagggctgtggttctaaggcagtaccagttccagaggccacacacgtggtaatatatgaatacagtatgcaccatctttagcggtgtagagagttaaattgagttgacatgtttagccagggataaatgtttaaactgagtttgttgtaaccttcctgtttctatctggttcttctcgtatgtgtaaaaataacaatagtaatgaatgtttattacattgatttattaagtgctagaactactatgctagaagtttatacagcacacattgccttcctcaatctgtaccaccctttcgggtgggtcttaactgaaatccaggacccaaaggcaaactgaaagtaggtgtcggctccaggaattggatctagcctggcttactccatggcctgtgcctgtaaccactgggctgtggtaaaggcagaaaggcttggaaagcaccacctggggttgaaatctcagcttagctagtagccaggaagcccatccttgcctctggctgttcacttctatgttagagaagggactctggtggatatagattcc

SEQ ID NO: 2225 - DNA, 8636 bp, Homo sapiens
ctttttcaaataatgacttcttgtcctctaggatacccagtagtgggatttctggatcaaatggtagttctatttttagttctttaaggaatctccacactgttttccatagtggctgtactagtttacattcccaccaacaagcgttccctgttcaccgcatccacgccaacatctgctgttttttgattatggccattcttgcaggagtaaggtggtatcacattgtggttttgatttgcgtttccttgatcattagtgatgttgagcatttttcatatgtttgttggccatttgtgtatcttcttttgagaattgtctattcatgtccttagcccactttcgatgggattgtttgttttttatcttactgatttgtttgagttcgttgtagattctggatattagtcctttgtcagatgtatagattgtgaagattgtctcccattctgtgggttgtctgtttactctgctgattgttccttttgccgtgcaaaagccctttagtttaattaggtcccagctatttatctttgtttttattgcatttgcttttggagaaccccaattctttagctggccacatggtcatcaggaataaggactacatttcccagccactcttgcagttaggtgtgaccatgtgactaagttctggacaatgaattgtaagcagaagtggtgtgtgcaacttctaagaagtgttcttaaagggaggcagcatgtctctctcatttcatgatgaacaggatcatcatggctaaagcctcagccccacaagatggaggaataaaatagaagtccaggtctctgacacagtggggtatcacagcaatcctactggaacatgaggggaaacaaagcccctgtgttgtttaaggaattattatttccattttatgtttcttttcaggcaaaactaatcttaaccagaaattacctgataaaattaatttttgtccgaaaaaactattcctgtcacacttgaggattaagtgtgataataaacaattatcacactgtttcaacatagagcacttgcacaatacatatctaatcttaataggaactcaccttggtagtagagggagtttgggtccatcaacttggtgcaggaataatactaggttgtgtagagagggaccccaagtgtattgtgatatgttgacactcatataggcttctgacatactcctttgggacaaatatcagagtctaagggaaagggactcccatgtatctgaaatgtaccagcacattctggtttagtattctgtatgagactaagagcagcaatacagaagaggccttctgctgcagtggtggcgatggcactagccgcatcatgaaggtggagtgttatgacaggaaacagcagtagagtctttgggtagtgacaatgggctaggctccagagagtgtggtcaggaccgggcatgcaggaattatgtggaaataaggcctaagacagaagttgcaagacaccccaatgatccttcctcacctatcctccaccatagccaactagagccagaaggagggatttggatggggctaaagttcctccaattctgcaagtggaaactgagccacaggactgtttcgttactgtttctttgtgtatgattgtattctgccctagccaggtggtctgggcaatacctgctgctcataaatccatgagtgataaactgaaaataaaccatggaaagttggaatatttctgtggatctgtaacctctgaagttaagggcatgaaaaataattgccacacccctacagcctgctacagaggcatctgtcctccacagtggaattctgacgtaactgatttactgaagaatattaagttatttggggcattaacttgtaaaggttttatgttttccaaacgttgattccaactttgctttgttgaattcccttttcaaaattcataaccttctggtccttttcagttatcaaaatttagtccattacaaaatcccaatgtcttatcagattcgaagattgctccataccatgttgctttctagataggtgggtaggagtattaggtgtagatgcaggggtatgacattctctattcttcttccccctccttcttgtaagttagctcctctggcgttactttctagccagtctgttaggggtagggagattgctcctggcctcactctggttagatttgtttccagctcttgctggtagcttctgctgttgggctaccctctgtgtacataggtggcttatgtggctgtcacaggagtggtggctagcttcatttgcagtgttcactgttactgaggacactgtcaaagaggagcagcctggtttctctcagtcattcccaaaattccaaatgtccaatcccttcactagatgggttgccatgactatcagccctcaagctgcctgggtagcatgaaggcttttactcttctagtctgtgctcctgtatgtggagtcagaactgctatgatccttttctgtgacttttaagggcagtagggatcaggagttcagttttatcctgttcttctctaggttacattatactatacatttacattatactatagccctttcatgccctgctggaatggtctactacagcaagtatcctgccttcagaaatctccaggtgagaagcaggcccagcctcaatatttacacatactcacctgcctttacagaacatatatcattctctcttatctctttgttccactcaaaggtatctttgagtaaatcttcagggtctccagggtcatgagtatactgctagggagcaagatgccagtctccttttctaacaggctctcccaaatctacgagagattatcttgaggctcacccctacctcatttggctttggtgttggagaggaaaacctcttcttcttttgcaacaggctgaaaactccaatagcttcttcccctcctccaggtctcaggggagtagactggacgtggagagtggtagaggatagatgaagacagtatgtccagtaagccttgtggaaaatatctggtcccatttattggtggctctctttagaatatgagagtctaggctacaagacacttcaagtctggagttcaaatcttagctcttccacttagaaactatgtgtcagctcacagagtgcctgagttcaaatcctcgctcttccacttataaactgtatgtcactgggcaactcacttatatttttgggcctcagttttctcatctctaagatggagataatagtagtaactatatcatagagttattgtgaagattaattggattaagggttgtaaaatgtttaatacaaagcctggtacataataaatgccatgcaagtgttcattgtttattatctttcttactttttttttgtcttcagctttggaccattgtcaccaattttgcagtaatagaagtccccttccgcattctgttatgtttgatggatgaatcatgaaaccagcctaagagaaaggaaagacatttggaatcgcttatggtaacagttctagttactataagctgagcaaagcaaagctggagttgagcaaagaaacaaacacactgtacctacttgaatgtctcattaaatatgttgggaaagtaaacctgggtgggtcattggttcatccatccctacttagtaaatcaaacggactctccttctggtagaggagacgctgtgtcagaggaatgtgctcattcaaatcaggagccaacacattcttagtaaatgttccacatgcaataaagtgaattactgtgctgcgtaagctctggaaggatttttctaactttccactggatagaaaagcttgttttattaatatattgaataacagcattgtgtaaacaactcatactttttagatttactcctgttaaagaatgccatagttaagtgcttggaattgacacttgaaaatgaaatactgctgcaagtaatggggaaattgtagatgtattttatacctctcctttccaaatcaaaaggtctcataaatacagtctctaaaagtgtcagtggggggagttaacctaactgtacaagcaataagcctgacctttcagtgtaatttattttcgatttgctcaatccttttttattaaaactagcacatctgaagcagaattaaatcctattataacaggtgtgtgatcatatcaggttctccctgccaccagcccactttattaaaagttactttgtttcaaggaggataacctgatcagggcagtgggatacctttggaaggatagggcagcaggggaaggatggttttattttcctgtgaacaactgcttttaccagtgaaatcaaagaatatctatgagcatatttcatgtttgaaaagccatggtaggacataatagctcctctgtgtttataaaagttatttctctctggggttatttagacccagggacaaagagggtcatcaagttgttctgtatcataatccatacattactagcctgtaatcattttcatgggtagcattcttagtctagtgaccattaggagagtacaaacacctttgaaatactagtgagatacagatccacttggtagaaacttgctttcagttttcggcctatctcatggaacctaattctactaggtccttgaagaagatttagaattttaaaaatcaccccatttactagtggtttaacctgcttcctcttggtttaatcttttggtttctatctcctttgctctgcctggttatctcattatccagttcaatttctatctcctctgggatcctgaatcatccctgcccacagtgacctctttcctcttcccaaatctgaccacttatagttcatatacatcaactgagcactgacctgaatgaatttgtcgtaactcctctgtcaaactgagaactagagggcagaaagtcaagccagtctaatttccagacctttgtagtgaattggaggacatactgggcctggtcgaaataaaatatatgaccacaaggtggcagtggcacacaacaagttttatttaggtgccacttcgacaggtttgcagggttaggcaaaagtccctcacagtatgagaccttccaaaggccatggtgcagcggccaccacccagaaagggagagactttaaccttagctatagaaacatggtgactggtgcatgtctactgtcgattggttgacattctggggcatgagcctatcacttatgggttagctttcagaagcataattactagtacaaagtgtcactgactgaagaatgtattgaaaactggcagaggagattacttgttgctatagcaataaaataaaataaaataaaatagatattttcttaggagagtaagagttttctattctcagcacctagcaccttagcacagtattttgcaagcagggagcactcagtaaatacttgcagaatcaaagagcagcatatgtgtatcatttgaaaacatattgccttctagtctccctagtgtcaatgcttctacctagggtttaaacgtggagagaataatagcatctaccctgtgtccttatctttttttatttctaaacaaagcacttgatccttactttactctctaaggccaggaagaaaagaaatatttacaaatatttctatttgtaaattagaggtgaagtaaaatatctagagtcacacagtgttggatctttggactctacatttcttggcttctattattattattattattattattatttgtgggagaccagagttttattattactcaaatcagtatccctgatcatttggggatcagagtttttagggataatttggtaggtaggggaagatcagtgagtcgagagtgttgattggttgggctagagatgaaatcatggggaattgaagctgtcctcttgctctgagtcagttcctgtgggggaggtgggggtaaagggaagtgttaggccaatagaacagagattgccatctggtgtgcagaaatactagtcttcttatcctcaggtggggcagagctggcagtggccagagccctggaaaattgttctggctgcaagcaacttatctgtttttcttagtgtgttgacaattattatcattttctatttgcgtcctgatgtgaaaatgtgggaagcactacacagaagtgccatttagtgcatatgtgggtctgtatgtaacactccattaaataccaccttacatcatattgttacgtgagagttttcagagtgcttccatgcacatcatagtcacatttactcttcaaattaagcctgtcatgcagacagggtagtgaacagtgttatttaaatctacatttttaaaaagttttgaaatggcaaaaagagaaaaaaccttaattttctatctcaatcattcttaaaattttaataattaaaaaataaacattttatcaaacataattaaaatcatatgtgataattttatgtgctaactagactggactgagagatgcccatatatgtggttaaacattatttttggatgtgcctgttgtggtgtttccagaagaaattagcatttgaactggtgaactgagtaaagcagatggctgcccccagtgtgggtgggcatcatctaatctcttgaggaccaaaacagaaaaaaaatgcttgagttaggacattgatctgctgcccttggtgctcctggttctcaggccttcagacttggactggaatcttcacgatcaactctctggctctcaggtcttcaaactacactactggcattcttgggtcaccagctttcagatggcagatcatgggacatctaagccttcataatcacataagccaacatcttatagtaaatctctttatatctatatccatatctgtctatctatctatctatctatctatctatctatctatctatctaatcatctatctatctatctaaactagatagatatatacagatataatatgtaaatctctctttctttctttatatgtatctccatccttttggttttattttcctggagaactctgactaatacagatttttgtaccaagagtgattctagaggaacagaattctaaggatgagttttctgaattagttctggaattttgggattggctcttaaattttgttagatttaaagacactaatgactctatttccagtagtaaagagagcattgatatttcatgcatgatctggcaatggagataaacaaaaaagtctgtgttggatactccaggtcaaccattcataaaaagaaaggagctgggtgagttgtacatacctttggaacatctttgggagatttttgacaactaacaaatctaataaggttggttggttggtcctaatatccttggacaaagtggtgaaagaaaagcatgggctcagggactcatattctcaactaaacctccataaacagcttgaagtataataaaaaaatgaaaaaaataatttcagaaccattcattaattcaacaaacatttattgagcacctaccacataccagaattttgaaatcggtattgcttttggggatttatttttgtagtttggatttcaatttgagtttgaattctaggtttgcagcctatctagctgtgggagaatgaacaagtcctttaacatctgtatctcagtttttctgcctataaaatgggaataataattgcacctaataacgttgctgtaaaatttaataatataatcacacaaaacgcttacaaaaaaaagaagtttctgcttgtgaagggcacttcaaatgaggtctcccatatccctttacggatatgtgtctcttctcctttgccattaggagtagttacgtgggccagtttgggaactctgtgtgccaagaattatgctagatgatgaggatacagagatgactaaaacacaggccctgatctccaggatcttataatgagggaaagaaaacattcccaagtagacactgaattcctggaggatagggaaccatcccctaattgtcattgagtaaattaaacacacagctttctcttcctataatgatcagttaacaaacattgcctgagctccttgccctgtgggcaaggctgtgctggcaaggctgtgctgggtgctggtaatacagcaataaatcagtcacatgccaatccctcaggtggaccttctggtacgggaaaaatcaatggagcagagactcactagaccctgagggcactgcactcagctgagaagcactagaagcaaagatttgcagaggaagtgagttccaaatggggtgacatttaagacagaatcaccctgctttgggaaatatatcacttcaacaacaacaaaaagcagtgttaccaactatgaaatgaaaggagatgcccttttgttttgtttcactgaagtgagtttttaaattatacttttgtatgtaaaaaaatttcttcatggaacctgtgacaaaaccatgacaaatagccccagactaaatttaaattcattgggatggcagtggctccgagggtttctatgttctctgtctttaaatttttttgattgtcataaaaaatacataacataaaatttgccatcttaaccaaagagggtggtaggaaactgattttgtgatgcatatctaaacaca

SEQ ID NO: 2226 - DNA, 1214 bp, Homo sapiens
tttgagaccagcctgggcaacgaggagaaaccccatctctatgaaaaatgtaaaaactggcggggcatgatggcgcctgcctgtggtcccagcacttgggaggctgaggtgggggcatcgaggctgcagtgagctgtgattgcgccactgcactccagcctgagcgacagagcgagcctctgtctgagaaaaccaacaaaaaccatctggagcttcctgggctcacctccagcctctggtgatccatttgaggccattgttttgggctttgaaaacattcaagtgatagtgttgtgtgtcccatgtccaggattccaaaatgtgcctcagtaggtgactgtccactctgcatgggctgcctgcctgtcgctctcaggaccctgcctttgcgaatgtccattccataagggccgagggtctcctgagtttttatggcttgggctctggcctgtaccctactcagttatttgggaccaatcacatataaattctaagctattaggctgtagcaggagaacatcattttctcaatcctgaattctcgggctagagccctgtgaattagatgaacaaaagactggtgagtaagagaaaacccctctaaaaagacccttctccaacaggaggaattttcgacctgctgctatttttcgtggggaagaaaggctctgagtcttctgctcgggggatatcagcagaagcgccagtcagatcccctttttattaaaatcctcaaagtaaattccaccgacgaagtgtccacacattacagagagtatcggaacagccaggcatttaaagatgggctggaggtggcgccggaagtagaagtttggagttttagctctgccccggataatactggatgaaatcccagcagagtccttcctgcctggccccacctccctctgctcacccctcccagggagccctacagcccgcttgctgtgagctagaatcagatctgtgctaggtttccttctatccgtagcacaccctgcgggctggacgcttgcaccccatttcggggtgaggagctcacaaaggttaagtgagcaagtatctgcgtctctagtgcaaatcttcccactcctaagtccttctagggcaccccatgcttgaattgtgcgtgtgcacgtgtgtatatgtgtatttgtgtatgtatgtgtatttgtgtgtatgtgtttatgtgtgtgtgtatgtgtgtgtttttg

SEQ ID NO: 2227 - DNA, 948 bp, Homo sapiens
cagcgaactgctctggccccggggcagctctccagctgaatccgtgtccaagaatggaaccaaactctgagccaaagtctcagtcgattcctgaagcggagctgacgtctgggaggaagcagaagaccccagagctccccttggatacatcctcaggctcccgcaccttgggcttcatgttggaagatgagcgaagagaagagaagtggggccttggcctgccttcctgagataccactgtggctctctccagctactctcttcttccatttatggtatttgtgcctttccttcacctgtttaggcctttttgtggttacagtgcctcatcctatctctagaggtttctccgcaccccacccagaacttataaacagtctcctgttaaaactcagattatctagcatgactgtgctatttgctgcctacagggatcccaaagatacaaatgggagcatcagatgtatgattttctggagcttagctgtcaggctgtatcaacttacatggaatcaacctgaggcctttataagcataatttccagttgcactgatgtaatttctttattctgtcccttattggtggcaattaggttgtttccagtcaccctatgtataactttactgcaaacatagatccctgtgcttgtatctttgcacatatatataagtgttaactgcaggataatttttaaaaataataattgctacaccaaagagtatttgtatttgaaacattaataagtactgacaagtgtgccacttagaggtctgtattagtctatactaccattgacagtgtcttgccattatagcgtattatttgccaaaccaataggtgcaagaaagtatcttattgccattttaatttgcatattcaaaatttaagatgtacaacaactttccatgtagttaaaatgattttttccctgagagactccttcccta

SEQ ID NO: 2228 - DNA, 3496 bp, Homo sapiens
gttgttcagtttccatgtagttgagtggttttgagtgagtttcttaatcctgtgttctagtttgattgcagtgtggtctgagagacagtttgttataatttctgttcttttacatttgctgaggagtgctttacttccaactatgtggtcaattttggaatctcactgagcgggtggagccgtggttggggcgaaggtcagtccctacctgcatttctgtgtttatttgacagttcttcccttgtggtctttctctgagtggagctgagagtgcggccattcagcattcctgtcaccacccatccttcctccatggacactgaaggcttcaaagtgggatctcagtgggccctccaggttgttgcttggttctcacagagaccatttgctgagtcagtgggcactggagcggatacaacacccgagagaggtggtggatgttactctcaggaggataacacctagcgtccaaaaatgccacctgcccagatttaaccagctcaaaagataaaatgagtcacagtctgattcaggttgtatgtttccaagcccacctgcattttcctggataacgtgtaattgggtttacatttttcccgagttacttatgtaggcacaacgcgatgcaacaacgtgctcctcctcagccatgaatagcccaaggctgtgtggttgcctaatgtaaatctggctcaacagtggatagatctttgctataactgtaaatattttgcagtaaaaaagaccccttccaacaagactcaaatgcagactttcgttggcatcttttccaataaactaagtctccaagttctaatgtatggggcacattgccttctttaggaagcagatcatagaaaacttcttagatctggtggaaatcagcttttgaatattgcattagtgccttacagtgttgaaccgtgtcatgattacctaagacaagataaacatggggatgtctcatttcaggaagcagtgctacaggaaagcttcctcctaaattaggcttctacgtggtgtgagcaatcaggtatttgttagatatttctatggaaacaaaaaaaaaggttactagttggaacagattataaactcagtctctcagttcagagggaagccagttgagatttaatagatttgagctggaattatctttagatggtaaaatgagggggggaagtttcaatgtgaacaattttcctgatttgcagtttgaatgtcccaggcaatatcaccaggtgttccaatgagctctctaagtggcccacacaggaacaggcatgaatgttgtccatgcatgaactgtggcagcgatttctctgaagtttatatcaaattttccagtttcaacttgcagggagtgagggaaagggcagttttatttcttgtgattccaggtcagaagagtgagggaaaattggaaatgttcatttcgaaagtcacagccagacattggaggaaaaaggaaaaactcaagttgcagtccaggttagaggtacacagcaaacctcaaagacattgaacagggctagaatctgataacaggtacaccttagtacctcaaagacattgaacagggctagaatctgataacaggcacactgtagtacctcaaagacattgaacagggctagaatctgataacaggcatactataatacctcaaagacattgaacagggctagaatctgataacaggtacactgtagtacctcaaagacattgaacagggctagaatctgataacaggcacactgtagtacctcaaagacattgaacagggctagaatctgataacagttacactataatacctcaaagacattgaacagggctagaatctgataacaggcatactataatacctcaaagacattgaacagggctaaaatctgataacaggcacactgtagtacctcaaagacattgaacagggctagaatctgataacaggtacactataatacctcaaagacattgaacagggctagaatctgataacaggcacactgtagtacctcaaagacattgaacagggctagaatctgataacaggtacactgtagttttctaccagaacacaacttttgtctcttcagtcaccccaattcctaccaaagataatcatactaagactaatctgtttgcaaaatcagtctaatctcattaaacttggactgatcatttatgtaactgcatcaaggatagtggttcaatgcacattctcaaatatgacattccagtcaaagttttggtgataaccaaaggggttattagctccataaagtcaatctctactcattgaaactgtctggtaataaggagtctcagattagacttttaaaagccactccaggctaagcaaccaagccatggacttgcacaattttgtaaaatggagataacttaactagtaataaaagttgtatgtctgtattataactaatattgacaactctgaaggtatatccttttctttttttaaaaaaactaaaccaacgatattcttactcaccaaagattatccgtgtcacatgaacttaaaaaacatttgagtaaattcctgtttttctgaaagttttagaattacttatacaagtgcttatttttctttgagccaattaaatagagctattttatacattaattttggaaatgccatccagaggttaaaaaaaaatacacatgtcataaagatagagatagacagagatcttacagcttccatttagaaatttcagtcatgtgtctggtacaataatacaaaacttgctagtttataaaagaacagctggatccaaattgtgtttctggcagacaaaataatttgctcaaatggctaaagacttttttactaaagatttttcatttgtgcactgtaaggatacttttggagaatcagtttgtcttttagaagcttctgcataacaaagaaggcatttcactgtctctgaaaagatgaagatcctctgtcttcaagggcacccctaagctgatctatcttacttatggacttacacgatctacaagcaacatttttgtttttttcttttctaatatgtaaatgttaaaggttccccaaagtggccatggcagttccaaattatccttttttaagtttacccatttttccaaaaacgcacaagatcctggcccacggaggattttggaccaggtggaacccatctttgccttaaattacccagacatgaacagctgttccaaaacagttcagctgtttcttccacttctgtacagaacagggtgacccaccaagaaggttcaacaaagattactcaagaaaatgggcaagctcaacacaaagggtgtggagattggatcctagagacttaccctggacttccacggcccgtgagaaagcagtaaatgcagtaggtccttgggtgccggccctgggctactcgctgatgcagcgggtccatgggtgccggccctgggctactcactgatgcagcgggtccgtgggtgccgg

SEQ ID NO: 2229 - DNA, 5339 bp, Homo sapiens
attttttcgtacgttgaccacttttccagcataattgctaagcccatgtattaatctaataatttatctatagtttattttgaatgtctatatacacaattatgtctcctgcaaataatggtagtttttcttctttctaatcttttttcttgccttattaggctggacttactagattaatccagtacaatgtaaacctaatgggcttattatattagtctagcacagtagttaataagttccaatcttgtttcattctcagtttcacagggaaaggtttcagcatttgatcattaaacatgataggcattattggcttattgtagatagcgtgtatcatattatgaagttcacctttcttcctagtttgctgagattttgttatgaataagtgttaaattttaacaacttttttctgcacctgtttaaaaaatatttttttctttttatgtaactacaataaatcattttagtttcaaatgttaaactacccttgcatttctggaattaactagtcataatgtattgtgtttctcatatattgttaaattctttttgatcatattttgttgtgggtttttgaattctagcattatgtttaggattcatgagtaagtttagtaaataattttcatgtaatgtcccttatcaggttttgatatcaacattatgctgaccttataaaatgagttacgaagtactcattattttgaaaaatctctggaagcgtttatgggaagttgatgtcatttcttccctagtgattctggcttttgggaaaatctgcatattctatgaagtctagctctcaccatcttccctcaactagcctcagatctgacagttttgggtaggtgtgcttcatagtttatgttttgggcttgtgcttgtttctttacttctttgaaaatggtgtctttttcttgatcttttttgtatgtacgttttgcattgaaatatgctaagtaccaaaccagtataatgggcaaaacattttaatgggttttaatggagttgtaagaagagagtacagcgaaaatatttttcttctatctcttggggaaaatacttctgttttaatacaggaacttttgctttaagccaaagtaatgaagctttttctttggaaattttagacatctaagatggaagaatgaaggaactgttttgggagaaacatggttcttaaggagagaaaccatggcgtgtgggaaagacactggattgggagtcagcaggcctgggtatttgactacatcctctcccttattatctgtgaggcacttaacttacttgagcctttagtttcttttcccgtaagacaaagagagcaacaccagccttgccaagctcaccggattagtggggagatcaaatgggataaaaaacatatattatcctatttgtaaaatgctatagaaattaaagtatattatttttatgctttcatattgaggtccctggaaagctgtcagggaataagaaacaaaaggctgttacagctactcttgcctttttattccatcttaatgaatatcccctagctaatctgcagtcacagaggagtcacattaatatggaacttatataattcataaactgccacagtagcttggaaagggtttaatcagttgccttcactctcaattattttaaaacctcgataatagtcaaatgagctgcatggcagtttgattaatttgcattaagcccaaaggtcttgaatgagcagtgagtttatgaacatgaagtgtaagggcttggtggcagcgtatcaagcctgaatggatatctgggctgctttccattggttcctcctaagtcaggctgggagtgtgtgtgtgtgtgtgtgtgtgtgtgtgtgtagcattcacacaattcctatctgtttattacattagaattggccttaaagcctctgaaaatgagctcatttgctgtcacttgctagtgaaaatctttggaattatctgtaaattgcaattgcctatgttcttcctgctccagtttctatggttaacagaattggctggatgttacttttatttttataataaatttggtgctttattttgctcatcatattggttcggtaattagcatatgtcaaggcaaaaaaatcccactagatgacaatggcattcctgcattgttttaatccgagcatatacaacagtgagatggctgttcattcccatttcaggaagccgccctctcaggcacagttctgggaggaatttataactcacattaccatctctgtgggtttggagttataacccatctcatcatgagacatttatgccaaaagggtcaagtggacaaagagggagaaaaaggatgtgggtaagtggagtcagtcatttgacttgttttattgctctgttttctatcggcactggacgactgctggttttaaggaaacaaagcaatctggtgtgatggtcaggtagccctgacgctcacccacctctaatcccattggcagtattggtcccatcaagggacaaagcagtggtaggtagaataaatgggtccggagactctcagaaatggagtgactaaatgtaccatcctatccagtatatgcttaccttgtttatacttagatgctaaatgttgaccaaaagttgctgatatggccagtttaaacctatgaggtaactgacagacaacgaatgttggtgggaagtctcatgtgcttactctaggatggtataggcatgcactgccacaggtgcatcaagtcagggagggcagggaactgccagctccagccgtatgtggctaactcagctggttagagtatagttgatgctctgggatatggatcagatttgatcctaagtgagcaagtcagtttcttcagatctacttctctacaagccagttctcaaatgggtgctcttggtcacaagatgatagataggaatcattagactataatgttgcatgcaggaaactcggatcttttgggttgcactgctaagtttaatttctctgtgtctgtttcctcatctacaaaaatgagagtgttatgggataaactgtctcctcaaaattcatgttgaagtcccaacccccagtagctcagaaaaatatgactgcatttggagatgggggtctttaaagaggtaggtaagttgggttactttgtaggacccgaatccattatgactaatgtccttataagaagaagtgagatccgcctgtaatcccagcactttgggaggctgcggcaggcggatcacgaggtcgggagatggagaccatcctggctaacacggtgaaaccccatttctactaaaaatacaaaaaattagccgggtgaggtggcaggtgcctgtagtcccagctactcgggaggctgaggcaggagaatggcgtgaacccgggaggtggagcttgcagtgagccgagattgagccactgcactccagcctgggtgacagtgagactccatctcaaaataaagaaagaaagtgagatcagagacaatcacagaaaaaggaccacgtgaggacatagggagaagacagccaccaacaagctgaggaaagagtctttagaagaaataaactctgcagaaacattgatcttgaacttccctagaacttccccaatccccagaactgcaaggaaacaaatttatgttttttaaaccacccagtctgtggtactttgttcacagccctagcagactaacataggggagtcgtaatgtactaccagccttccaagttgtgaggatttactgagatgcttgatgtgaagcaggtgcaacagaatctggcacttagtacaaagagtgcttatttatggaatggttattgtgtaagcacaagtcctcctgctgagacaatttttcaacttggtgtatgttcaaggcacctagagtagagctgttccatagaactttctgtattaatagaaatgttatgtagcaatgtccagtatggtagcactttaattgtgactagtgatactgagaaacttaattttaaaaattggatttgaatttaaatagccacaggtagctagtagctattgtattatgcagtttagattacacagatctgtattagacagatagtagaagatacttatgtgaggcccatttctgatttaaatagctaaaatatcatatctttcatcagcattaggtaccagattcttcacagtcctataggctagtttacaaaagtcatcaatctcattttcacttagaattactgtattcgatgtcaactcttgagtgtccaacacattaaattgagttctttgctattttcaaccaaacatgttaaaatcccctattgctgtatgccttagtggtaggaaattgtacttaaggctgaggtgggaggatggcctgaggccaggggtttgagaccagtctgggcaacataatgagatcccatctctgcaaaaaattaaaaaaaattagccaggcatagtgacatctgtagtctcagctttctggaggctgaagtggaaggatcacctgagcccaggaggtcaacgcttcagtgagccatgatcatgccactgcactccagcctgggtgacagagtaagaccctgtctcactaatttaaaaaaaaatagtattgaaaaaaggacccaaatgaaaatggcccataaagggcttttatttggatatttgagggaattttaatttattctcaggtttgtatggatctctctctcgtgaagaaggaacattggaaagcaagaaggatttttctaactggatctgaggcatgaaagcgaggtggggtccccagactgtggctcaggaccttgttgatgaggaatatggacaaggacctagattcttactagttgcttctcaaagcaggagcgtctgcttttaccttaggggagaatgatcaccccatgacttccagcatacttcaccacttcaaaaacacagagatagctggaagagaaacagctctatggtaaggcctgtgatcatggaggaggctttggtatagggacagaactgcaagattaaagcaactgggagccctgagccacaacatgggggaaagatgccttgaggaagcacccggcttgctcaaaattctctgttgcattaagccactgaatttgggggttgttactgtaagataacctggcttgttctaatatacgaatcaatgagaagacacgacaagtctttttacactttttccatcatcggtaggttatatatggcactgaaaacccatgtttttagtatagtggtcgagactaaacattttataattatatctctggcctagaattaccttccctcccctattattggttatgttgaagccatgcagttcc

SEQ ID NO: 2230 - DNA, 1683 bp, Homo sapiens
gtttagtacatggtagttcactacatactgattgaataaaggaacactctcaaatcaattcttaaaaataaatgctccaatggaaaaatggaagaggatacaatttagaaatgaagaaatatacacaaccaataattactacattataaactctgtgaaggaaaacacatgtccatcttctttatcatatttccagtgcctagcattgttttggtatataacagattcttaataaacaactgatgaataaataaatgaacaagaaaaattgttcagcctcactaatttaaacaatgacaacaaaaaacaccattcctacctaacaaaatgaaatcgatttctttttaaactgcacaaactcagtgctggcaagggtatggaaatacttaggatttaatgccttcttttaagatcaaaagctctagctgggcacagtggctatgcctgtaatcccaagcctttgggaggccgagggaggaggattgcttgaggccaggagttcaagatcagactaggcaacatagaaacaccctgtctctacaaaaaattaagaaataattagctggctgtggtgctgtgcaccagttatacaggaagctgaggtgggtggatcccttgaaagcctcaggttatgatcatgccactgcactccagcctgggtgacagagcaagaccctgtctcaaagaaaaaaaaaaggatacaaaaaccaccaaaagctccttgaaggcaaggagtgtaactattttgtttattgtaataaactttctaaagtctagcacatggtgcttaataaatatttgtttactggatcagtgaatggagaacaaatcaatatcaatctcctggagggtactttggctctctagctgtaaaaacattcataccttttgacctaattattccatttataacaacgtagccttagaaagaaaatcatgggccagcatgcctgggcaagaactgtcatttttttaaaaaggacatggttcttacaagttcgcttctgctaaacagtggttctcaaacttgaatgtgtattagaattacctgaaaggtttgtgaacagaaactgctgcctctgcccctccctcttactcagtaggtctggatggggccccaaaatttgcatttctaacaagttccacttcgctaaaagacggcaacatagaaagcccatatggtgtaatgaaaatgatgtgggttttgaggtcagtcttggctctgccctttttaagatgttttgtagaaatagttgacagactctaatcctgctcagcctctgtttccacaccaataaaagtaatgcacacttcatagatgtattgtgagggttaaatggtatgattaaatacccaacatagtgcttgactcagttaaggattttaattaatggtggtcccctttcctttgatttcctcaaagatacagcacactgggtttatggtaacatgatttaggtgtaccacaggtcaaatcatttccttcaaacttaacaaaccatacatgttcatctgctactaacaaaatcttcattgttcatctataaaattgggaataatagtgtaacagtattttctttgataaaatagataatactgtctactttgtaggcaaccatgaagattaaataaaataatatcagtcaggcacggtggctcacatctgtaatctcagcactttgg

SEQ ID NO: 2231 - DNA, 20648 bp, Homo sapiens
gttcttagtgttaaaattttcatcgggattcagttaacatacaatagatattaaaacctgattgatcaaaacaacagaactgtattataaattttagtgagtacttattaaacataagaaataaaattttattgaatagtcctttcttactgaaacttaacaggactgtttttacagttggtttgtatatttatggataaatatcacttattgctagaataagaggattcaacatcaattctatttctcagttttgtttttataaatataagcattaagaaacttggtttacataaataattagaaggaaattagatggaaaacattttgctttctcaatgccacttaatcatttgagtgccttctaagttatattcagaaaatcacatagtgatccatgttaaagtaatttttaatgatctttgaaaaaaatatttggccctcttttaattttcctgaagcaaatcattaaacaccataatgcttgggaaacaccataatgcttgggaaaagatttttttaaaatcctgtcattaaagtcatttacttttgaaatattttatttttaattgccccatttttccagccctagacttttttatacccacagtaagttcaggctgagtgagtggcatgttcataagagaagcacgactgtgacaggggaatgggaaatggagaaccagcgtaatgtctccattgcaggtaaatttcatacggaaattaggtatctggaaaaagattcccttaaaactgattctttatacccttatatccttaaaaggcctcatgtacctcaggaggcctgtgtatctcagtttgagggccaatattctcgtagagacaaaaatgtataaaaatatatacaatgtgatacttcttgatactaaaaaaaaaatgctataaaaggaagcatatggtaaaaacctggagggagagtgctatgtgagataaggcaatgagagaggcccctgtgagaggggctgcctaacctgagcctgaaggatgagcatagttgttttgcagagctggtcaggcatgttgtaagtgggaggaacagcatgtgcaaaggtcctgttggaaataagcttggcatgtttgagtggcagaaagaggatctgtggggctggagcatgatgaccaaggggaagagtggaagaaagtgaggtccagaaatgggcaaggccatatttatgaggccctgagggagctgcacattattttcagcatgattcaaagccatctgaggttttaagcaggagaatgacaagagctgagttttgctttagaaatatctttctgggtgctgtgaggtaggggcagtggatgatagggaagtaaaaataagctagcaagttgcaagatagctatagactactgctgtcatccacgagggaagtgactgcagcttagaacaggggacaacactgaggctgataagaagaactcaatttaggaaagcatttggagaaaaagccaacgagaattgctgatgggttgcatatgcagtgtgaagaaagaaaaataatctacctgtagaataaattctagaggtggaattgcttaatcatgtctatgacatattttaaaaaaaaaacataaactgaagtgctgggcagatattttggacgacacactaagtgatcaagaactccagtctgaaaatctacctggataagcagtgatatggaccctactcatgggccatttttccatatcaccatacatgccccaggcactgaaaactgccaaataaaccttcttaaaatgaggtccattttcaaggaacaactcttattgacacagttctgatcagtccaaagtgtgcaactatctagtcttaagtatgttttatttaaataatgccagtagggagttgtgaagctaaaattaatgttttgaaactatccataatttttttaaatgaattttttattaaccttgcaagagacgtgatctaaatttttatccttttcttgctatagaacatattataaaattgttgtaacacaaaaaggcaatcaaagagcaagcagccaaagggtaggaaagaagtattataggtattatagagagttgtcaggcaggtaattaataaaatttaattttatcttgcttgactttgtgattattgtggtatttttcagtaattaaaaatttgtaattcattgtagtttccttttctcagactaaacaaatactttcatactaaatatgtatttaaattttgtattttttatgtgaaagagggctccccaaattgtttaagcttcaggaccataaaacctggacctgctcctggcaagtgtcatcacttaataacataggaaagacttgacatggagcaaatgattgttgttgtttggggagatgtaatgtagggggcaattaatagggcttttttggcttggttaagctagaaatgtccatttaccatcttaatggatgtaggcagttggataaatgggtctggagctcaagagttctgggttggacatgtaagttttgggtataattagtgcataactttaagagactgtgaagattcctaaggtaagagtttatagagaaggaaaagaagagaagaggattcctgacaaagctctgaggtcttcaacatttagaaatttagtataaaaacagaatcagcaaagagggccaagcagcagcaggcaatgccataggagggaaactaggcaggtggtagcccagaaaccttgataaaggattccatggaagaaggggagtcagtcaggccaagcccagctgggaggttgtcttagttcatttaatgttgctataacagaatacctgaatctgggtaatttataaagaaagaagtttatttagctcatggttctggtggctggaaagtccaagattgggcagctgtatctggtgaggggcttatgcttctataactcatggcagaatgcagagcagaagaaagcacatgcaaacaaagaggccatgcaggaggagtaatctcactttataacaacctgctattgcaggaactaatccattcctaagagagtgagaacctacccacgacattaatctattcatgagggatttgctcccatgagacaaacacctcccactaggccccatctcccaatacaactgaactggcagttaaacttcaacataagttttagtgaggacaaaccacatccaaaccatagcagaggtcaagaaagtcaaaggtggggttggtcaaaagcctcagccattggtgactctgacatgtgccattttcttagagtggtggatgaacaactctggagagaatttaggatagtcttggaggtaaggaagcaatggaccgggtgcagtggctcccacctgtaatcccagcactttgggaagccgaggtgggcagatgacctgaggtcaggagttcgagaccaccctgaccaacatggtgaaactccgtctcttctaaaaatacaaaattagccaggcatggtggtgcatgcctgtaatcccagctactcaggaggctgaggcaggggaatcgcttgaacctgggaggcagagattgcagtgagccgaggtcacgccattgcactccagcctgggtaacagtgtaagactctgtctcaaaaaaaaaaaaagaagaagaagaagaaaaggaaaagaaaaagagaaaggaagcaatgacagtggatatattcatcctgcttgaaagtatggctgcaaagaagaacagaaaagggtggtaggagctggaggaggtgtgggtccaaggggtgaatttggttttggttttttaatgaataatattaagcatatttatttgcaaatggaaatgaaccactagcaaggaaaaactgatattgcaggaaagaatggggataattgcagaatgatctagagtttgaatggaagcctttgcctgatccattttctctatacaacatggagagaatttggaatcacaaaatgactattctgactatcggggatggggcacaggagaaggagtaataaagatttgaggtgagaaaagaaatgtgaggtattcttgaagggaaacatgactttgctgtttctatactttattacaaaattataaactctttaggggaggccctgtgtgttatacatttatggaaaccccatagagtcagcatagcatcttgcatactctaggacttcaatgcgctcctgttgagtaggtggatgggttggatggatgagaagtgccttgtaggaatccaaaggaataaattaaaagacttcatcaaatgggggaaatttcgagtgatgaggaggattccagataggagggtggcatgagtaaaggtgcaagtgtagcttctcctgggaggactgtgcctggatctgaggagagatatgtgtgtttgagatgatgggagatgcattcatatgtgttggtgggataagcccaaataggttatgccttgcaagtgatgttaaagactttggattagcatgtgattagcatgtaatgcggtatccaggttgagattttttggaacttagttaatacagcctggacaaacagaacatttaaagccacaagtagttttcagtcattcaaaatatagaaatttaaactagaaagataaagacttctgtttttagggatatcatctcaagaagtctacagtacgaaaatgtaaaataaatactactttctaaaatgcagctactattaccccaagaggctggagattagcctagaaagtaccattattagaccaatgtgttatcattcaattgcctggtagggagtggggcacagaggaacatgtaaaaccccaatagacggagggtggtgtttctcttgaaaggagtgaacatcaccactgtcaattgccctgggaagaagtagatcctatgacaggaagtaaggattgagaaggtagactacagactagagaggaggagaaactcatctctttctgtgggcctctggtgatgagcctgatcaggctttgagtactttcagtggtgggcatgagcgtgtactttgtaagcaggtcaacatttaggcagaaggcagtgggttggcctgcagattcagagaaatcacatctaagttctctaagttctcttcttgtgcttccccaacccttgagtccatttcaattcactttcagcctggcctaagcaaggtggtagggagagaagaacatgcctgggacatgtttgggtcctggtggtgaagggcagagcagagccctttcctgaggcctgaatggtaaaagcatcatacatgtcaccatgcgccacagggcagtgatcccttgggaccacaggcagtagtggcaagggcatgaagtatcattattaaacataagagtctgtcataggggattttctgaaataactgagggaaactctacaagagcaggtggtagccaaagtcatagtttagcaatttaatgaaaaaattcttagtgtttaagcaggtgatgataagtcagtcctctatctccactccctgaatttggaacctttagagatttagatacaggagactaaagatgaaaacgtcaactttattactactagcactggcttggaaattgtcatatacacacagtaaacaaccagacagcagacacactcgctctgttggggcaatattcctgggggagaccacaaagacaagaatagcagcaggtgtgtggatccccagtgcccactgccttctaaagaagaacaaagtgatcggtggaatcagacatcaactttcaggaaagggactctgccctttgggctgagaaattttaaagctgcattaataaagaaatgccaagccctcctctggagtaagtagaggtcacagtacagtataaggataatataaggttctggcatggcagctcagggattgtggctggaggaacatgagctcctcccattgcataaccagaaagctaggtctatgcctggccattgctgctgtgtactgtggcaacttcacagtgtgaaggaaaaatatcttgggctccctaaatcactaagctaaagggaaaagtcaagctggaaactgcttagggcaaacctgcctcccattctattcaaagttatccctctgctcactgagataaatgcatatctgattgcctcctttggagaggctaatcagaaactcaaaagaatgcaaccatttgtctcatatctacctatgacctggaaactcgctccctgttttgagttgtcccacctttccagaccaaaccaatgttcatcttacatatgctgattgatgtctcatgtctctctaaaatgcataaaaccaaactgtgctctgacaactttgggcacatgtcaggacctcctgaggctgtcacaggcacgtgtgctcaaccttgcttggtaaaataaactttctaaattaactgagacctgtctcaaattttctgggttcacattagcatgacctgttcccccagcattcatgattgggaagccactgcctttctcctggcctgctcaggaggctaggtccaacccttgggattcactgggattggctgccttccacccacagctataattcatttccaaggagctttgcatccagctccttttctagaaggctgatgagtgagaatcagtcttggacacattagggcttacctttctgagccaccccaaatgagcttcccacaccttcttcccaaattgtcctcaccttctcagatctgcaggccttccagtgcagagggaagatctgcctaagtaagtttactggttagaggagcagaaaatgtatgtgtcctgaagcaagatgctgtgaaagagaaaacccagaaaaggctaaacctcagtccttcttccaaatcatcagcttagtcattcacctacccttggagaggggagcaaaggatagagaagctgtcagaaatattctagtttttcctcctggggagggaagcacaagtttcttgtcctctatggaaatgtgcagcagctttggatcaaaaataaactggacatggatggatggtggtgatggcttcacaacagtgtgaatgtagtaaacaccaccgaactgtacactaaaaactggttaaaatagtacattttatgatatttactacaattacccaatcactgtaaaaaaggaactggatctaatcatgcttttgattttatttttgctttgttttgaatagttaatatattcatatgattttaaatgtaaaaaacacaaatggccccttcataatcttttcctagctaatgcagtttcttcttcagaggcaaacaataaaaacagcattttcatattcttccagagatattttacgcattctctagcaaatacatgttttaaaaatttttgacacaaatggtattgtatgttacacactgttctgcaatttgcattttaacttaatgaaatttcttggggaatgctccatatcagtgtatcagagttccagcattcatagagctatacgttttcctagagcacagatttccgtagttggcttaaccagtcccccttatgtgcaaatatagatgtttttactcttttgttgttccaaacagtgaatatcctcttatgtgtgtcatttctcatatttatctactcataagataaattcatagacatggaattgtccaatcttggttttaatagttttcattataggccaacttgactttaatgctgttgagtagacatttggaatgcagtactaactgaccaagacctctaatctaacaagctatccagaaaactgatgatgtctttcttactcacagatcattgttccagtttcatatgtgcactaaggtgggaaaactgtcaaacagaccccaagaaaataatgtccattttcaaaaagcaactctttctggcagaggtctgattagcccataacacataactatctgattataaatgagctttcttaaaataatttttaatattttttcccactgtaatttttccatgtttctatgtatgctatacatttttgttttgtaacaattaaagggccctgacaggttagccagagaaagtaatatttattatctgtatattaagatgagaaaacaaggaacataggccaagggaagtttccacttgtccaaagtcacccagcaagttagtgggagagcctgaactaaaatgcaggtcacaacctaatcccatgctctgttcactgatccatatttgtcctttttgccagttctcaaaagtaagtgagctgttcctaaacctattgggtctagaagtggtctcagtttatgggcagctgacgatgtctcactatgaagaacttgtcctgatggtgtgcagctgctgaagatgtatagcagggatcttccatgggaggtccaagaaggctgatatcttccaggcttgcctataggtatatgtggctcacatgccaagatgggaacaagtaagtctgagcttggagaacgtttgatactgctaagcagagaagaaccaggggtgagtgaattttgtgcaatggggaagaattcttcacattgtgtgtaccaaaatgctatgaactattaatatagtcatgctttgcataacgatgtttcagccaacaatagatcacatatactatggtggtctcataagattatactggagctgaaaaattcctcttgtctagtgaagtagccgtcataacgtagtacacaatgcattattcatgtgtttgtggtgatgctggtgtaaacaaacctactgcactgccagtcatatgaaagtgtagcacatacaattatgtacagtacataatactggatgatgataataaacgactgtgtaactgatttatgtatttactatgctatcctttttattgcaattttagactgtgctccttctacttataaaggaataaaattaactgtaaagcatccttgggcaggtccttcaggaggtattccggaagagggcattgttatcataggagatgacagctccatcctgttactgccccaaagaccttccagtgggacaagatgtggaggtagaagacagtgatattaatgatcctgactctgcgtaggcctaggctaatgtgtgtgtgtcttagtttttaaaaaagtttaaaaagtaaaagacaatttaaaaatttttattagaataaagcttacaaaataaagatataaagaaagaaaatatttttgttcagccatagagtgtttgtgttttaagcttagtgttattacaaaaggttcaaaactttcaaaaaatttaaaagtttataaagtaaaaagttatagttggctgagtgcggtggctcacacctgtaatcccagcactttgggaggctgaggcaggtggatcgtgaggtcaggagttcgagaccagtctggccaacacggtgaaaccccatctctactaaaaatacaaaaattagccaggtgtggtggtgggtgtctgtaatccccactactcaggaggctgaggcaggagaattgcttgaacccgggaggcagaggttgcagtgagctgagatggtgccactgcactccagcctgggcgacagaccaagactctgtctcaaaaaaaaaaaaaagttatagtttaatttttaaggttaatttattattgaagaaaaatttttaatgagtttagtgtagcctaggtgtacactaggtgtttatagagtctacgatagtgtacagtcatgtcctaggccttcacattcactcatcactcactaactcacacagagcaacttctggtcctgcaaactccattcgtgttgagtgtcctatgtaggtgtattactttatatcttttgtactatatttttactgtattttttctttgtttagaaatgtttggatacacaaacactagtgtgttacaattgcctacagtattcattcagtacagtaacatgctgttgcaacctagaagcaataagctacaccatatagcctaggtgtgcagtaggctacaccatctagctttgtgtaagtacattctttgaagcttgcacgatgacaaaattgcctaatgacacatttctcagaacataactccatcattaagctacataacttaaacccctgctatgcaatgaaactcaggtagcatattaaaaaatagataactcaagcattgcatacagagaagccattcttggaacaccagacaataagcattgcattagatcagagcagttctgggcacatctatggtcaacaagaaatattctcaaagtctgaactttgagctatagtagacagacaaactaagaattcctcaaagttagtatttccaaccgtgatgtaagagtctattctgagtgttgtgacaaactatctccagatctcgctagagtaacacaataaaggtttgtttctcacccatcacagtcgggtatggctgtatgagggaggcgtgaggaaggatctgctcctcgcccatcacagtcgggtatggctgtatgagggaggcgtgaggaaggctctgctccatgcattcatggaagtggccttgatcaccagcctagcacttcactggcagggctcagtcaatgacatctagtggctgggaagctcggaaatgagctttcctttgtgctcagaagtaggacttgggcgaacacatagcagtatctctgctccatccacataaacgggctcagaacttaaatggaaagagacgctgaagagggcatcaaatatatgagaactggaacagggaaaggaacaaagatctgaacaggatcagatagagatatttgcctacagacaagtccttggttaaaagaccgtggaaattgattctagaactatatattatttatggcttgtgggacgcagaaatgtgttctggttacctgtgcaataaactgtacatacttctcatttcagagttggagtcaatcactctctgttggccttttttgctgtctttacaaagtcatgggttaacgaaccctactgggtacttctaacatgaggtgtctgggctgggagagtcttactggcaattgatgtcaagattcttcgtccagaggcacagagcagaaaggttcttggtccacagacaccttaaaacaaggccaccctggccaggtttattcccgtctggcggcctacacatttcttatatcctggaaaaactggtgagcaagcaagtgtcgacctcagagtctctgacagggctattttgaaaccacacaccatgaaaactctcagggaagttaaaaaacaaacaatcataaccaaggcagtttagctgttttgaaaagagatggagcttcattacttcaaacccaaatttctgcaagcctgacaaccaccttacatcaaaataaacgtctacctgctagctgaaatgtttaaaaacacaggtgagctctattctctgaaatacaagccttctctaacctgagaaatgtaaatacctatgaaggtgggtccatgaaggggaggttgatgaggatgggcctatgtaagagtgtgtgtcaaggttgttacttgtatttgtgttaccctgtggatgtgtgtgtgtgtgtgtttgtgtgtgtgagagagagattcagagcaggaagaggaaggcaactcacatggatccatgtttttcgtaacactgtgtgaaactccagttaattgactgtaaaaaaataggaacccacaagtaactgacattagtaccgctgaaaggctcccagaagacctaactcttgctggctccataatcacaagcacctgcaaagctctgccttggtgaggagagggcagagcacacctgctaaccgacatctgcctggaggaaggaaagacagagcttcaaccctgaacacagagtgctggtctctcttatgtgcttgactgtcatgctcagttgcattgtgcatgagtctgcctgtcagcctgcactgaattttgcagcactgttccagggtttactatctgcactctgttcccaaagacctgttgcccctacctgtgtgctcccggaggaatctggtttctataacaacagaccccatcaccagcgtggtgcacaaggccacctgccaatccattctgattaagcccagccctcagcctgtcccctccagacctgtcacaccaattcccattcaggcaccagcactgatcatcagtatttcccaagagtggaaaggggaaaatagagactcagtaaatatatgtaaataaaagcagagttttcgtaagccattctaatcttgatatagtttgcatttccttcactgttgctttataaaagccctcttaagcttgcagcaagaagaataggaagtcagctgtcaattagcttactatgatgttttctcagtcatattttgaaagagaagttgaattcaacattttccaaaaatctgcaaacagcagcatgctgcatttatggagatgacaccttttgtgggtttttctctttcatgggtaggatttttcggagagaccacactgggagaagagaataggtgaggagttgctctgtgagcttgctgcaatctggaaggaataaagttgcagaaataggaaattggaagcagaaataggatataggaaagtcttaaggactacgatttttgtattgcaactagattcacctttgcagccatccttttaacaagacaagccactcaactaatacatgctctgaaggagcgaacagaactgactaaactaatacagaagcaggggctcagtggctgcaggttgcatgaaaaattacccattgcagttgcagggccccattgtgagcaccggtcctctaggagaatgctgggctacttctttctttaccaattgttgctaagagcaggtgacctcacatgctgttttagcaactcttactactgagaattattctcttgggaagttcagaagctggcaaaataaatctttgtattcactctgcttatattctgacaacactgactaaaatcctctactttgaaaaggaaatattcttcccaggcaaatgcaactgatgaaatagattctctgtgtgtggatttgaaggtgttaaagtaatgatactaattgctttcattttgataagctttacaggctccagagttctctcacgagttccatttcatttgatatttgcagttaccatgtgaggtaagcagagctgaccttgactggcatctctatcagcagctcagtgggattaaatggcttgccaatgtcacaagcaactaccaaggggccacctgacagaacatggccgctgcagaggaaccctgctacctgcagttggtgacatggcctaggtcccagaggcctcgtggtgccacacacacaagaacaggcaccaacaaccagtgacattttgacagtcaaatggaacctgtgactgccatctgtagatgtgccagccaagaatgtgaccctggggaaagcccttcacacaggtctttccttggtgtatttatatttagttccagcgaaaaactgcagttgtttttctcagtgacaggcatcaaacgataaccgaaaagaatgagaaataattgttccctttctccctgttaggagattgtactctttgaatttgggaccacagctctctgaacagctagctctcccatgcctggctcatgagacatcataaatgttgattgtattaaagacaatttagagggaaaggacttgaattctggttctaagctattaaaaatatttctacattttaatttttaaattaagaaagattttgtacatatggaaaggtgcagaatataaaacagacaaccatatgcttaccatccagattaaacaactgttaacgttttctcgtatttacttcagatcacttgaaacaaaagaaagacaaaaagatacggctaaagccttggcccccttcactcacatccctcccctcctcccctctgcagagcaacttctgcctgaagctggtgtgtgtcatttccatgcatgatcttgtgctttcagtacatatttgtatatccaaaacaatatttactattgttttgtgtgcattcttaatttacataaatggcatcatattgtaaattctcttgcaacttggcttttcttactcaacagtacattttagggacttatttatgttgtgtggatacagtgtagacctagttcattcattttaacttaattgtgaaataccatagtttacttatccatttccctattgggtaaaattagttattgctttattgtcgttgttgtttattgcaatgaacatgcctgtgcatgcatctttgtgcacgtgtttgttagtgtaaatgccctgaagtgaaattgctaattagtaggaaatatacttctgcaccttccttagcagagacaaattgttctcccaagtggttgtacctatttgaactcatgctagattagaaatccctgtgttcctacatccttaccatcatttgtgaggctttcaatttttcttatccaataagtacaaatgacattttatttttttaattcacatctctctaattattcatgagcttaagcatttttacatgtttactaaccagttgtgtatgtgcatgtgtgtgcatgtgagagagagagagaaataggttttaatcctttgttcttttcttataaatttatagttgtatttattctgaagttcttatctgagttgaaaagtgttctcacaaatggtatcttgccttttaattttgtttatgtcatgttctattataaatagctttttaattttcatgtagttaaatttatatgtcttttcaaggtttgtgggcatttgtcccttagttaataaatctgtttctaactctacattcaagatattctcccacattgttttctaaaaattctaaattttttttcccttcacatttaaatttttgtccatctggaatttacttttgcttatgtgatgagtagggatctaattttatctttttccaagcagaaagttaattgtcaaggatgatccagactttcccgctgtttgaaatgtcatttctggtgttttttttttttttttttttagatggagttttgctcttgtcacccaggctggagtgcagtggtgtaatctcggctcacggcaacctctgcctcccaggttcaaacgattctcctgcctcagcctcctgagtatctgggattataggcgcacgccaccacgctcagctgatgttttgtatttttagtagagatggggttttgtcatgttgggcaggctggtctcaaactcctgacctcaggtgatccgcccacctcggcctcccaaagtgctgggattacaggtgagagccaccgcgcctggctgaaatatcatttctgttaaatacaaattcccatatataagtggatcagttcctagactctaccattctgttggttcatttgtctatccccacacccataccagaattttaacattattatagctaaagagcaagtcttaatagctggtgtggtgtttgcccttattttttttgttttagctcacatttgtttttgttttcattagtctttcctcttccagtattttaggatctgattgtggattcctgtgaaaaatgctattggaattgataaaggaagtgtacctaaataggttaatttggaaaaattttgccacttgtactatagttatctatggtaaatgtgatatatctctctatttaggcctcctttttatatttatatcatttaatatggatttataattttttctgtaaatatttatacatttttattacccatattatgaggtatttatagtgcttgctacaactgtaaatagcagcttctgaaaaatgatattttctcacaatttattgtagatgttcggggaccatcttaaaaatcagtttttaattaggtaacttgttgaatttccttattcctttcaatagttggctgttacttattttgaattttttaaactagataatcatagcatctaaaatcataggtgggaattgaacaatgagatcacatggacacaggaaggggaacatcacactctggggactgttgtggggtggggggagggggaggggtagcattgggagatatacctaatgctagatgacgagttagtgggtgcagcgcaccagcatggcacatgtatacgtatgtaactaacctgcacaatgtgcacatgtaccctaaaactttataataataaaaaaaaattaaaaaaaattaataatactgtggctcacgcctgtaatcccaacactttgggaggctgcagcgggcagatcacctgaggtcaggagttcgagaccagcctggccaacctggtgaaacccagtctccactaaaaatacaaaaatcagccaggcatggtggcaggcacctgtagtcccaactacttgggagactgtggcaggagaattgcttgaacccaggaggcagaggttgcagtgagccaagatcaccccactgcactctagcctgggcaaaagagcgaaactccgtctcaaaaaaaaccacccacacgaaacaaaaaacaaataaacaagtcccaaaaaacaaaacaaaacaaaacaaaacaaaattaatgatacttttatttcttccttttgaatcttgctttattgtatttctttacttgttatcactttactgaataggacttacaaagcaatgctaaataagggcttttgatagtaggcatccttcccttattcctgaacttaactggaattattttagagattcacaaagcataactttcactgtagatttgtagtagatcactttattgggttattatttttatttctaacatgctaaaatattttggttattaatgggtattgaattttatcaaatgcattttctgcatcttttgaagtgatcatattttgttcttctttattgtgtctgtgtagtaaactaccgtaatgacttttctattgttaaacttttacttcttaagtaatccagctttgtcataatgtaatatttttaaacactactagtttcagtttgctaatatttgatttcaaaatgtcacgtttataagtgacatcagcctgcacttttcctcttctgtattgtctttttcagtttttgttttcaatgttatattaatatcatataatgggttgaaaaactttcaatcttttcttttttctgtatcagattatacaaaatagaaatcaaatttttcttgaaacttggggaaaacttacctgcaaaactatctgaggtaacagctattttttttgtgactaaatttttaattattgatgaaatatttaaggccataggtttattcagcttttttattttttagttacattttctagaaatgtttttatctaaaagttaaatattagtggcataaagtcatatatagcagtctcatgtttttgtaaatgtgtgttacatctattgttacatatttttctttcccagtatggttcatttgtaccatttttctttttcttctaatcttagaccttcgttggccatctcagttgcttaattgttttctatttcactaatttttgcccatatctgtgtcttctttcctttgtattttcttacattaacagttttttttttgctgacttcttggattgattacatgtgttcattagttatcaacctttcttcttttcaggtgtgtgtatgtgtgtatgtatatctacaattttctctctaaactattgctttagctacatctccaaaatttctatgttctgttttccctttgtcattcaggtctattttaaaaatctccattatgatttctactttgactcattaattatatagaaatgtttcaaaatttccaaacatatggttccttttttggtttcatttttgtaatttattttcagtttaatagcgtgtgaaaagggaatgcggtctgtaggattgattcattttttatttttagatacttttttgtggccaagtatgtggtcatccaaaaataagttcaatgtgtattctctaattgttaagtacagaaatgttatgctcgagttattaaaaatgttatttcaaattttggtatgtttactaattattttgtttgcttgtgctatttagtattgagcattgtattaaaatatcttattgcggctgtggattgcttgacttttttgtgattctggtcatttgtggtttatatattttgagactacattcttaaaagtctacaatcttggaagttttagatcttcatgtggaacggtgccttgcctacctgtatgattatacctccgttgtctttaactcttcttcctcttggaactaagtcaggtccagggggaccttgatgccattgcttatgccccattcccgctgctcttggattgagggtttttgttttgttttgttttgtttgttttgttttgttttgttttgtttttgagacagagtctcactctgtggcccaggctggagtgcagtggcacaatcatggcttactgcagcctcacactccttggctcaagcgatccttctgcctcagcctcccaaagtgctgggattacaggcatgaaccaccacacttgactggatgaagttccacagcccacttttgagaagctggttttgctaactttgctccaggataccctttatgctgccacccatgcactgccttgctccatgtccactgctgtaagggagcgtttccacttattttgtgattcaacttttagccatctccaagctttgttaaaattagagattgaattttatttttcattcttcttggtgcttttggatgctttccatgaaacaccaatttttgctggcatcttcacactggaattttgacatgaagcctagagttaatcaatatctttgccctcctgctggacattaccatagtacctattcattctggtcactccttcttgaatcacatgctctctttgcctagcatgttagtgatacctcatttttataaccccaaactagtcaccattatattgttttgggatcaatgcctgtttagatttgcctttgtatttaatatttaccagtctctgctcctctttgcttctcacttcctgtgccttctcccagagaaacggagcttttggaattctttcagcagggaactgtgagtagtaatttatttaaatctgtgcttgcttgcctgatgatgtccttattttgctctcagtcttgaattttagtttagctgagaatagaattctagggtgtcagttatttttcctcagcactttgaagttgtctcattacttgtttctattgttgctatgaagaaatcagctggcagtttaatttacagttttacaaactttgtttgattttacattcatataagtaaaaccaactttgtgctcatcctctagaataagtattttacacctaaatttatctatgtattaatgtactaatatgtacataatacaacatatgtaaaataaaaaaaatgactacgtatatgaaaaagttttaaaatcaaaataaaaagcatttgcttttgctaaattgttattagttataattaataatattttaaagagttaaatgtagatattaatgcttcattgattttaaaatatcttgatttaacatttaatttgacactgctttaacataaagcaataggaagatctgggtttatgtttggcttattttgatgctggtttcagtggcaataattgccaataacaaaaagtttaattacctcacaaaggcgtgtgaatacaaataagaaaagcaatagctgcacttactaagtcatgatgcttattttttaaaatcccatttaccaactgtaccaacgtttttctttaaagtcagctattatatttctgtttccctttatgtcaatcaattcttgtgacaaacaatttggaatttgttgcatttttacatatttaaaaaatgtgttcaacccactaaaactctgaaacatttagaagcattatagacagattagaaaattctgtttctaaatttttttgtgttttttttttgcaaatatgaaaaaatgctcaacatcactaatgatcagggaaatataaatcaaaaccacattgtgatatcacctttctcctgcaagaatagctattaaaaaaaaaaagatgttggcgtggatgtagggaaaagggaacacttctacactgctggtgggaatgtaaactagtacaaccaatatggaaaacagtgtggagattccttaaagaattaaaagtagatctaccacttgaatcagcaatctcgctactgggtatctacccagaggaaaagaagtcattatttgtaaaagatatttgcacacacgtctacagcagcacaattcgcaactgcaaaaatatggaaccagcccaaatgcccatcaagcaacgaatggttaaagaagttatggtgaatactactcagccataaaaaggaacaaattaatggcattctcagcgacctggatggaactggagactatttttctaaatgaagtaacccaggaatggaaaaccaaacattgtacgctctcactcgtaagtgggagctaagctatgaggatgcaaaagcatatgaatgatacaatggattttggggacttggggaaaagggtgggagggggttgagggataaaataatacaaattgggtgtagtgtatactgcttaggtgatggatgcaccacaatctcacaaatcaccactaaatgacttactcatgtaaccaaacaccacctgttctttaaaaacctat

SEQ ID NO: 2232 - DNA, 296 bp, Homo sapiens
cctgaaggttggttttggatcagcttttgggtgaaggcccagatcataagaacctaagaatcttatttgacctggggtgaccatggaaacttagtcctagcttcaaattcagtcctaatctgggaagcatttaagagaatgattgagttgtgctgggtaaggatttcaggtatatttgagttgtaggccccaaaggagtgtgcccaaaactcccatggagtaaagagaagacagtattagaaaagtaagggggcatgagccaccactcctggcctaagctaactctttgaagtaag

SEQ ID NO: 2233 - DNA, 47525 bp, Homo sapiens
agctgcattttaatgacatttgtaaaagaaaaaatagtttctttatatagattcatatattcagcacttctaattttcttctttccttcttgcatatctgtgcttcaatctggtatcctacttcagtttgaagaaccattaataacaaattattatagcgtatttttactggtgacaaattttctcagtacgcatttattaaaaatgtttattttatcctcatttttgaagtatttccactgaccgtggaatactggcttgactttaaaaaactttcagtactttacagctgttgtttcaagatcttctggcatgtatttttttctttttttttggtttatgttttgttttgtttttgtttttgagacagagtctcaccctgtcacccaggctggggtgcagtggcatgatctcggctcactgcaacttttgctacccaggttcaagcgattttcatgcctcagcctccggagtagctggtgttacaggtgcacactactatatctgcttaatttttgtatttttagtagcgatgggatttcaccatgttggccaggctggtctggaacccccagcctcaggtgacctgccagcctcggcctcccaaaatgctgggattataggcatgagccaccatgcctggctggcctgtatttacttttctgatgaagagtccatcatctttcatcttttttcccttcatatgagggttttttttgatacattttaagattttctttttaccattatctttcagcactttgattataatatactcagtcaaggttttctatttacatggtttagggtttactaaatgtcttgaatctggagggtaatttttaaaacaaattttgaattttgaattttgttttttgcttctttttctctccctaccttttcttctctcctactttttctcctcctccgtctccttttcttcttcctctggattttcacaaatagttgaattttctgaggtaccagggctctgcttgttcttctcaatcattttcttttcattgtcttcagattggttaatttatattcacatgttttcaaattcattgaccctttattgtagtgtctaatctgctgttcagcccatctagtgaatttattcagggaaagtattttttattatagaattctcattagtcctatgttatagttttcttttctctcctgagatttcccaactcagcattgtgaatatattatttctacatttttctttaagtttatatctatatctctacatatatatctctatataaataataacatatccacctatatatctatatttatccacttttaaggtctttatctccttattccaacatctctatcatgttgggatttgtttatatcaactttttacttttgactatgggtcacatttttcctacatctttgcatgtctagtaatatttgactgtatgcttgacattatgaatggtatgttgtgggatggtatgtattgagtattttttttttctttgaggagtgtttagttttattctggcaagtggttaactactggtggcttgttttgattttgttagaatggatttatactttatttcaattttatccttagttctatggcatggccattattttaggtcacggtctttcctcctaggcatggtcattccagcatctcgaccgaatgcttttgttgctcagtgaagctttctcactctggctgcgttaggactttaacatctatgagcactgtttaatgtctccattcagatgagcactgaaggatttgtcactgctatagttgttctcttaagagtgtcacagaatactctcctgaacaaaagtagcccatcttttggccaagggcctgagggcaacctctgtgaagatttcttgcttcccctagtctgcgaagctttctctcctcagtacttggccacacaaattctagctaccttaccagcccgaaactctgatctgtgccttctcctctcagtaaaattgtcattctctatttggcctctgtctcccatgctgcccctggaaagtgaccccgggtagaaagctggagttaatacggggttaacttacattttccctttctctaaaatatgacagtcctgcaccatttgttatcaagtgcttgaaaataatgtgttaatagtttttgacccagttttataattgtttatggcagaaggataagtccaatactagttggactttgtcatggctagaagcagaagtgttgtttttatttaatattgcatacacaatctattcctagggttcctgacctaagtgactctctaaacctgacagttacatgcgttccagggagaggaagctaaaataaatggggataattttgctttttgtaaagagagagaaaaaggtattcgtatctttaaatatttgagtattttaaagtatttttaaaatttcattttaagtcttctacaaaaccttcattgaattatattctttttcttaaattagctctgaactctttggttatgtatcagaaattttcccctgtgtacctccaatctacctttttctgcttacctcctactttatctcacctgatgctctagttgtgttatactatttgttcttttaaaactataccctacctatgtaattttctctttgtctgaaacggccctcttcctttttttaaggcttagcaaacttgacatactacattctttgttacttatttctgcattactcatggttcttcagagaaccatggttcatggaactcatggttcttcaataggtgttgtatatcataatattatatctgtgtaatatataatgtaacatatgcaatatataatatgttatatatgtaatatatgtaattacattatatattatgtatacacacatataatctattatatatgtatgcacatatataggaaggaaaggaatatattatatatgtttgcacatacatatatacgtgtgtgtacaaatattatctatgcacatacatatatatacatacatatatatctgtacatatacacatatgtgtatggtctctgatacacctcacatcctgtggctcactcaagtggacacataaaattaaccatcccaatttccttttttctatatgtgtaattatatatacatatatatatacacactcacacatatacacatatataagtgtgagtgtatagatatatgtgtgtatatataatatacatatatagagagagacagagagagacagagggaggagatttattataagagattggctcacatgtttttggaggctgataagttccaaggtctgcagtctgcaaactagagacctaagaaagctgttgtgtagcttctgtccaagtctgaaggcctgaataccaggaatgctaatggtgtaagttccagtcagaaagctggcaggctcaagacccaagaaacgctgatatttcagtttgagtctgaaggctgaaaaagaccaatgtcccagctcatagcagttagacagaaggagttccctcttgctcagcctttttgtctattcaggtcttcaattgatggataaggcccacccacactatgaaaagcaatctgttttactctatctactgattcaaatgtgagtctcatctagaaacaccctatagtcatacccagaataatgtttggccaaatttctgggcattctgtggctcactcaagtagacacataaaattaacattccaaatttccttttttctattttcaaatgtgattttatcctccttttcatttgttcctatatctgacactttatacactttaccatgaataatcattattctgtcatgaataataaatgtctatttttcattttgagccccttttctacttagcacaattccaggagcttggacattattgcttcttcttctttacttccacacacaatcaattactaagttacattaattattagaatctgttcttttatttttatcatgactgcatttgccatcgtttagggttttacaatttgttgtcaggtcatattggttttctctgtctccatactagtaccagagtaatcctcctgaatcacatatatagcctactaggagttaaaatctttcaacagctttgatagcatttttaaaaatccagatttcttagcctgagcaacagttagtgtaattagcttgcctggtatggtttaggaagcataaactattacatccactttaatgcctattaagaaatgtggcagtggtttataatagagaagtgatgtagagatctatgaaagactttttttgatggaagaaacacaagtgaagtattttttcaggttataagagacagggttatattgcaatgaattattcccacaggaacaactgtagattagttatggaatcagctttcctttccattttttaggttaatattgccaggttttttttaatgctgtgtgttgttattggtgagatgaataaaaatatcagtaaatgtgttagaagggatataacactacaactgggtaaatacatgattgtctttgagtctatctgctctgaaacacaatggtggcattattagagaatagctatcactggaattaataataatgttcagaatctggctaatacataccttgattaattagttaaccccatcttagacacggtagatgagccattgtagtgtcactgaaaatacaggtgatagccacacagttgataagaatcaatctagcaaaatcctctggaaaagggatttagaagtgaaaaggcttgaagtctgctccaagttgagtaattatgttgtgagtttttctgagtgattcatttccctatgcctcagttttttccatttgtacaatgaaggcattgaactgtgtaatgtctgaaatttatatcaattctaatattgaatttgaaatttaagaaatatttctgattcgtgttttatatttttaaacatgtgtatcaatgcttcgggaattaaggactttaagttgcttaatgttatctattgtcaccaattcaactggtaacagctctaaagtctctctatgtactagacagcaaacacccttcttctctccctcagcataccctgacacttaaaaaacaggaaatgtgtatttttggatgttattcaaatttacttagaagtatttactcacttagaagcaatttactcattttgaagtatgctaagaaaggcattttcaaatcctgtagtagttggaaagttttttaaatcttggtttcattttttgacttcatttctggttctagtcatctacattctgaatgtacagaggcctccagtaaattttctagctaatacttgggaagcatttgtaagggaacagagtattatctcccagcacatgttgaagaaaatgataacagaagctatagaaaaaacagtgacagaagctatagagaagaaaatgataatttttatcgcagtgactgaaaggcaaccctggccagtgctgtgatgaggaataatactagtttcattggttaagttctagcattatatacctagagcaggtatttttaagaacaggttggagaacgcttcctgttggttttggattcagttgtgaattcagcaaactgtttagaatccagtatcatttctatgtggccaattttactgcaacataagctataatttgtatacatattgagatttgtccacaacaatataccattgtaaagataataacctgttataaattataataatcatttattagagacaaccttcctgaaataacttggtatcattgaggtgatgaaagagagacattgggggagtttattgcagaagcagagactctataaagaaaatggtgaacttgagggagttgagaactatgtatagtttgattgtggattattctattgtgatcaaactgaaaaagactaattcatagagactacttataaaaaacatttaattaatgagtcagatgctgatggatacatttacactgggagagagacgtcacctgctctactaccaatggaaattgccactctgttttctataaaggattccatacatggcttataaaaagccaaagagtcatcacaaggtttcttttgatatgtgaaattagtacagatagagttgggtaggtctaaggaacatttgtggaggctcagctagaatctggtttgtcttgccccactattgtttttttgagaccgggtctcactctgttgcccaggctggagtgcagtggtgcaatctcagctcactgcagcctcaacctcctgggctcaagcgatcctcccactgcagcctccgaagtagctaggactacaggtgtgtgccaccatgccaggctaatttttgtattttttagtagagatggggttttgctgtgttgcacaggctggtctcaaactattgggctcaagggctctgcccacctcagcctcccaaagtgtggagaattataggcataagccaccccacccagcccaccctactattttgtaaatagtcattggttattagggtactgagttagggttcactcatttgtcaataaaagtctattgagtagagactatgtgtcagaaatagttctggtctctagaaatacattggtgaatcagataaagttcctgccctcataaagcttacattctatcaggaaggaataagcattgaaccagggaactacaattaaacccttattctccagttgtggttttggtgtattctttatctgtcgaaatatccttttttttttttttttgaaaagtagcaatttctcatgacaaacatgttacagattctaaaatttgctgcgcattttaaatttctccttaatttatgaattatatatatataattgatttttccatagatgatcttaaaaagctgggatcactgtggtttgcacctaaagtattagtgatgataggtttaatttgtttagtgcctattgtaagccctgtagtgcggtagtcactatatgtataatatctcatagacttcttacaatactctataatgaggcattcttatctatatttagaggaaacaactgagactcagagaggtcatgtaaattgtctaagatgacacagctaataaatgacagaaccaggatttgaatcaaagttgtccagactcaaaagttatgttcttttccaccacaccactctgtccctcatttactaggtctttcctaaggcaataattacagctagctaattacatttcattctgaaatgaagttatgacttcttccttagtttatttgggtggaatccattcagagcatagagatccttatgcctttaatcagtcagattggactacttttcttttcaaaatctctgagatctaatttgtcttagagagtgtagccaagtggttcaacgtcctttgcccacagctcaaatgtcctctgaaagtaaaaagaagctcactatgagtagagacaggtaattccaactgtggatggatttgagaaagagaatattttttaatattgagttgagaattgtctccttaaagtaccagcatctaccacgctgaagaattacaatattttatccataaaagaaccctctggatattatgtggacaattttgttttcttctggaagctactttttctagcacctacagtttcattctcttcaccatgtgtcactcgcctcgggataggggccagctgagacaagctatagctatgggacgtaattcacagctttgctagaaggtaaacatttcacaaaagctatgcacatacttgtgaagggttttctgtgggagagaaagatcagtggttgtggaggaaagctttttcagaggtcgttgaaacatgactattcacagctgaagactgttatttgtgatgctcactgtcctttgtgataacatttatcatgtggatgcacatggtaaatgcctcctggaattcagtgccagggaaaatatgttggtaatgataaattggtacaattgtcttgataattaaggcttatacacaagtagttttgggggccagagtgcaagtgttcggttggtacctacataaaggaatatcctgtagtatttgattccccaggcagttgtagttggcacagaaatcccctataatgctatgctagagagtgctgcttctcataggtgtttctgatcattgtggggctcgcttcccttggacatggctcagttgatcttgcgtgagtctttgtaccagcttactgattattcaagttctccttaagctatctcacctgacttctcctccatctcctcttccaggaagaggaaaagtcaaagtccagacaaagtagttgcggcgattgccctgaaataggtgtctgctcttagacagacctgttgacttacagactgaatggaaatacaaaggtctgctatactcacgactgtaccctgattctgtgcccaagcttatacaacttgtgtgggctagacctggaatgagagtctaaaaagtctagctctagaatcagctctcttaaaacctacagtatagtgcttcactaataatactttaaaataataaaatgaatgtgaaatccagaccctacttctataaaaaaaaattgtaaaatttaaagtgttgtagagagaaatctatatgttttgttatgtgttaaatagctcttttggataactttaatactgagataaaataaatttacagtaaaattctcagaaggatgagataatttacatgagttcactgtccagatatcgaaacttactccttctaaaaattaaaatatcagagaggaaggcagcgcaagatggccaaatagaagccttcactgattgtcctcccagcaagaataacaaattgaacaactatccacacaaaaaagcaccttcataagaaccaaaaatcagatgagcaatcacagtacccagttttaacttcatattgcttaaagaggcactgaagagggtggaaaagagagccttgaattgccaacagtacccatccccctccccccagcagcagttctgtggcgtggagaaaaaaaaatctgtgtgcttggaagagggagagcacagtgattgtgggactttgcattggaactcagtgctgtcctgtcacagcagacagcaacaccaggcagaactcagccaaagctaatggagggagcaatgagaccagccctagcaaaggggaattgctcagaaccagtgaacttggggggcatgtgacctagtgagacatcagcttgaacagcaaagagagtgcttgcactatccgttccccagccccaggcagtgtagcttgcagctctgggagatacttcttccctccaccttaggagaggatagggaagagtaaagaggactttacttgccacttggataccagtttagccacagaaagacagggcactaggcagagtcctgagggccccatcccagaccttaattccaggatgacatttctagacacaccctgggccaaaagggaatccactgccttgaaggggagaacccagtcctggcaggattcatcatctgctgacaaaagagcccttgggccttgaactttcagcagtggtagctgggcagtactcgctgtgggccttgggtgagactcaaagacatgctggcttcaggtgagacccagtacattcccagctgtgatggctatagggagagactccgtctgcttgagaaaaggggagggaagagtaaagggagcttcgttccttagcttaggtaccagctcggccacaatggggtagagcaccaagcagactcttggagtcctcattttgggccttggttcttgaatggcatttctggacctagccctgaaccagaggggatcccattgtcctgaagagagtgtcccaggcttggcagcattcaccaacatgctgactgaagtgcccttgggctttgagtgaacatcagtggtagccaggcagtactcgccatgggtctggggcaagggtggccacaggcagaaactctgtgcttacagaaaagggagggaagagtgtgaaggacttagtcttgtggcttgggtgccagctcagccacagtagaatagagcaacaggtagattcctaaggtttctgacttaagggactggcttctgaaaaacatcgctagacgtgactggtgctggaggaaactcaccattctgaatggaaggacaaaagccagagtggctttgtcacctgatgattgtagagccctagggatttgggtgagcataggtgatagtcaggcagtggtaaccacagcccttgggtgagaccccagtaccatactagtttcaggtctgacccagcacagtcctaatagtggtgacaacaggagtatttgtgtcacctctcttctagcctagttagctcagcacagagctgagctgtttgggagaacgtaaggaaagagaacatgagtcttttcctggtaatccagacaattcttccagatctgatccaagaccaccaagaagtatctctataagtctgcaagaaccatattgttactgggcttggggtgctccctaatacagatggggctgcagtgaccagaaacttagagcacaacacccaagtgcctttgaatgcttggaaagccttccaaagaaggacaggtggaaaaaaaaaagactgtgaagactacaataaatacccaactcttcaatgcccagacactgacaaacatccacaagcatcaagattatccaggaaaatatgacctcaccaaatgaactaaataagggagcagcaattaatcctagagagacagagatatgtgatctttcattcagagaattcaaaatagctgttttgaggactcgcaatgaaattcaagataacacagagaaggatttcagaatgccatcagataaatttaacaaaggaattcaaataattaaaaaagaattatgcagaaattctggagctgaaaactgcaattgaaatactgaagaatgcatcagagtctcttatcagcagaataaatcaggtggaagagataattagtgggcttgaaggcaggctatttggaaatagccaggggagacagaaaaaaagaagaagaaaaaagaatgggccaggcatggtggctcacacctgtaatcccagcactttgggaggccaaggtaggcggatcattcaagatcaggagttcaagaccagcctggccaacatggtgaaaccccgtctccactaaaaatacaaaaaaaaaaaaaaaatgccaggcatggtgatgtgcacctatagtcccagctgcttgggaggctgaggcccccaacgtcaaagataaagaaaggatcctaaaagtggcaagagaaaagaaatgaataacgtacaatggagcttcaatatatctggtagcagtcttctcagtggaaacctaacagatcaggagaaagtggcatgacatatttaacgtgctgaaggagaaaaacttgtatcctaaaatagtagatccagtgaaattctccttcaagcatgaaggagaaataaagatttttcccagacaaataaaactaaggggttttattaacatcagacatgtcctccaagaaatgtaagggagttcttcagtctgaaagaaaagtttgtaagtgagcaaaaaaaatcatctgaaggtgcaaaactcactggtaatagtaagtatacagaaaaacacactatattttgacaccataattttgatgtgtaaactactcacatcttaagtagaaagactaaagatgaaccaatcaaaaataaactacaacaacttttcaagatacagatagtgtaataagatataaatagaaatagcaaaaagttaaaaagtgggggacacaattaaaatataaacttttaattagttttctctttgtttatgcaataggtgttaatttgtcattaatttaaaataatgggttataagatattatttgcatgttttatggtaacttcaatcagaaaatatacaacaaacacaataaaaatcaagaacttgaaacgttaaaacatatcgtcagagaaaatcacccttgctaaaaggaagacagacaaaaggaaagaaggaagagaagaccacaaacaaccagaaaacaagtaacaaaatggcaggggtaagtccttgcttatcaataacaacttgaatgtaaatggactaaactcttcaatcaaagcacatagagtagctaaatggatttaaaaaaaacaagacccaatgataagttgcacttttccataaagacacacataaactgaaaataaagggatggaaaaatatattgcatgcatgtagaaaccaaaaagagcagcaatagctatacttacatcagacaaagtagatttcaagacaaaaactatacaaagaatcaaagaaggtcattacataatgataaagaaatcaattcagcaaaatgatgtaacaactataaatatatatgtacccaatactggagcacccagatatataaaggaaatattattagagctaaagagaaagatagactccaacataatcacaggtggagacttcaacaccccactttcatcatcgacacatcatcctcacggaaaattagcaaggaaacatctggcttaatctgcacaatacaccaaatgaacctaatgtatatttacagaacattttatccaataactgcagaatacatattctcctcagtacatggatcattctcaaggatataccttatgtcaggtcacaaaacaagtcttaaaacattaaaaaaattggaagttatatcacgtatcttctgtgaccacagtggaataaaactagaaatcattaacaagaggaactttgaaaactatacaaccatgaggaaattagacagtatgttccttaatgaccaatgggccaaagaagaaatgaaaaaggaaattgaaaaaaatcttgaaacaaatgataatggagacacgacacactgaaaccaataggatatggctaaagcggtactaagagaaaagcttatagctataattacctacgtcaaaaattagagaaacttcaaataaactacctaattatgcttcttaaagaaatagaaaagcaagaataaaacaaacccgaaattagtagagaaaaaataataaagtttagagtagaaataagtgaatgtgaaattaagaaacaatacaaaaatcagtgaaagaaaatattggtttttagaaaagataaataaaattgagaaaactttggccagactaagaaagaaaagagagaaggaccccaaaaaaatcagaggtgaaaatgaagacttcacaactgatactgcagaaatccaaaggatcattagaggctactgtaaacaactctatgccaacaaattggaaattctagaagaaatgcatacattcctagatgcatataacccaccaagattgaaacatgaaaaaaaatccaaaactggaacagacaaatgacaaataagcagatcaaagcagtagtaagtcacccagcaacgaaaagcctggaacctgatggcttcaatggtgaattttaccaaacatttaaagaagaactaatatcaaccctactaaaactattcagaaaaatagggcaaaagggaatacttccaaacttatcatatgaggccagtattaccctgataccaaaaccagacaaagacacctcaaaaagaaaagaaaactataggccaatatccctgttgaacattgatgcaaaaaccatcaacaaaatactagcaaactgaattggattcaataactcattaaaaagatcattcatcatgaccaagttggatttattccagaaatacaaggatggttcagcatacacaaatcaatcaatgtgatgcattatatcaacagaacaaaatacaaaaaacacatgatcatttcaattgatgctgaaaaattatttgataaaattcaacatcatttcatgacaaaaaccctaaaaaaaatctgggtatagaagaaacatacatcaacacaataaaacccatatatgacagacccacagctagtatcatagtgaatggggaaaaatggagagcattgtttctaaaatctggaacatgacatggatgctcactttcaccattgttattcaacataatagtggaagtcctagctagggcaatcagacaagagaaagaaataaaaagcatccacgctggaaaggatgaagtcaaattatcctcgtttgcagatgatatttttgttatttggaaaaacctaaaggctgcacccaaaattattcaaattgatcaacaaattcaataaagttgcaggatacaaaattaacatacataaatcagtaacatttctatatgccaacagcaaataacctgaaaaagaaatcaagaaagcaatcccgtttgcaataactacaaataaaataaaatatctaggaattaatttaacaaaataagtgaaagatttctacaatgaaaactataaaacattgatgcaagaaattaaagagcacaacaaagaaatgaaaagatattccatgttcatggattggaagaatcaatattgttaaaatattcatactgaccaaagcaatgtacagactccatgcaagtccttcaaaataccaatgacattctattcttcacagaaatagaaaaaaaattttgaaaatttatatagaactgcaaaagacccaggaaaaagctagaattatccagctaaagctatcatgtgcaaaaagaacaaaactagaggaatctcattacttgacttcaaattgtactacagagctatagtaccaaaatagcatggtactggcataaaaccagacaaatagaccaatggaacagaatgaagaactcagaagtaaatccatatgtctacagttaacttattgcataaacaaagatgccaaggacatacattggggaaaagacaatatcttcaataagtggagctaagaaaactggatatctgtacgcagcggaatggaactagaccccctatctctagctaaccatatacaaaaacaaaaacaaaacaaaagaaaaaaaacggattaaaggcctggtgcggtggctcatgcctgtaatcccagcgctttgggaggccgaggcgggcggatcacctgaggtcaggagtttgagaccagtctggccaaaatggtgaaaccccatctttactaaaaatacaaaaaattagccgggcacagtggcacacatctgtaatctcaggtgctcaggaggctgaggcaggagaatcacttgaacctgggagtaggaggttgcagtgagccgagatcgcaccattgcactccagcctggggagcaagagtgaaactccatctcaaaaaaaaaaaaaggttaaaggcttaaatctaagaccttacactatgaaactaataaaagaaaactttgggaaaacactccacaacactattcttggcaaaaatttcttgagtaataccccacaaacacaggcaaccagaccaaaagtggacaaatgggatcacatcaagttaaaaaccttctgcaaagtgaaggatacaatcaacaaagtgaagagacaacccacagaatgggggaaaatatttgcaaactatccatctgacaaggaatcaataaccagaatatatgagaagctcaaacaactcaatagggaaaaaatccattaatctgaataaaaaatacatgaatatctgaatagacatttctcaaaagaagacatgcgaagtggtatataacaatatgctcagcatcactgattatcagagaaatgctaacaaaaactaacaatatgtcacctcaccccagttaaaatgatttttatccaaaagacaggaaatcacaaacactggccagcatgtggagaaaagggaatccttgtacactcttggtgggaatgtaaattagtacaaccactatggaaaatcgtttggaggttcttcaaaaaactaaaaatagggctaccatatgatcccacaatcccattactaggtatatacccaaaagaaaagaaatcagtgtatcaaagagatttctacaccctcatgttatagtaacactattcccaatagccaagattttgaggcaactgaaatgtccaccaacagacaaatggatgaagagaatgtagtacatatacacaatggtgtactattcacccataaaaaaagaatgagatcctgtcatttataacagcatgaataggactggaggtcattctgttaagtaaaataagccaggcacagaaagataaacttcacatgttctcactgatttgtgagagctaaaaattaaaacaattgaactcagggggatagacagtagaatgatggttaccagaggctaggaagtgtagtggcggggaatgaggatagttaatgagtacaaaaatgtagttggaaagaatgaataagatctagtattcgatagcagaatggggagactaaagttaacaataatttactatatatttaaaattaactaaaactataattggattacttgtaacaaaaagaaaggataaatgcctgaggtgatgaataccccatttaccctgatgtgattattatgcattatatgcctgtatcaaaatatcttatgtaccccataaatacacccagtatgtacccacaaaaactaaaagttaaaaaaatcaaaatatcaaaagcaaaaatcttattttatatatatatttttaaatgtcttagaaaattctcaacatattttacaatttttgttaatgtctcaggatcattattattaattttaatagttgtattgccctgtaaaatacactttcggagacttgttgacaacttgataggctttctggtgttatttgtcttcacacatgatggcaccatgtattgtgactttggagggcatgatatttgttggtttgttgtttgcttacttttttgctataaaatagttatttctcaccatatgttttaaaatctgtctatttcaacttttgcttcttgataagaggttagcagtccttttctgctaagagccagatagtaaatattttaggctttatggaccatatagcctttgtcacaatcactcgactcaggttgtagcctgaaacagtcatagacaacacagaaacaaatggctttggctgtgttccaatggaactttattttcaaaaacaggcagtttgctggatttggtgtgtgggttgtagttctagaccgttgagcgtggtgaaatagccgtgtagagtaatatgtaaaaaagtaaatagaatttttaaaaatgtaagtacatattgtattaggacataatgttaccctacaagctatgtaaaatttagtgctacaattttatgacagcatttgtgggtggttagatgtctttcttttgtcccttctttgcatcttctttcaggtttgtatctatgtggcagatatttggggttattgaatgaatgagctctagaacacttgcttcatatgaaaacgtgcatatgtatgtttatgtatctcagatacagctaaattcattgtaccaattaagacctagctaagattggtttgagctccattctatgaattttagagttcagtagtgcccaccccaaccaccagcaagttgtatgcaaattttcagtgtgagtttatattttcaaggtctcctctggctctgaattctgcttctgtcaaattatttcattttagagattgtacagctatccttgttctctgaaaaagtctcttggccatttctatacctcagactgcagcctcctaccatggtttttggttttccttagtcccttccagatggctcacaggagctccaaattcttctcacattgttctgcagattaattccatttcctccagtcttactcccaaatttctctctgactcctctgtgcatgttttgatctaccaagatgctttgctgaagaaagaagacctattctcccttaattgaactgtcttcctaagaagggagttttaattttaagtagaattttttccctatggatatatggatgaaagactaggtggatggatggctaaaaagatgttatacagtactgtatattaggatagctacttcatatggaggctagtaccaaatatgaaaaacctatttttagcttattatagttgattttgtgatctagatattattcagcattgttcttcaaatcccctgccatagccaaaacacaccttatatactatttcaggaagaatttttttcatttcttatttgtttcattttataacatatcctaataatgattttattacaaaaggagtcaggaataccacttcatatgatagtctactaaatcttaaaaatagaatataagatcataaattgtgtaaggtaaaagttagacttaaaatcaaagtatccactgaaacttacaatagtaaggtggtatttctatttggaggaatgtctccaaatctccaatattagaaaaatagttatcttattattattaaatagttctaaaatcggtaattttaaaatgattttattcaaaattagtattattcagtcatatatgaattatcagccactcttaattgtctacaaagagcactgcaaagaacatcaaataaacagatacatttttaatagactaaagagcatggtggttcatgcctgtaatcccagcactttgggaggccaaggcagggagatctcttgaggtcaggagttcggtaccagtccggccaacatcacaaaaccccatcttttctaaaaatacaaaaattaggtgtggtggcatgcacctatagtcccatctacttgggaggctgagacacgagaatctcttgaacccaggaggcggaggttgcagtgaggcaagatcataccactgtactccatcctgggcaacagagtgagactccatctaaaaaataaaaataaaaataaagagcttacatctggttttgtttctggaagtgatagaaatatgattaaatgattagaaaaaatcagaagtttaaaatataagttaattttttaaaaactcacatttcctgagcactacagtaacctaaaaccagcttctttgaagtttactcagtgtgttgaactgtaatggaaagctagcagctatactgcttatacttttttcttagaatcactagaaaatatttgaccataaaaaatagattctgagtaaaattactttttttaaacaaccaaacctgatccttttgtagttcgtaagcatgatgattgggtgttcacgtgtatgtgtgagatgtgccacccttgaaccttgtcaagacatcggcacattacccatctgatatgaaaaaaaaaaaaaccctgtcatcttataaaaattcacatttataaagaggaatagagataggacactgaatgctttgggtttgttttgtcgacatttatgttttcaagcaggcttgcttcatccaatttttatattcttttgaggaaaaatacactgccaggaatcacagtatgcaatgcaaattagacacagaactattccctatggactttctagcctatggagagagatatgcatgcagacaacagagaaaaatggggtcgcttctgatgtttggactggcccacgataaactttaataaactagaagagacatagaggacagttttggctaaggaaagaaaatgaacagaggctcaaaagttcaaaagtctatgtccaagtaaagcaagtgcaggcttacattttactgtctttaatttctaaattcaagaagctctgaagaccactgtgtgtgttgttgtttttccttaagctacagactgacctgaattgacaggaggctatttatagtctttatttgtcctacttatgagaatatttatagattttactgcagaaatatcaatgtatttcattataggtgcaggccccaacatacatggattttgctaatattttatacattaactgtattactttaaaaaaataccaccttgttccccaaaaacctgaattacaaaactcactcggccccagctgtttctggtaaaggattgtagacttgaagtaattatgggggaagtgatattatagaaactatgtccagaaagctaggtgaagattgtgccagttcttgaacataccaagttacagattttggtaatttgactatagattgtaaggaaccattatacacttttgaagaagaagtgaagtattcaaccagtttttatcaaaattggttgaatccctgagcacacgctattttaaattttttctccatgcaattacaaaaactctgagtaagatggtgtcagatgaaatgccttttgaaaatagatatttacatccatcatttgttttcttgtgatggtgtgtaggagaaataaggttagagaaaacaattctagatcatgtctgcagcttgctaagtgtcatgccacataaatatggtcagagtttgatgtccccaaatgactatgcattaaaaatacaagaattgtctcatagaagaaaaaaataaacaagcaaaaaaccataagaaatagtgatttatttcatatttgttcatgtttcttgctaaaaatacctgaaggcaaattccagaaaatttgtttctgatttggttaagaaaattgagaaattaaaaatgttattgtcattgttgtgtgtacagtgtatgtgtgtcactcatagtgagtctttaaactctgcctttaagaacaagcatcaaaagtttggtacaaaatcaatgttcacaaatcagtagcactgctatacaccaacaacgacaaagttgagaatcaaatcaagaactcaattgcttttaaaacagctacaaaaaataaaaaaaatacttagtaatatacttaagtaggtgaaagatctctacaaggagaactacaaaacaatgctgaaagaaatcatagatgacacaaagaaatggaaagacaacccatgctcataaatgggaagaatcaatatagtgaaaatgactatactgctcaaagcaatctacagattcagttcaatccccatcgaaaggtcatcagcattcttcacagagctagaaaaaaaaatcctaaaattcatatggaaccaaaaaagagcccacacagccaaagcaatactaagcaaaaacaacaaatctggaggcatcaccttgcccaacttcaaattatactacaagactatagttaccaaaacagcatggtactagtataaaaaataggcatgtagaccaatggaacagaatagaaaacccagaaataaagccaaacacttatagctaattgatcttcaacaaagcatacaaatacataaattggggaaaggacaccctattaaataaatgttgctgggaaaactagcaagctacatgtagaagaatgaaactggattttagtatatgctaatccagaatgtaggtctaatgctgagtgtctaggaagaccatggactaaaaacaactaacaaacaagaaagcactatccaaataagctgccatcagattaacacctcctaagcaaaagctacttatattcctcaactcaaggtgtcagtgacagcatcaagcgtgtggtagaaaattaaaggagggggttgatttcccaaattttatcttcacataacttcctttcaaaatataacaacccaaaatgttgttaataactttaagttttaaatttcacctttaagaaaagtattttcatttgctttaaaataattatacgttttaaaaatagggacgaccagtgggtgtttcataataggttctgaccggagaaaaagaaaaaaaaatacccaaacctcttttttcggaatgtactagtccttttgaagaagatcttctgtaaatggggagtccactaagtgctaatctctatgttaagcatttccttttctttctttcttttttctttttgccacaacaaacctcaaggcagactattagctttgttttgcaaatggggaaaatgaaattaaagttaagaaatgtgtccattaacacacagctgggacttgaactcagcaatgtgtagctctcaagtgtttcttgtgatgtcatctaagactttgacaaccaaactgatcataatctctacaatgtggagtggacaactgaaatgaaaacaggaaagaaaaaaaatcaccactctaataacgtgtgtagctgtaaactatcttgctgtccaatatttttcttatagttttaaaacattaaactgcagggctgggtgtggtgtctcatgcctgtaatcccagcactttgagaggccgaggtgggtgcatcacctgaggtcagttcgagaccagcctggccaacatggtgaaaagctatctctactaaaaatacaaaaattagctgggcatggtggcatatgcctgtaatcccagctacgtgggaggctgaggcaggagaattgctcaaacccggtaggtgaaggttgcagtgagctgagattgctccattgcatgccagcctgggtgacagaacaagactctatctaaaaaaaaaaattaaaatgcaattcagataccataaaatttacccttttaatgtgtacagttcagtggttcttagtatatgtataagtctatgcacccatcaccactctaattcctgaacactttcatcacctcagaaaaaaactccatgcccattagtattcacttcttatagaattttgatgaagcaaaatccttcaaaagctttctactaaaagtccaattttcttagatttctccttcaaacaaagacaattcttaaatattttatagatacagaagagaaattattaaaataatctcaaataacaaatgagcaatattgctgttgttgaataaatcttcaaggatgaaaggatgaaaaggattattactggtagagtttcccaaaagtcataaatgtcaataagcttctccaccatatcattaccacaatttttaaggacctacgatctggcaggcaccatattaagatattctatctcaatttattctgacaacaattctaaggaagtatgaatactcactctattgtacacatgaaaaccactgaaagaaggagcagtcgtctcatccagtaaatgtaagggttgagaggtaatcctaggtccagtttgatttcaaagctcaacctctaaacactaagctccaccaagtgagagaaagtggatcaaaagagaatgtagatgtcaaattaaaaaaaaaaacaggatggagagagaaggatgaacagaagtgggttaagggtacaaacatacaatccaataagaggaataaatgtaatggttggtagcagaataggatgaccatgcttgacaaaactgtattatcctcaggtgatggacattttagataccttcccttaattgctacccattagatatgtgtaacaacatttctcatgcacctcactgatatggtttggctgtgaccccacccaaatctcatcttgaattcccatatgttgtgggagggaccccatgggaagtagttgaatcatgagggtgggtctttcctgtgctgttcttgagatagtgaataaatctcacaagatctgatgatataagggggagtttccctgcacaagctctcttcccttgtctgccaccatgtgagatgtgcctttcaccttctgccttgattgtgatgccccccgagccaggtggaaccataagtccattaaacctctttcttttgtaaattgcccagtctccagtatgtctttatcagcagcataaaaatggactaatacagtaaattgataccagtagagtggggtgctgctgaaaagataccctaaaatgtggaagcaactttggaactgggtaacaggcagagattggaacagtttggagggctcagaagaagacaggaaaatgtgggacagtttggaactccctagagacttgtcaaatggctttgaccaaaatgctgataatgatatggacaatgaaatccaggctgaggtggtctcagatggagatgaggaaattgtgagaaactggagcaaaggtctcttgttatgtgttagcaaagagactggtggcattttgcctctgccctagagatttgtggaactttgaactttagagagatgatttagggtatctagcagaagaaatttctaagcagcaaagcattcaagatgtgacttgggtgccatcaaaggcattcagttttataagtgaaagagagcgtaaaagttgggaaaatttgcagcctgacaatgcgatagaaaagaaaatcccattttctgaggagaaattccagctgactgcatacatttgcataagtaatgagtagctgaatactgttccccaagacaatgaaaaaatgtctccagggaatgtcagaggtcttcatggcaccccttcccatctcaggcctagaggactaggaggaaaacgtggttttgtgagtggggcccagggtccccatgctatgtgcagcctaggaacttggtgccctgtgtcccagctgctccagctgtgtctgaaaggggccaatgtacagctctggccatgacttcagagggtgcaagactcaagccttggtagttccaatgtggagttcagcctgccagtgcacagaagtcaagatttggggtttgggaacctccacctagatttcagaggatgtaaggaaacgcctagatgttcaggcagacttttgctgcaggggcagggctctcatagagaacctctgctagggcagtgtggaagggaaatgtggggttggagcccccacacagggtccctactggggcactgtctagtagagctgagagggccaccatcctccagaccctagaatggtagatccactgacaggttgtaccgtgtacctagaaaagctgcagacacacaacaccagcccatgaaagcaactgagagagaggctctaccctgcaaagccacagttgccgagctgcccaagagcatggggacccacctcttgcatcagtgtgacctggacctgagacatggagtcaaaggagatcattttggagctttgagatttgactaccccactggatttcggacttacatggggcctgcacccctttgttttggccaatttcttccaatgcttgaaccctcattgtatcttggaagtaacaaacttggttttattttacaggctcataggcaaaagggacttgtctcagatgagactttggactgtggacttttgagttaatgctgaaatgagttatgactttggaggactattgggaaggcttgattggctttgatatgtgaggatatgagatttgggaggggccaggtgtggaatgatatggtttggctgtgtccccacccaaatctcatcttgaattcccacatgttgtgggagggacccagtgggaggtagttgaataatgggggtgggtctttctcctgcgctattctcctgatagtgaataagtctcaccagatctgatgattatataagggggagtttccctgcataagctgtcttctcttgtctgccgccatgtgagacatgcctttcaccttccaccatgattgtaaggcctccccagccacgtggaactataagtcattaaacctctttcttttttaaattgctcagtctctggtatatctttatcagcagcatgaaaatggactaatacacccataaatatgtacaaataaaaaaataaaaatgaaaataacagttcagtctaaatggattatttacataagcccaggatgctgaagatggttatctagtgctggctcctagaagcattattgcagtgattttcatatctacatattgaatgcttacaatgtgcacttgcataagaccatagaaaacagatctttctgatccttccatttttcattatttgttaattaacctataaaactagaaatggaaacaatggcaaaatctggaagtatacaacctttcagactaatactatgaacctcttctcccaggtctttgtctgttggtcttccaggatctttatcctaaactagtcatcatcttagtttattttctgttgttataacagaatatcacagactgtaatttataaagaaaaatacatttaatttttgcagtcctggaggcagggaaggctgctagcatctggtgagggcctttttgctgtgtcatatcatagcagaaggcaagtgtgtgctagctcaggtctctcttcctcttcttataaagccaccagtcccattgtgagggccccactctgatgatgttatctaatcctaattacctcccaaaggccccacctccaaattttatcaatatatgtttggggattgagtttctaacacatgaaattttgaggacacattcaagtcagcatcaatttaagggttccaaaggctccttttctcctggcttgcatttcttttggattttttcaagacttcctttatttttatcatacttgaaaccatgtggtaggtgtgtcattgatttttaggaaagacagaaggcatgacgcatactgcttttgttgtaactgaaatgtaaggttataataaatttgattaaggctttatcttcagtcgaaccatatggttaactctaaagaaacagaatcatataactattctgcaactcgggtaaagttttcaattcaattcagcagatatttattgaccatttcctatgttttgagtagcatctgtatattgcgaaaggcagaaatagtaatatttcatgatgaatgacttttaagacttaccatgaaagggaacaaaagtgactgtgtttgtgtctgtgtgcatgtgtgtgtgtgtgtatgcgtgtgtgtgtttataagcttgaggtgaggaactgtatataaagcatgtgcccaactaattgtgacacaaactatgatgtgataagtgcctcagcatttcctgattcctctggctaaatcaacacttctaccacctctttagacaccataaaatcatgtacttctccacttttgcagccgttacagttgtaataatatattagtttgcatgactatttggctaaattttcaagaagtactttggctttttggaaatcagagactattgtgtgaaagttctgtgctaagaaatatgcgcaggtaagctccaaagaagggcacctaatccagccagggaaggtttattgacagaggtgataatgaatccaatttttgaagggttggtgtgaactcactggaagaagaaagaaagcaggatagtctaagcaagtgaactatcatgtgcaaaaacatgtagacatgaacatggaagtgtgactcaggccaggcgcggtggctcatggctgtaatcccagcactttgggaggccaaagcaggcatatcacgaagtcaggaaatcaagaccatcctggccaacatggtgaaacccatctctactaaaaacgcaaaaattcgctgggcgtggtggcgcacacctgtagtcccagctactcaggaggctgaggcaggagcatcacttgaacctggaaggcggaggttgcagtgagccaagacggtgccactgcactccagcctggcgacagagtgagactccgactcaaaaaaaatagaaaagaaaaaaacggtgagactcaaggacatggatggagttaagttcatgtacggagataaaagaagacaagcaaatcatcgtaggttttatgtaccaaacttacactgtcgacttaatcttcaatacaatgaaaagtttctgaagagccacattctttagggacttaagttttggggtgattattttggcagtatggaggctaaattgaaggcagttggaatatttttgtaaatatgttgtagtaattaggcaagatgtgatcagggcctgaaggaaggcaagaataaagtgatggatgttagagatgttaaacaaatagtatctgtaatactctctgattggagataagttagcaagaacagtctaggatggctcacaaggctttgaatttggaaactggatagttagatgtagttgctcattaaaatatggagctcaagaagtttacagagaaagatacgtgtccagttgtagttattattattatttttttgaaatacctgtggatcctttagcagaggtttccagggaaacttggaaatggatgattaaatctatgtaggtatcttgtcagcagacacagatccaggagttatcaatagcgtaggaattttaatgtgtaagaagatgcctagtaacagtaaaaatggagaagagattgaagcttggtaaatagtaacacttagaggatggcagaaagagaactatgatgttaatagagaagtagaaggaaaaccgagagaaaaatgatgtttctgaagatgaggaagagtttcttgaaatagagtgatcaataatttcaacacatataattactgcatctttgtagcattaggacaaaatgtgtccattttatctggaatagccttgattatggtgattttataaaaagaactttggtgagattgtgcaagcaggaggcagcactcgggtttaagaaagaaaagaaatgctgaagtgaaggtagtacatatagcctcttctttaagatgtttgtatgtttgtggaagggaaaaaagagaggatagaaaaataatgcacaaaggagatttcaaaattccacatgtgccttttgcctggtatgtgagagtggcaactttggccttaacctgtgttctgcacaggcagaaagatatatacatacgtacacttgtgaatatatttgtgagcataacaatcaccttaaaggggctgaaatattcattctccaaattacttcatgtccaacaagcctttgatatggatcctaatgaacatctccagttaaccctttttctcctcctttcccacaaccatttgtattaggacagttaaaagcttgccatcaggaaagttagccaaagtcataagcttagactctttcctatgcccttttctgaaagttaacactaatagaaagctcagagtttactgtaaaggcaatgcttatttttattggtcagatctttaaatgaatggctgccttctgcttctaaaaagcagacaatttacagagaaaattcaatttccagggaaaggaaaaatgccctgaaataatttctatgcctattatcaagtaagtttgattctgatgctatcaaaaccaggggcagcatcatagtgtcttttggagaatgttgcactaggaagggggcaggggttctgagccacttagttgcagccctgctgctgggggccaggtgactttagaagtcactgtcccttttttgtattttttttttctgttaaaggatggagttagaaaataaatgtctaccatgagttgacttatgttaaaattttattccctaaaaccccaaatgaagtcattccacatatacatatcctttttctatctgcattttggaagaacctcttctttacaaatatcatgatactgctatgtggttttacatggtttgcatccctcctcggcaatcagaatcactcttctcatctgtgctatcattaccacaggcttcacatttctctatccatctcaacattgtttgtatagctatctattatttccatccctatgagatagtgagtccactgagggcagggttatatttaaacaaaatatgcactcgctaaatgtgcagtgaatagaaatgaatattgtttaattcatttaacaggtggacttaatagtatcttataaaatttgatgaaagttttatttggagagcttggataatacgaaagctaaaagaggttgggtgaatctttattatcagacttgggtagggctctttattactgttttggtgtctttaatactcaagattgttgaaattccagaagggcatgtgggaatcaaacatggtttataacaatcacatggaagtaactatttttcccaatgtcacctaaatgtaagacttcccatttaaaaatgaatatatagtttaaaagtaaaataagagtagcacctcagatttatggcactttggaaatttcttatcatttcctcatgcatcccttcatcctagaggataatgatcatcaatacttgaactccttttggtaccaacattctactgttaggctctgagaagttatgatgttcacttaggtcttctgattctcaaggcatcaagactatatcctgttgcaacttagaaataacatttctagtccctgtgtgtctccttcacattctggatttttgtattttaattaagcttagtaataaatatgttttaaaaatcaaagccaaatttatataactgatttttgttgtaatatgttatttattttgaagaatatgcatatggtacatttttaaagtataaaatggaatgcagtcaaaagtaggtctccctctctgttgtgttctgctacctaatctttctccctcagacgacaactgatgccaatttcttgtgtaccttttcagaaagagtccatgagtttataaacgtgaacgtatgcacattcttattttctagattacacaaattgtggcaaactatatttattcttttatatggttgttaaattcagtaataaatttcacagatctattcatattaaaaaaattgtagcacattactttgtgggaatataccaaaatgtaagttagttccttattgatagattagtatcactactatcaaatagtgttatcaacaatgttgtaccgactactttgtgcagttgtcactgttgtatgcttatgcaactatatctaaaataactaaataagaatttgccaaagggggaattggctttttaaagtttgaaggttagagacaaatagctatccataaaggcattaatgcttacttttaccaagaatgtatgagggttcccatttcctttatattctctctagtacaccaagttatcaaacatttttatccttgaaatcttatacggtattaatatttgattttggattatatatattatttcatgtgtgaatctgatgacttttcaaatgtttaaaagtaagttatatcttctatctaattcatatcctcactctaaattctttctgagctattgtttttaaatgtaatacagaattacaaatatttttcccaattggaaaatcacaaaaaagtcccccccgtttttttttgttttttttttttttgagacggagtctcgctctgtcgcccaggctggagtgcagtggcgcgatctcggctcattgcaagctccgcctcccgggttcacgccattctcctgcctcagcctcccgagtagctgggactacaggcgcccgccaccgcgctcggctaatatttactatttttagtagagatggggtttcactgtgttagccaggatggtctcaatctcctgacctcgtgatccgcccgcctcggcctcccaaagtaaaagtccccattgttttcatttcatcaatatttaaataaattatttcttacatattctaggtaccaagatatacaaacataaaagatatgaacatgaacaccaaaatttggaggcgaaaaggctcatagtctcttggggggaaaatatacatgtgcaagctgaataaaataaatcctataatagaggaattgcagtgtgctgtgggaactacgaggaagctgtgactgctttgggggaggcggggagataggagggaaagtttaccagagagatcgctgtggcttctatggtaggtctcaagaaatgtgtataatttatagggtcagagacgtgttcaggtgataggagaaaagggtggaaacacccattttgtattgtgcccctcctttggtaatgagttttgactaatgagcaattgctttttttccttgacattcataagtatttattatcctgaactgattgacctcatattttgcaaaataaacagctcatattttactatgatgatttaaaaacattttccttccatttgaattagataactcatctttaaagttttcttatggctaacgagctcgtgtttattcaagacaacttgttacagtgctattagaagagatggaaaacgtccaactgcagccccaaatcctggaggtatctatttgaagataagaaaaaagttctcaaacaaatgacaaaatgttcaaactcaatcataattagagatatgcaaattaaaacattacaatcacactgacataaatgaaaaagtaggacaatacattatgttggtaaggctgtgggcaaataggcaatcatatattgctggcaggaatctaaattcatacaagccttctggagtaaaattcagcaatacttagcataaatatctatacacatacttttcgacccagcatttctttttctaggaggctaccctggaggcacacagagtgtatttctcacaggagtattggttagcagtgttttctacaatatgaaaatgctacacacaaggttacttattgcagcattgtttataatagtacaatactggaaacaatcaaaagaccactacatagaagagtgtgtgtgcatttgtacaaaagaaacacaggcaagataaactaaagaaaccagttacctataggcagtgcatgggaaataagtggaaaaaaagagggaacaggaactggccaggagggataatgagggaataacgattatcaagctatactttttggtaaagctttgactctaagtaccatagtaacgtttcacgcacccaaataaaaaaaataatttaagtaaactaaatctagttaaataattaaaatcaatgtgtatggaatataagtttacaaatgaataaccaaaccacactgaagaggatgggcaagtaaagaagcaacctaagtcactttcaaaagaaaatagtattttgattggatactgtaaagttcaagacaaaaataagtgtacataaatactgtactcttgtaataagtgtttctcacaggagtatcagttagcaattctctaactaccttaagtgtatagtaggatttaataaataagtgaatatattataaataacggaagtcaggcctttcactgtcagaaagaagttacaaataaggaaaaggcaaaaaataaaatgaacctggtggtattgacttaggattgaagtattaacgatatctatctctatctctagctctacatgatatatcagaatctatctaaaaagatataccgatagaaatgtagaaataaatatgatgtacgtgtatgtgtatatagatttcctagctctctctgctgagaggacctgagagcaataacaccccagtaagaatgaggacacttagcgctcagatgttggttgctattgttctccaaagaaagaacccagactcatttggcaatcatttgaatccagggctagggtagaggggacaaaataaacttggaacattatgtgatgccaaacaattaaggaactgctaaaaaacaattggggtatgtcaaaaggacacaatagcaaatcagaaggatctcccaatggctaaagccagaacaattttagccacaaaataaataatgatagtattggattataatccttagaataaatatccttgaggccatactgatataaataaataactgaatacataaataaatgtaggagaaggaacagctcttacagaattcctattactttagacagaataaaggaaatacaaaagtcactgccgggcaaactgcacattaataattgttgcaagcaagatctgtcaatggatgctaaaatcagtggataaaagtttgaggaaaaataggacattagcacagcatcaaagttttttcctcaatatatttatcaattataaatgaaaaaaatgtaactttacaatatggaaatctagtagacataactttaaccaggcaatcaaggttaataccactaactgacatcatgtaccctcccccctgccataatgatatactaagaaggatacaacatcacttctatggcattcttgccaaatgaataaccttagactaatcattagaagacattggacaaatccaaattgaaagacattccgcaaaatatttgaccaatacctattagaaatgccaaggtactgaaagacagggagactgagggaccatcacagattgaaggagattcaagtgacatgacaatcaaatgcaatatgggtcgtagttggatctggtacagaaaaaggacatgagggtggggaagagctggtgagagctgcatagctggtgagagctgaataaagtttgtagtttagttaatcacaaggtactagtgtaaatgctctgggtttgatatttgtacactggtcatgaaagtcattaacattagggaaattgggtaaatggtatgtatgaactctcagtcttattttataacatttgcataagtggaaacttatgataaaaaagtttggaaaataatagaaggagataacgaagatgaagaagatgaagagaaggagaaggaggaagaagaggaacaggagtcagggaggggaaggaaaaagaaataaaaaagaacaaaaggaagaagagaaattttaaaataacatgtttgcttttttaaaaacagtatcaagattgtatttgaaggtattgctaagatgagagctacaggcatggttttgtgccctttcagagtcaatgggctatatgcataacatggaacaaaaatgccatgttagatatcgtactgattttcatcttttagtttatatgttggtttctttgtgaaaataaatttaatatcaattcaacagacattttgccattgatatattcaataaaagttttgcaacctggcatgattctttatatgttattaccaattcaacattctcttccaaacagataaatatactgattaattgcacagctgatgccaagagtgaacagatgcctatgtttagtcttaatagaaaaatatcttagataagtcacaatttaaatatctcaaaactcccttacacaattattaatttctacaaactcttagtaattatttttaaaaagaaaaaatttaggtactaggaattcaaacacattcatccatcattatataccagaattcctaatccttctcaaaaagtgctaacttattttattttgaagccacactggtgagtcacttgctataatttgtccaagatgtctaagtcaattagaaaacagaaagaatggctaactttaaaaaatcccaactacagacagataacataatttaaaatttgggtattaaaacaataatatatctgaatataaaattaaaaatattattgccagtaaaattttgagtttggcttatgggataatacacagaaaggagaaaagatgaatgttcttgttcaaactaaaatacatcactttcttacccttcatgtgctcctggctattttttttgttttgttttgtcttttttgggatgttatgatacatgtaaaaatgaattctgatatattgctcaagatacttcagaaagactgtactctgtgtgcctaattgtggaagtgggtgacaatcacatgaggagttgctttaaaaagcatgaacattgaaatcctgataagtgtaagagccttttttaaaaaataaaaaactgtctaagtaatacaattctactgatcaagtccctttcatacttacttacaaagtagaaacttatgttgatatatacttacaaagtacgagcttactattatcaaatgtccatactatacagtaagaaaatattttgcattaaaatgttacgtgccctctgaactcacctgaaagctcaataccaacaaaacaatctataaatgtaatacttcagtttgtttttataagtactgtgatgatccatttcctctctggtcataagaatcactgtgatagccatttaaacaatacagtacactatttgaatattaattgtactgagttgtctttcctgctttgcatcctaaaagtttacaatcctgttgtggagtaagaagactcacacataaatgcttcctataatcaaataacagagccactgtattagacgtcaatagtctaacacccagaacccagggaagttggtaataacaccttatgttgcaaagataattaaaatcttcaaagcactttcacatgttttacctaattgaactcttgccacaaccttgccaggaggcagagagggttgtgataaatataaaaactgatgctcaggaggtcatatgtgttttaaaatcacacacggacctgttcactctgctcaagtgccgtcgagggaaccacagcattgtcctgttcatttgctatttttccaggagtagcacttccctcaaagtaaggaaatagctctaggtattgggttccagaataggagagccctaccggaaaaccgtgttccgctgcagcacaaaggactatttttagatgttttccttttgctaattgtctctccctctgtggggaatttctatgggtagaatcccagatgagccaattttctcactaattctcaaagagacaggaaagatgaagaccatggctcaggttgccctggggctgcataacttcttcggtgatgtcactgcagtggttttaggaagatcttcaaggaccttggagcttaaagagcttgtgataccactgaacaacaggactaagaggcgactagaaagaaaggcctgggcatatcttcttgaatcttggaatcaccccaaatgacctttcctggagcttcagctttgaaaggagctaagagggtgtgaacccaggtggtggctgtaaactcaagcggccctccagatgttctggtttttcttccatcacctctgagagaaaaaaggaagagacttcttccaggcaacttcaaacatcatttcaagtgttagggagccagtggaaccgcgaatgtttagcctatataagagaaagagaacaggtgtgatgcaaaccatttttactcccttgcagggaagagctaaccagttagtgctaggcagccttgagacaatggatggaacaaaggtgaggtcagttgttggctcaacctcagggaaaacctaacagttttcgtgcaatgaattacctagggagctgctgagttcactgtcacctggattattcaagcagaaattcactggtatgaacactggcattcatcggaaagtgaaaatgattcacaaccctacaggtggggtctaaataataataattgcaaacactattttagcacttactttaaaacaagtgttttcttaactctcagggggtgtgtgagacagatgctatctttaactttcttttaaagatgagaaaattgagggacagagcggttaagtaatttgttcaaggtcacacacctagtaggaatttgaacttaacgctgcttgtctctagtgtctgtgctcttaatcacttgtattgctaagtgtcccctaaagtcccctcttgccctgagattccacatagggttacgtcctgtcacttcgacagcattcttcccatgcttactcattgcacttccaaaagggcattgttggcatcaggaaaagaaaaaaaaaaagagtcaagggggctgctgggaaaaaaaaatcgagatctttaaactcatggagaagctgtttggtcatcggggcgggctggcagaggcaaagcctgccagaatactggcgccaaagcgaagcgctcttttgtcttcagatttctcgcctcacctgcctcctctccctctgtcccttctagctccacttcccactgcacctatgctaagcttttctaggagcctgaaaggcacggggacaaacaagcacgccgctgccaatcctctatctcacaccctcttccccacccagattgacggggagacgcccagggtggtaagtgacttacccaaggacacagagccccgaccagaaaatccaggtgtccagactcccacatcggcactctgtccacgcctacgcacacctgacttctcatagccggcacccaggagctttctttattccacgtccccgcctccctaccccaccccctagttccctagagtcgcttctgacgctctgcagcctccggggtccagccctccctgcgggtgcttcccttccgccggattcccacaccggagtcgcccttggccgcgcgcagcccgcgggaccgctgccttccgggctggaagccgcgcagccctctcagcgcctcaagcccgggacggctgggacaccgaggtagtcgggctcccagggcacagggtccggcaccgagggcaggagcaggggaggtgccaaggaccccggtccagaaggcacctgtaaggaagcaccgacccgcagtgacgtcctccgcgtcgtcctcagaccagccaccgcctccggaaggtctcaaggggccgtgctcgagcccaccgaggggtggcagcgcctcgggctctcggagggctgcccccggcggaccggcacttccgcgtcccggcccgccccctgccggcgcccgggctccctccggctccatgtgcaaactcccctccacctgggcgcgcgcgatggactcgggacccggcttccgaagacaggccgcctgttggttggactactagcgcaggtgggcggggagttgaccaaccccacacacgcgcttctccatgaagattcttgagctttctctgaagaaaggagtgcatatgctgcagtgtctctgtggaaggagcctgaggtccagcgacagcccaagtgaaccccagctcaaagggattgtgacaaggttattcagccagcagggatacttcctgcagatgcacccagatggtaccattgatgggaccaaggacgaaaacagcgactacactctcttcaatctaattcccgtgggcctgcgtgtagtggccatccaaggagtgaaggctagcctctatgtggccatgaatggtgaaggctatctctacagttcagatgttttcactccagaatgcaaattcaaggaatctgtgtttgaaaactactatgtgatctattcttccacactgtaccgccagcaagaatcaggccgagcttggtttctgggactcaataaagaaggtcaaattatgaaggggaacagagtgaagaaaaccaagccctcatcacattttgtaccgaaacctattgaagtgtgtatgtacagagaaccatcgctacatgaaattggagaaaaacaagggcgttcaaggaaaagttctggaacaccaaccatgaatggaggcaaagttgtgaatcaagattcaacatagctgagaactctccccttcttccctctctcatcccttccccttcccttccttcccatttacccatttccttccagtaaatccacccaaggagaggaaaataaaatgacaacgcaagacctagtggctaagattctgcactcaaaatcttcctttgtgtaggacaagaaaattgaaccaaagcttgcttgttgcaatgtggtagaaaattcacgtgcacaaagattagcacacttaaaagcaaaggaaaaaataaatcagaactccataaatattaaattaaactgtattgttattagtagaaggctaattgtaatgaagacattaataaagatgaaataaacttattactttaaaggaaaggatttggagaattgaactcacaaactgatgttatatactcaatagcttaaactcatgataatgctgcgatgtgtggttttgcttgattttgtattttatttgggcatctggaattgacacaccattacattctgtttgcaggattttttttgtaaccatgaaattgaacatttccaaattataaactatgttaatacctataaaatatatagccaggaaccatttatcatcaagaaaagtgtaagaaattatttttgagatgtaatttaagattgttttatgtaaaaggaaaatcttgtatggcatcgaatagccttaatgagtttaattctttcacaaaaatgatttcaaattatcctagagtataacatttttatcaaagatattatttccggagttcttctttctttcttttttttttttttttagtaatttagcaaaaacattactgttctaatgctgaagtgacttttgccagtgccatgtccaggtggtgaggtataagttacttgctcttagcatttggtctgatttttttgctttgtggacacctttgagagtatccacaaagcaatgtctcaggtgtggacacctgagagcatgttttagaaagctttgtaccctgtcttgtggcaggaaagaaagaacaggggttttacataaggaaataagtcctaggaaattagtcaacgcaaattgcatttgcgtttgtaccttaccacagtcttatattgttttttaaactctgccatgaaatttggagacatgactgtgaaattcctaacttactatcttacaaagccagtagctaatttgttgctctatgtatgatcctgttacaagtccagtttgcaattcatttgtttcctagaacacagaagggtaccagtaatacactaaattttcaaggtgtgtagagaaataatatggaattagcagctatgactccaacagacaggattgtgtgagcagctgaaaggagcaaaaaagaactcagtgtaagagaaggcacatacatagttaagaatactaaagtatttttaaaaatcaaggaagaaataaatgttacacaatttgcattggaataaatagatctatttagtcctacaaatcaggagtggtgtagagacatccaaatttaaagaaaaaaaaacacaaaacagaatgttaaaaaatgtatgcagatttatggatattatcaatgagaagacatagcatgtaacttctcctatatctctactgtccagcatgtattgttccaaatatgactccctaaaatatatacactttgcagaagctctaggccctcacctcaaaccttgccattggttgccgtatttcaaggtcaatatagtttccctcactttacacaatcattattcttcaatagtggaccatatccttcaccaggtatcctatttctgttatctagaggttagcagaaaatgaaatgaaggaatttccctaagcagttgggaagaacaaattgtatgcatgtaggcaaagattttgaagatacatttgcaagagatatttgtttaaccaaaatatttggaaagtaacaaataaagacatttaaattttctaaaaatggacttgctcttctaggaaaagaatacccctggggcaaaaatataactctagctgtatttcttcttgtcactcttgattcaacttgattataaatacacctgtcactaccagaaccaaaaaaaaaaagaaaaaaatcccaagcacaaagcttattttatttgaaaaaaataaaaaagaaacttcaacactatgggacactggctcttttagcatgaaatgacttgagcttttgtagtgatgatacacatacacactcatcagtaaaacgatggtttcataaataacacaattgatgcaaatcataaaaatcaattacaattatgatttcatgacaaaatatatttaattaagtttgttatgaaaaaaatagagatatgaatcactaacaaaattcctccattttcagtggctattcatcatttatcatctagactcacatttgtctccttcctgatagcagttaagaaaaaattctaaccacacaatttgtatattgtttttctccgtattatgttaagcaaatgttcactgcagtaaaatgttttggaaattagctttgtcttatttccagtttagttcagagaattaattggaaacctgatttcttttacacataaacctgacaaaaaatgtagcttagagcaaagggtgaatgtttgcttaactcctgcttacttctcaagtacatgaaaactttaatagaatatgccagtattcactgagtttttaaaaatattaccatgtgtaaacatataatatccaacttcatccaaaaatatggttgagtttaagtactttgtttttcaggcttatttcaagtataataattctttgattttcattgttctgatttctgggtcttcaattcattcgtcacttttcctttttaagtaaaataagcttttttttttttttttttttttttttggagttgcattgggatttttcccaggaaaaaatatggcttttagtaatgctttgcaattggctacgcagatataaattaagatatgtttattctgagttcttattggaataagtttcaaaatcaacgagcttaagaatgaaaacaaaacttttgagagtctcacaaaatagctttctggtcaatacaccttacttgatttttaagctcgcagaataaagtatagaaacaaatggagctgaagttccatttgctaattcagagacttttgtgcttccgcaaattggagggcagcaagccatcctattctcatagtaatcgttttggctttgaaatttacatacaatttaatagcacatttttagccattatggattggcgcaataaagagatatcaatgtaatgcaatgtgatgctttatgggcctcattctaattcagaaagcttgtttaaaagaactaagactcttctgtttaataaaatagcaacaatctaatatctagattggtagtcctgcggtgccactagtgggagatgagagtattaagacaagagtaaggacaaggaaagacttaaaggttgcatattgaaaagtttggaattcctaatttgggagcactgatttcttggtgaagaagtaagtatgactacgttgccagtaattttttaaaaacatagacccagaaatagcaaatcgatttcaccctcataccttagtctacaaggccttgctcttgagaaggttttccatgatattgcttaatttcatctgcacaagatgagacacaaacataaaaattccctgctcattttaataccataaaaggctgaggttatttctctgtcataaaattgtaaatagcattttttaagtcaaaattacatttaaaacagtggattgttctacaaatatatatgtgtatatatacatatgcttctgaaataaggatatattatatgagtttttatttgatttgtggtctttagtcataggtaatcaaaaataaagagatttgaatgcaaaactttatacattaatgtacatttctaatgatggtacaaattgccactttataataaaaaagaaacaggtgggaataataatcaaagcacgtgttccttcagtactttggtgatttttaatcccccttgtgatgcacaggaaattattttttagttacaaaaagttatcttagaaatctatacttcccaatacagatttcatgttaagtcatatcaaattgagaatttgtggtgaaagaataggaaaaggatgctagatgctgatctttctttttcaggatttttcctggagcccaagttaaaaattcaatacttaaatctaagttaagtgaaaattaataatgttcagaatgatgtattgagctttagtaacagacggaagcaaaaaaaaataagaatatttaacattatgataatagccttaaaataatgtaataaaaattgcatcattaaatgttctattagttggaaagaatgagctgatgtttctttgtctttgctccaagtacaatttaaagacagtgacattcattttacttaaaattgttcaaaaagtccaaaacatactcccatggctagaattggtattagctccaatacaaggttaaatgttacaatcttaagaaattattgacactgaaatgtttagtaaacatgttgtatgagaaactaaacaaattaatgtttcatttttccattaaagcacagattattcaaatcattgttttctgagctcagatttgtaaaacgtttatacatcattaccctcctggaattaaaaacaattaaaatcctgagatgctcatgcacgtagacgaaatactggcacttttttttaaacattaaacttctttgagaagtctacctttttttttttagtgtgtttatcctatattgctgaaaaagcgctgtgtctttttaagaaaaagatcaaaaattgatttacagatgggaaagatgtctaattttgtagaagagttgaaagaaaagtaaatgtttctttgtaattacgtagctacttgtctcaacctgacatcttgctttcaaggattaagaactaaagtacgttcatttattcttttattcataacataccaactagaggctcagttgagtttaggcatcatacactgaattgcaatctcaaaacaacaacaacaaaggcagacacataaataaataatgcaatacctaaaagtatgtgctatgataaatgcaaaaaagattttatataccactgaggaggcaacaaaggcatcatcagggattagaggcaagacagcgattgaaaaagaacagatatttgctgagtgataaagggggacgacaaaggcctctcaagtagaggaaatcatttgaatgaaagatggatacttggaaaacagggcttggttgggaagaatgttcagaaaaggaggtggaagaaaaactgagttgagatcaataaaaacgaaaagttactcaaaggttttcaatacagcctttgtatttgtttgaacatctgtatctgctaggatgcttctggttgctcagacagaatccccaaaccaaactggcgcttcatctcgaatatctaggtacacagcatcaccatcgaggcttactttgtagttctctcagctctgtccacctccatgtataacttctcccttagaggcagaatttcctttagtagtttcagaacctgcatgcttatatcatctattctctattagaatcccccagacgacatcttacatttcgttggcctgatttagatcatctgtccacacttcagtgactgaccatggccagagacttgagatatgttgactagtgtaagtcaaccaagacctggaggttggattgtcccccaagatacaagtctgcatggttgaggagtaaatatttgaatgcaattcagatcccttttatcaagaggaaatgtaaatgaagagcaaaaagtagcaaatctccattactaatgaatagatgtattttctatcacaagtcattggctattctaaaaatccgcagagaaatgcaaatattgattaattaaagctactgccataaaccataagaacaaacaaaaacattgacaattcaattccctaagcattattaagtgactgctatgaagaaggcactgtgcaggtcactgatgaagagataaacagctgcaattttaaagaaaagtggtacatttgacaataactcgatatatctgatatgttcaatgcttttagatgactctcatggagggggttagaaaatgcagcttgcttattctagatcagaggttcatatcatacctacttttattcatacccatgcaagcactgctaggattaggccattagaaaatgctgcacttcaaaatcacctgcaacaaccgtgcatgtctttctttcttttttttttctttttcttttctttttttttttttttgagacggagcctcgctctgtcgcccaggctggagtgcagtggcgcgatctcggctcactgcaagctccgcctcccgggttcacgccattctcctgcctcagcctcccgagtagctgggactacaggcgcccgccacctcgcccggctaattttttgtatttttagtagagacagggtttcaccctgttagccaggatcgtctcaatctcctgacttcgtgatccgctcacctcggcctcccaaagtgttgggattgcaggcaccccacctcgcccgaacgcgtgcctttcttgaatctcctctacagaacatagcacgtgttttgaacactttgaatgacactaagtgtattaacaatccaaactaccctattccatttgtgagaagtattggttttatatttatattggcatcaaaaccttgggttaccatctttcaaaaaaagtcttgattttccactgactttcaggtttgtttttttgagaggattgaatacattttatttaaaagtaaagtgcatcttctgagcacatactttcacaattgtttttcttatgagtataaaataatattgctgttgtcacattatttttctaattcattttgacaaccttatctgaaagacaatgtatcttaatttctgtgctatgtctcttatatattatacctacttgtgtattaaccttgcctacccactgcaatttgctgtcttgaaaaatatgttcctgacccagagaggcacacaaagacatacacaagaagaacattgcaggaggagtatttaatatatgaattgcatgtcagtcatgctatgacttgtctctgatgtcattttccttgcctgtttcatctttttgtttcttatatgcattttcggttgtaccactgcttcattgactgacttaactctgaatttgttgatgatatttttccctagtgttttgagtaattattttctatgctgacggcttcacctcataagcataccctcataatagatctgattggtactttacctttacaaccaagaaaatagtggctaaattaaattggaaggttgtgggtttgtttgctttttgtgtgtgtgtgtaatgataagcctgaatacaggcattccacatgttatttggaccattcaaagacatcatgaccgaagtctctgcaattcaatgtactttttcttcaaagtaccatttattcacagtccaaaatggctgctccagttgtaggcatcatgctcacatctaggacacagaaaaaaggaagacagggaggtggaaatatgtggtacctctaacatggaaacatcttttccagaaacccccagcataggtctcactggccagaactggaggttcgtgggtaaggaagaaaaaggaattgaaattgggtaaggaattagacacttctatcacaaaatgtgaactgccctcgaggtttgtactgggcatattcacaacctcttccattgtctagtacgtcctcctgctgaaggtactaacaccaacaggctataaggtctaggttaacgatgtttttgtggtccaggatacttgtttctctggcaagttgagccactgtcatttctgatctcctgtacgacaaggaaaataactaactaacctacatgctgtctgggtgttccctataagaaatcaaagagaggcacactggatgtatgaggagatgagttctttctttgaacagtgtggattagagtagcaatattctctaaatcgtataccaagaaatcttggtcagatcaccctagaatgatagagcatagatgctattacttcaccatatctagttcactaggagaatgatcatcacaacaccgcaatttgggggtctcactgaattagaaacttgcccacactactagcagatgacctgtgctgggacatctcagcccaaaggtgaactaatcatggaattatggacaagagtgatatgaatctgctttactaactcactctccatcttaaatgccagagctatttctaacctggctcgaaacaagtgactgtgacctgttagaatatagccagcataattgtccatggacttggag

SEQ ID NO: 2234 - DNA, 684 bp, Homo sapiens
gtgattgtccacttgcctttaaagtttatcctcttgatcactgtaatttgtttatttgattcaaatatgttgtcagcaacctcatttgaggtgttaaaagataattttcatataaggtaaaatcatgtatttcatacagctacgaaaatgatcactttttaaatatttattttattttttattttttagacagggtctcactgttgcccaggatttcagtggtgtgatcgtggctcactgcaggcttgaactcctgggctcaggcaatcctcctgtctcagcttctggagtagctaggactacaggcaggtactaccatgcctggctattttttaaagtttttttataaagctcccatagactcagaattcgatacaatggaggggctgctggtgctgtggacaatgaggtggttctccattgaagggcaaattttcccctatgagggaggtagaatggcgtaacgtctgagttcaaaactccactccacttccaactcggacagcgacttcgggtatgttatttaatcttccagtgtctcaatttcctcagtttataaaatagacctagtatctaacctgtatgttcaatgtgagaagtaaatgaaatgagatgacacatgtgtaaacttcttaaaacaatacacatggcacctaatgaccattcaatatacatcactcttat

SEQ ID NO: 2235 - DNA, 822 bp, Homo sapiens
agtgggtggccgccaagagcgcacagactttgaagcaggaaaagacagtctctagagcaacatggaaaggatccagtatttgttttcaggcaaaagcaagcctccaaaagccccttggttcttctctgtgtgtctcgccccttctgccttgtacaccagactgccggcaagcaagcggggaggtggcgaacagctgggatcctccagtgaaaagtttgctcagcgcgagagatgtcaagaggctgggattgtcgcctatcgggagaagaattccacagatgaattggttctgccctgtatctttgaatggtttttattttctgatgtccagtgtggcagcctggcagagacatttagttgaaagaacacggggctctggaaacaaccagtcctccttggttcatattctcgtgttgtcacttattaaccgagtgacattggaggtgatatgctgcagtttatcactgaggtcctgagatggtccatactctaagctttgtgtctactgtggggggcaaagggaaaacttcccccttgctctctgaagagtcattgaaaatcaactgacaaaagaatctaaaatattcctggaaatggagagtcctgacatgatggccccatgatgaaaagaacccaggttcctgagtcacgacgtggacatgaggcaccaaggagaaaacacgtgaaccttaataagtttggggtgagagagaaataaaccttaagtatgttaagcttctgtcatttcaaggtaatacagtgtggaaggcagaaaaatgacccactctcccctgatatccattaaagatgtccaaatcctca

SEQ ID NO: 2236 - DNA, 20804 bp, Homo sapiens
attttctttttcctgttataatttgtttttgattagcgggttacctatgaatagtaatttccaaatatgtagatattttctaactatccttttcaaaaattgatttctggctcaattatataatggccagaagagtcttttgaaatttgttggattttgctttataactgaatattcccaatataaaaaactgtctcatgtcctcttataacacatttattttgcaactgtaaactatagggttccatatatatctggtaggtcaatttacttgtttttgttcctcttatatctctgcttgttttttctttcttttctataagttactgagaattgtgttaaaatcctcactgaatttatttttcttcatatgtaaatctgtcaatttaactttatatattttgaggctctgccattaggaataagaacatatataattgttacatcttcctggtgaaactgaaccttttgtaattattaatacaggtacacttattttcccttcagtttaataatccttgatattcaactaaaacatttagatcatttgtatttactataactactgatatatttggaattaagtctggcatcttattttatgtctcactggcactcaatctatatttttttctttgctgcttatagattacttatcatttcatttttttcttgaactagtttaggtgttatatacttagtttatataattttagcagttacactaaatttacaatgtgtatcccaaatcttaattcatcaaagtctattgttaatctgtatctttattctcctcttgggtaacacaaggaacattttaccttgagtagccccttgggggggtctcagcttaatccagggtgtattttcctgtgatgcttaccacctagaacagactctagataattatttctgcccttaaaagtttatgatgctgcctaactttagccaaaatttgtagatttatgcaagtcccctaagggcaaaagcagatatgatcctcttagaatttggtcctcctggaatttggcctgtcaattctccgctatctgggcacctcttcaaagcttttaaggtatattaaaaaaatgcctgacttaacaattttaattgactttaggaggaaagttggtacaataaaggtatcccattaaaatgggacagaaaagttatttttttcttttcatgtattaaagatggtaacttttttcttctgtatttgtggcaacttttggaatttttattgaacttgttctttggggcttctgcctttccacatttgcttagaaagattatttcatctcatgatcaggcaaatatttactatttttttttctaatttgttccagtttttgatttagactaaatctttaagccaactgtagttttggtgtaaggtatttcatatggaagaaaatggattcttttccccagtagcctaaaatattgtcacaataatctttgaaattatcttccaatacactattcacttgcaatgccttcttaaatttcacatattaatttcttcattgatataatagtctatacttttattagaagcatactaacttaattgttatacacctatagcatattttaatctctttaaggacaacctctattgaatactcttttaaatatccacaggagtactttaaaatgggcaacttttaaatattaatttagtaagaaataagaggaacatatttattcataattatggtacaaaataatgcaattggtttctttatgcttatgaaaagtgaaatcagtaataacacttttcaatgtctataatttacagcatattattagtttaatgctataaatattgttggcctagagcagactagaggcacacactgaagcacacaaatttatatgatatatacacttcattcatttgttcttgtcttgaaatgataaaataagatccgaatttttctcattgtttggatttataaaaatagaacaaaatataggttatgcaaacttaattttaaacaaattatgcattacaaataccagtaaagaaggcttctatcatctagttttaagttcagcaataaaatgcatttcctgaatttttgattatttttagaaggtgtgatgtaccactcagagaacatatttattaagagagtattgtccattaagacaaataagaagaaagtcaaatacagataatttaaaaaattaattgactggttttgacaagaggttaattaagaaatcttgtgcattggtagcacatatactaacattggaaaaaatctattaatgtttatgtgattaaagaagatacattatttttatccaggctgacaattctgacataatatttttaagatatatgaaaacatagcatagaacgtggtcttcacaataatttttaatttaattcaagaacaaatgtgttccaggttgctttagatgttctctgataaaaaaggatccagtaaaaattatgatggatgtgtagtcaagcttacatcatcatttaaaaacattcccattaagttatttgtctgccattagtcttagattttcaatcaatttaagagctctaaggaaagtcagaaattctcttcttgatattaaatttattcagaatttttttaagatagtcatttatacaaaggctttctgcattggccctgaagtgactgcactgtggttaccgtggagaaataagacagtgataaaggaaaaaattttcttcaagtatcggcatattcattatctgtcacaatcagaacttctaagaaaatgtgttccaacagataacatttaggcaaagattatatataagaaaatgagatagccaaaaagctgtcctgtagatcagaaggcatatttattgtttcttataattgtaaaggttaatactatttgtgccactttaaaaaagtcacagattcatgtcactggttatcttataaagcttggaaaccaaatattttttaaagtcccagttaaatatcattctatagaaatttggaaacatacgatattgagaaagcaatactttaatttttatattggggatgagaactcattttgaagaagtatatgctgcaccacaaatgtttgtatttgaagtaattaatatcaaggcacatacagataggaaagaagaaagtgttccatcaactgaaaaaactaggaaaatatgtaaccataattttaatcatacagaatcttcctgactgagatcagttagctcttttgaacaatattatctttgcttttctcaactacatttgtcagaaaaacctgatgttcttaattaatttttaagaggtctcaattacataatgcagcttagaaagtagcaatatataaactgacatcttgaagttcccagggcttcagagaagtagtttatgctgtagaggagatcatttttatcatataccacacttggtgcttattccttttatactttccctttgactgggcattatagacatccagctatctctctgtgcagggtgtcagactctcagatagccgcaatgagtgtgaatcatgtcctgtagataataaaaaggcaattttaaagtagtgaaaccaaggtgatgttaaaggaaatgctataaggaattgtaaaaaaaatgaacaaagaattgaggcttggagcatagagcttgtatctttgaacttattgagcacggtttgtgggaatttactgaaaaatcagagatgctgtggaaaggcatggtcttagtttactggatacagaactacagaaaaaacatttatattacaatattttaaatggataaaactatacatgatagtttatcaaaaatgcatatttgaaaatccaataccttgctctcaacagagatgtatttgggacataaaaaccattagttagaaacttacccaattccctactgattttaaaatatcagagtaaatagtaaaatatgtacatatatgcatttgtaacacctgaaattccatgcattgccttgacattttgagcctcacaaggttctaggaactagctatgagttccctggtcttggcaggtatgccttgctagccagcaaaattattcaaacaagccagggacattctcccatgggaaccaagggttatcttaccctcttgtcactgcaaagcctgcttcccacagcccctgcttgttcactctacttgagtgtaacccccagatggggctgcatggcacacacagtgttcttctccccgaggctgtgagtacacgggactaataaactgctgttgatctcatctgtccaatgctgagtgttgtgtgcttggatacctggaggcttatggggcatggtatccatccttcatcaatgggggtaatcagattagcttgtagatagacgcttataacaagtgttcataaaaattagtttttaaaaagtagtctttcttcttagaagcttatcctttcccaaatgcatgctggcagccctttcagctttagccaagaccaaatagtctctaggaagtttttgtcttgttgccactttttgcaatgatttgtgttaaattctcccaatgcattgcaccatactattctttttctgcctataatacatagctcattaagttctaattcaatacttcagcaaaaatggaacaatagagacaaaacaggtgaagaaatcataatcataatactttttgtaatttttccttgaatccagtccaaattagattggttagaaatcagtttctaagaagaaagactactttttaaaaagtaatttttatgaacgcttgttagtattcagtggagcagaactttgtgacactatatgaagaaaataaatcattctctatttaccaaagcttatagttaccagtgacaatgagaataggaattaagtccatagattacaggttgtaaattcaaataatgacaggaaccaggcaggtaattaaatgggtgaagtagaatagatggtgatctaattttaaatgttggcaactaattaaaatgtttaaaaaatactgtataagccaaacaaaacacatctggggaccacatgtccaagggtgaccctaaagcaattttaaaagtcctggtcattcttcaaggcctgcattgtatgcctgccttttcaagaatcctattatagcaaaggcagtctaagttaatcctgaccttcttggagttttttattgagttagtagtcagaaatacaaccatagtgcctttgctctctcattgttttctcagtgggtcttttattccccatgacactgaagggttttggaaagagaccatgtattatgttcctctcattctcctcatgctggcagcactttatgagtcatcagtaaataatgattataatagtagctaatattaaataaggctcttttcatgagtcaaacacatttgcaatagcttttccatatctcacagcaatcctgtaagagcagtgttactattaccccatttgactgaaaaacacctgaggcgcagagaagttaagtgactggccaaggtcatagagctgctgatgggtggagctagtaacctgtgccaggctaatgctgtagccatgttctcttagccactaggctatgaatattaattaatccaacataattgcctctagctaagagttttaaacctttttgtaccaaaatgtttgccatagttgttaataagtcttcagatggcaggctaaaacattattctgttttattttcattcttattctctgtcttttatctatttttgaatcctaataagaaatggaatattagaattaacacagtcatgctcatatgatgtcaaaaaagctaggtaatttgttcaaactctgttcaaaattaagcatagcatcagttaaattgatcagtctcaattttgtgtgagcaactggcagtttaacaaccaaataggaaatattgaaaagttttgtgaaaagaacttatgaggaaaaaagtaatgtccttggtggtgaggaaatttctcttctgcagttggctgctgtgaataaattactggtaggaagaacagagcaacagtctcagggttttttgtactgtgggtatttcagtgtttgactcttgctttgttactgtcttttctctgcatagaaaagaaactatgcattgagcaatcccagtgtgcattcagtgttatacaaatacttgataatcacttatgagagcaagttattctaagagatggttttactaacttttttactaatttttctttgatcacataatagagttcatagtataatacttaaacaatggctgtgtttttcctctctgaatttatgatgaaaatttgcccttcatacccattcatgtattttctggtatgttcagacatgactagaaaattggttgtctctctggccgctgagaaaagtcttaacagtttgattttcagtgctaggaggtatatactgtagggagctatagaaaagcagaaaggtagaatctttggtcttatctatcccaattcctttcctggccagaataactttaaatctgcctgtgcagctgcagacacatgaggcacgtggcctttggacacagccctttgcatgcctgcagacatattgaagcttctttgatgtctgtcttcaaggcttcccactggtgctgaggctgaaatcccacttcccactccacttcatgtatctgcagtgaacatttcaccaccaacaacatagatttcagcccttctgctagcaatcaaaccttttctatattaagtcccagtccctcaggactgtgcattcttttaaatggtaataggtgctaatggaataatttgatagactaatctctgataatgttactcttctcaggtaaaagtccattttagcctagttgaaatgcacatcacctttaggtggtctttaaggagtgacaggaagattagaaatacgtgacagaccaatcaagaggagatattttggtgagggggggccttttataactctacaacttatgccggctaagtgtacagcagccccccaaaactcttgattgaatgtgccctgattcatatagcagtgaattggtcattaatctctctctctctctctctcacacacacacacacacacacacacacaacttttctcatcctttctctctgtctgtctcacatacacacacacacacacacacacacacacacacacacacaccctttctcatcctctctctctgtttctctctctctctctcacacacacacacacacacaccctttctcatcccctcagggtatataaacattaacacacttgcagactaactgtctgaaaacatagcaatgaaaagatgtgaattcaaatagcataacaaaaagtgaataaaaaatgttatccagtgtcatttggcataaaaaaaagcttttactgggcacagtggctcatgcttgtaatcctagagactggggaggctgaggcaggaaaatcgcacgagttcaggagttcgagactagcctgggtaatgtagcaagacctcatctcttaaaactaaaaaaaaaaaagtcttttaaaaattcatcactgaaaactagtattagttaatatatggttttatcaaggaatatctacagaattcaaactctgcatacagagaagggaaactaacatgtattgtgctccaactatgtgccatgtctcctgcctcttataacattttacgtaatctcatgcattaattctgtgaggcaggtattgttatatgcatttttgataagatgaaactgagactcacggagacatggcaacatgtaagatcatacaaagaaagattatgttcaagatttgaacacagatgaatcttccaataatatactgacagataatcaagagtgttttcagaatgtgaagaaaacgcattaaagagctgtgtcatatttataacacatgtaactatccagatgttgaaaacataaacaacccttacagatagataaacattaaagtccaaaatagaacaggcaaagggagaaaactgatgaatcataaaataaaataggcaatatctgaacacacattctaccttagtagcaggtaaagaaattcatgttaaatagtgataaatcacaattttgaccaattaaattgatagaattaaacttatatatacaaaattctagaaggaatatggtaaattgtgcataaatggtaatggataatttgatacctttgtcaacatatgtcaaaagcacatgatcaaattttcttgctcagataaatcttccctatgaaaagaaggaatcatataaaagtttatgtataaagatgcataatcagatcaggccccaaaactttcaacaaccaaaatatttcactgttgaggaatggctacatgtattttgctatgcccatcaatgaatgttatgccattatttaaatggtcacaaaacaaggttgagtaaaaaagaaaagtccagtaatataaagtccagcacattaatgtataaaatgctagatattcctacatcctataggaatcctataaaatgatatttgaacaatgttcatgtgtctgaagatgcttttaacattcaactttacatttctttgaatttttgacaattaccatgcattatttttaaagtgtttgatagtcaaatgtgatggtaatgaaaggaataagtctacatgtgccatgacaacatcagccttcagttttctgcaagacaaagaggcaaacagatctccagtcctgcttttcttcaattaccaggtgtgctacaacaacatgaccccagcaagcaagattatttctgtgcactgataggaaaaggaagcaagccatgagtgcctgttgaagctggaaaagcaagattgatgttgaggcttgattgaaggagtgcaaggtcactcacagaagaagtcatggtgcaagagtacatctcaatcctgccctagcctggaaacagcatgctctgctgcatttgcatgcccaaggcactgcttgtcctaagccccatcctagaaactctctatagctttatttcccttaagaaggtagaaaaacatcaacaacctatccgtactagctgaatggcctctaggcctattgggcaagtacacccagatgagcatcactcttaagtggctgcttcaggtcaaggtcttttgtgttggggcagctgcaaactggcctctttggctatcccaagaccctctaagtccaaggagctttcaacctctagtgatgttcaatctctgtaaagctgtgtaatgggggataaacattaaagttgtttcacatttaaaaaaaaatgtgtgagaattttgcttctgaccctaatggagtgacagagatgggatttgcccatttaccttaactaaaaatccagacaaaatatatctaacaatgggttgtagagataggacacgagggacaacagggtattgattcctgagagggagaaacaatgtgggtacaaatgactgtctcattttgcctcttagagaaagttttcatgtcattgtgcagaaagagggaaggcaagtgaaatacagtggtttctataagttggagaggcagactgtcagattccatgaggcttaggtggaaattttgggggtagagtactagacagggaggaacataaaacagcacaaaacaaattttacaaagagagttttccttgagtcttcggctgatgctgataagtgtacacttctgaggaaactacttgaggccagggaaagaactgctagaaaggcagacagaacaatttacaaggcttgcacagagccatgactaattaacgttcttctaaatagcaaggagagactttgcaatgcataggacaaaaggtagagtactcagaatggcccttgatagtggttcaagttgtttagaataaaacccactttgatgtcatctaacaaagcttaaaataaagccttggaagaattaaacttacctgcattccagaaaaaaagttaaaaaatatttaaaggaatacagaaaatccaatactcaataaggtaaaattcacagtgtctggcatttcatccaagaatacacaagcaacaatgagaaaaaataatacagaaatgacacagatgataagaataatagacaaagaaattaagagttactagaaatggattctgtatattcaagaaggtaaaagagaatgagcatatttagaagatatataaaagacatgaaacagatgctgttttagagatgaaaaactacatatctgagataaaaatataataaatggaattaatagcagattaactattagacattgtagaagaatacttactagatatgaggacattataacagatactatccaaacatagagtgaaaaagacaaagaaatcacattagtgagctgagctaacttcagattttctaatatatgtgtaacaaggagttccccaaagagaaaagtacaaataaattatttgaaaaatagctcaagagaccaagacaagccaaaaacttagagaaaatagttgcaaaagacctatctgataaagaactattataaaaaatacacaaagaactcttaaaacttaacaataagaaaaaagtccaattaaaaatgggccaaagatcttaactgacacctcacaacagaagatatgcaaatggaaaataagcttatgaaaagatggtaacatatgtcatcagggaaatgcaaattaaaacaaaaatgtgttaccaacaataagataccaatacacacctattagaataaccaaaatcaagcacaatgacagcaccaaatgctggtgaggatgtggaacaacaggagctcttgtttattgctgatgggaatgcaaaatggtatagacatcttgaacagcagcttggcagtttcttaaaaattaaacatactcttacactcacgttctgttacatcagtcacactcgttatttactcaaatcaactggaagctgatttccctacaaaacttgcacatgaatgtttatagcagctttactcataattgccaaaagttggaagaaaccaagatgtcttccagtagatgaatggatagataagctgtagtacatccaggcaacagaatattatttagcactaagaaaaggacctatcatgccatgaaaagatatggaggaaacttaaatctatattagtaagttaaagaagccaatatggaaagaccgtatgattccaatattccaaccatactgtatgattccaagtatatgacattctggaaaaagcaaaatgagcaagctagtaaaaaaagattagtggttgccaggagttagcgggcaggaagggatgcataggtgtagtagaaagatttttaggtcagtggaaatactctgtatgatactacttttgtggattcatgtcattatacttttgtcaaaacccatagaatgtactccaccaaaagtgaaccctaatgtaaactacagactttgtgtggtactgatgagatttatcgattgcagcaaatgttccactgtggtgagggatatccatgtccatagtcagggaggttgtatgtatagcaggggcaacaagagatgtatggaaattctcttcattttctgctcaattttctgtggacctaaaagttctccaaaagggcttactaatttaaaaaatgatttttcccccaaatttgataaaagtaatagactcagggatctgagaaattcaacaaaacacaaaaactaaaccatgaaaattctgataaaattgcttatcacaagtgataaggagaaaatcttgaaagcactcagaaaaagtaaagatatattatgtacaggcacacaagataagaataaaagcagacttttttttttttagcagtaatgaaagccagaaaaaagtgaaccaacatctttaaagcattgaaagaaagaaaaacctatctatatagaattctatatccagagaaaacatctttcaaaaagaaagataaaatgaagccttcttcagaaacacaaaagctgagagaattgatcagtagcaacttgtacttaaaaaaatgataaagaaagtcttaaggcagaaggaaaatgctgctagacacacatgtgagtatacataaaggaaggaaaagcactggaaatgataaagtggatagataaaagacttctatgtttttctctgttatttaaggtctctttaaaaatagagtacagtgtttcaaattaacaagaattagtaataagagttaatattgagttgtggaatttataatatatgtagaagtaaaatgagtgactacaataggacaaatgctggaagaggaaaaatggttgtgtgctacagctcttttactttttataaagtagattaactttaaatgggtttttggtcaagatttgtgaagctggacaccaaatgcatgaactataggaaaaaagtcattaaattctacttcattgaaattaaattctttgttttccaaagacattgttacagaaatgaaaaggcaagttattgactgggaaaaatatcttcaaaacatatatctgacaaaggacttgtatctagactacattaactacattaagaactcttacaactcaatattagtaagacaaaaatccaatttccaaatggctgaaagatttgaacagacacttcaccaaagaagatatatggatattagattagtgctttcaaagttgctcaatatcaatggtacttcatggaaacataaattaaaatcacaagtagctactcttacataccctccagcatcactaatattaaaaagaatacttatttcaagtgttggcaggagcacagaagtggtactcaatacatttctggtagaaatgtcacatggtaagccatttgaaaaagtttgccaatttcttcaaaagcaaaacatacacttaagcaaatgacccagacattctcctcctaagcatttatccaagagaaatgaaagcatttatctatataaagatgtacataagtatttataacagctgaaaactggaaacaatctgaatattcatcaggtggtgaagggataaatgttccatacaataggaaactaatcaaagaaaaaaaagaatgaaattctaaaacatacaacaccatagatgaatttcaaaatgattatactgcttgaatgaaatcagatgctgcttccttttgaaaatatgtaaatattttatgattccacttatataaaagtttagagaatgaaagccagtctataggacataaagcggatcagtagttgcctggagaagcgaggggggtcatagaaggctgcagagatggataaggaacaaagaaacattggtggtgatagacatatttatcatcttgattgtactgatgctttcatgagtgtatacataggtcaaaactaatcaaattgtagcctttcaataggtatggtttcctatatgtcaattacacctcaataaagctgtaaatgtttagggtgccagataagactttcatagagtggggtggtccttctggaatatagctacctgaatacactgtaaaacgcccctgaagctggttagcatctgcgttgggttggactttccaggtttaaaacaagggatgcccagtgagagagtttccttgtagggaatactaagactttctgcttttagcattgttcgggatttgactttttgaagcaatctatagtactatttagtttaatatgcactacatcccaatgctttgcaatatagattatcagaaggaaataaggaggattatttgtagattaaacagcaaggtaacacaatatagctaccaggcactaactttgatagtcatcacttaaatcctagaacatagatgataaagtgtgagaaacaatctagagccaaaaattatgaagaatgcttttctagagccacatataaaattaatctcatttaaaagtatctgagtatgtccatacggagtcacaatatgccagttgatattaaggtggaataaagaacaaacattctgctgtttggagtatatttattttattgaatagcttttgcaaataagttctaaaatattttaataataataattgtaatatcttaagctcttctaagaaaattacaatgttttgttacctaggagaagatactgaggggacagttaagcctttgttccttaactttactagtggaacaaaacttaaggagggacaccttgaattcagcaagtgaaacttgaatgctcttttctttgttttattatgtcccatgtttttcagagtcttcacagttatacatgataatcttaaatcctcacaaaataaaatgaacaaagagcgcctaagaacatatggaaaaacctaagtgacaaatcgcatgtgatcatgaaaattactattaaatgaaccagcataaaactcaacatcaaaaaggtgaatattattttattagtaaagctcactattttggtttatcaacgctttttttttttctttctgcacaatataaagtgaagaaaagaattaaaatgaacagttgaccagttaatttaatcactatacacagttcaggtagttaatctaggtttcaaaacaaattgttctctcccaaagaaatggatggcttgatggcttgtatgagaagtagactgtataaatgtaaaataaattaagtttgggttgtctgaacctgatttcaccagttgttcatttaacaaccaattttgcagaatccacataaataaacgtgttcactgaagaacttacatgcaaaaaagtggtaaaaagtttctttacatgaataaattattttggtaaaaaactttcctaaatggagaataagggcatctgcaaagttttgcttttgtgacggcattttatgggtacagctcttaacattgcaactagactcataacatttttgatactttagacctggaagacatcttatttgatttctatataaaattctggtcttagtttaccagaaggtaaagatagaaggaacagaagactatttgggaggaaagtacattaatcataatatttagaaagacaatttattctgataaactaaattgctgtcattaaaatgcataaactctgacattaaaattctgctctccacatggaaagtatttctgtccttggaccttgatccagttgttacaaaagaatactataaaaggatagtaattacctactatactttgtctcagtgtccattttttcccactgagggaatggctccagtgtcacctgagaataaaacctctcttatttactaatgaagcctgtatttttcccttttgtagttctcccccttacatatgtggcacctcaaattttttatacttccatgctatcctgctgtgagaaagaatagtaattacatctaattagaaaagattaaaatgctatgattcatggaaataatgaaacttgattatgttttatacaaggcataaatcccaaacctacattttacactgaaattagcatacaacctgatcagcagcataaaagcagtgttgtgaatgttcattacattgcttgttttgctaaatgcactttctgtcatgtctcagccttaccatgatggacccatcttcccttaggcaaaaagaaagaggtcagtttgttttttcttaaaacctgggtttgctttataacatattaattttatttatttggggtatgttaagtcaaagtaacatgtgggaactagatatgatatatggttgataaagaaccaacaaacacacaaacaccttcgttttcccgtttagcaggccccaggaccaaaacattgttttcaatttcattaagatcttccaggttaggaaaggtaaaatgcaacctagagacgatagttctcttttaaacatgaggatttttttttctttttctgcatcacggactcagcatgaatgttcatttcaattatagtccagttcacaaagatccctcctgcatgcaggcattgtaggagaacatatgcagttttataatggaacagagggagacattacacacagatagatttgtgccataaacacatacgggcataagggattgtctagatagaaagcgaaaaagaagccaacataaaaacttcaaaaggattgaattgcaactccagaaggcaagaagttctcatttatctatctacctatctgacatgaagatcataactttctgaaatataatgtattaaatgttttctaagtccaacgataagataattctgataataacttggcatagcatgaacattgtcccattaatctcaatcagatatccccttgggaagataagctgcttttactccactgaggggaaggttagaatgccatccttctggaacaccctgagaagtccaggtgagtgggaggtggaatatgcatttctactccttgtttttctttttctaatgtagtgaaattgatagaattatattaactccttattgtcagtaattatgccacacaattatttgagcttaccaacctacatccttgactatacaggacatactctagtttacaaaaaatgagcacactttaatctcccttttcatgaggcagataactaaaggtttcaaaggtacaaaaaatttgaacatgactgaatatttgataataagaaattactgacatttttaaaagaagtgatagcggtattgtgggttaaaaatatttttaaaaagagttcttttaacatttagatgtaactataaaaatacttatgaataaaataatatgacatctctaatttgcttcaaaataacttgaaaatggggagtaagtagaaatatgtgtgagacaaaattgggctatgagttggtaatgaagaaggacatttattataattttctcattgcttttttaatgattgaaatttttacaataaaaattcaaaaaataaaacaggtaaaacacttcctttttctcctgccttagaaaaggttaccaaagtggttggtcaggctctacaagttaatacatgataggatcacaaattcaaagctcaagtaaatccaatgaagtcaaaagtgaataccacataaggttgggaggtgaaggagggaggaagattaaaaatacaaaacaaaacctacctataaattctagatacacattaacttcattattatttgatagtataggagagcaaatattaattcaataagaatgtagatggaactctatgtgccaagcaccatgataaatgctagggatacaaaaatgcttagacaccatttaaaactataataacatgttttacagagtatagtagagttagaataaattgctttgggaacccaagtgaaaggacaattaattctgcaagggttgataataggaacatgaaaaggtaataattgaactagactttgaataagcaggcgtttgctatgtgaaaaatgagtctatttctaaataggtttgtcaagtcatatttgatacagtatctctaaagccatggttctcaaagaagcattctttaccttcctcaatggctcaggtagtctccattgaaccaatgctgatagggacctcaggttgtttgttcacaaccagaatgattgctttgggagaaataggtagaaaaaacaacacggaatggccttttagatgggcaaaatgaaattatcagaaattcaaagggtgacctgttaatggcactggttgaagttctgtatggtcagaacacagggagcaggggtgtgtggcagggggcaaggatggcaggtaaaatgtgaccagactgtgaaggatcacataaggaataggagtttgatattttatgtacggcaaaatagtaaccattgaagatttttaagcaaaggattgatgcagaggttttcatcttatattaagaaaactctgacatcattcttctatcatcattctgagtgactggaaggagaaatactttgaaacaaggagaataatcaacaagttattttaattgacctaagcaagagtgataaaatgagtgtctttggggataaagaagaaaagaccgatggaagacagcatttggaattagaattgataagacttagtcactatatggacactggcggagtggtaaaaaaaaaaaaaaattcaaaacaaaacccatgtactaccctactctaaccagggtggcatgatcagatcaaggtttgggtttcaaagtatcagcatcaactagtcacagttgaatagttcaaaatgcttctcaatgtttggttgtcttaatctgtcatagattccttgagcaaggactaggggatgcattactgtttattcttgccatagtttttcagactccttcctgctgaggactcaacctattcttcaaatgatgggtttttggattgagaactgcctgagaactgcaatatgtgccgggatcttgattttctatctgggacaaaagactgagactgggcctcattcttctctttgttcattcttgatttctttggattatatattatattaaacaacattatcattggctgttgatctatctcattggctgtggtattagccagttgcatagctccctgcaggtgagatttccctgcctgttattctgaccttgttacttgttgaactttacttctagcaattaaatgctgccacatttcctttgctgttcaaggatcacatcatcttgattgctgttgagcctgctaatagcaggctaatatttttgaatgtcatcagcccagactgtagaggacagccactatgagattttcaatgatactgttgcctccttcatcagcttattccattttggtaaatggtgggtcctttagatcttttcaaggaatatagttggaatgtaggtcttttggtcttaggtagttggtctattctaacatgctcctatcaatgagtcttttgatctctttctctatggcctgtcagaacaattcagacatctttatgttttttcaaatttctgagtcgtcctaatagcacatcagaactgtcctgcagggttttgtcaggtattaaattaaataaaataatttccctgaaattgacaaaaatctttgttatccagctttaccttcactcatgatctggcatcccggagatccaatcatggggctactctcctggttcctgttggtggatgataattaggttctgtgggttcttcaacacgtaatttttctcccttcttagcagactcggcttttccgtgttgtgccatgttgttagttgaccgtcttgattgatctaatggccaggaggggacaatagggcaaatcctgcagaggatgaacattgtctcatgagcaaccttgcctcacttgaggcatctgcatagtcttcaagcaaggatgagatgggagaggatgctgtcctctaacaggagtgatggtctacttttgcaggaccaggggattcaagggaatccacggcttaagtttctcaagggcattttcttatataaccctttcctaaatttcagagtccaatttctttattaccagggccctgatagccctcaagataaaagaagtgagggaagtatatgacatagcatggcaagtggctaaacacagatgaagtttcatttggaatctcgctttagctagataccttggggtgctctgggcataagtcacaccttagtgttgttgttacctatgagcacaagggccaagccctggctgtaggctgtcctggggtgggagaagtaacttcttgagtgaggtggctcccatttagtcaaagttaatttcttgaaaagaggaagttgtgagctataagcaaccaagatttacagcagctgagagttgggcgcactggctgggtaaagatagtctggctaggacacaacatcatccatcatccacaatgcttgtcctctgcagaactggccccatcttccactccagtgctgactatcaggtcacagaagagggttaagttacaacatggcccaactcagaagaggtagaccagctatgaaagaagaaaaattgcatattggatgttgaaaaccacattctaggcttcattttttcctgcccttattctttccattgcccaaattattttatccatttcatatttacattatttctaacactttactattacaaagagtactgtcatgaatatttttgaacatatgcatgtgtgtatctttgtaggtacatttgtgagatacattcctagaaatgaaatgttggatcaaatttaaaattcataacattttgccaaagagcccttcatactttgtaacaatgtatatactccacaaacagggtatgagaatacctttttcttaaatcttaactaacagtgttatcatcagattttttaatgacagaagattgatgatcagacttttccaatctgaattagatatatattacatagtatattattttaattagaatctgtaaaattatgaatgattggagtacatttttataggtttaaaagccatatatatttcagaagagagtacttttcagagatttagaaggtagactcacactatcaaatgacatcgctggtgttaataagaggatcagatctgaatccccgtttccaaaatcataaaccaatgtaagatgcatttctgtatttttctcaatatttagctcaaaggccaccccctctatggtaacttctctggctgctctggaaaagtgaccggccccttgcgtgtgctggttatttctgtgcacatctctcctcaaatcctcactacagtgtgggcaggtgtgtcttgttcagtgatttgaaaattaaagcattaacacttgtaaagcaaaaaggcaaatagtataggaacatcaaatgtaaacagataattttcattttaattttctaatcccacctcataatggaatcc

SEQ ID NO: 2237 - DNA, 2816 bp, Homo sapiens
ggtttggaatgagtcgtgttttatgttttgaaagatccccaggggagaattccaaaacctaccttagacaacccttgcttcaagtccccatcttaatggaagtgctctctgccatctaacctggctccctcctgctgctgcagctgaggcctaagtctaccaggactacctggttctcccatctcagtcctgccttctaccctcgtttttgggcttgcgtctattccagccccctcccatccagcccccaaggcaaaaggttcacttactgcccaggtccagggtcttgctcacagcgcccatcccaggggcaggcagaggagccagtgtctgctgtgcgccacccacccctctcctcttccagggctagcagggctaccccgggctgggggctgtgttgccgcagctggccaggagccccacctcgcaacgggtgggcttcagggagaaaagggagggccacatcaaagccgggccggaaggagtccaccgtggggctggcctcagccaccatagcctgtcccagctggaaggtcctggggcagggagccgggtggagacggaggaccagatggttcctgcccctgttccattgcagaggcattgagctgcactctccagtctgggcgtccaggctgaggaggaggaggaggcaggccccagcagggctgaatgtgtagaagcgagagccctcaatggaagccaggatcctgcgatgagtctcagagatggttccaaccgctgggtacacgaataccttaaggccatcgcccctgcactttgaggtatcaaagcaagattcccagttgcagctgccaccatgaggggcttgaggaggtgaaacggcatcttctgggagctctccaggctgggagaagctctgcaggagctctgcatccagccagcggggccagccttgggaagccccgggccgaggtctgggaggcaatgccaggcggagaagggagaagcctcccagcaggacaagcaggagccaggaggctgacagtgccagccacagggactttcttctcctccacgactgcatgtggccacccacagtcagggctagggaagctgggaggcctctgccagcaagcaggaagagcagggcctggggcgggagaccagagctgggaccgacctgctagtcctgtgctgtcattgtacagatgggaagactgaggcccatcgagaccaggccgcctgtctaaggtcagatagtgagtcaccagccaggcaggaggaggccaggtgggacccagcttgctggcctggcccccctgctctcaggactctgccttctcggcctttggacaaccaagccagccttttccctcccagcagggacccctgcccctgggcactgctctggctgacgcaacccctgtccagaatgcagggccgtgtccccctgccctcctggctgcaccccttgaccttgccctcaactgagaggagggctgtctgccaggccatggggaccagtcagagctcccacaggaggcggcttggccagggacaggctggagggagctgggctggtcttcccactcctccccttgcctgagcagccctggctgcccctgtgcccgctggcagacgcttctgggctgtggcccctgtggctggagctaaaattagaccctgcatcccatgtggatcatcggcgtcagctgaggtcacagcctgggtgcagccggtgtccccctgccttggagggccaggagggctcggggtcctgatccttatccactctgccgctgcaccagctcaggaagtgcagcccctcttccccgcagcccagcagctgccttgcaccatctggcttggagctatcacagtgcagaggccagggccgctgtgccaagccccccaaaccctatggtatctcctcccatccctctccagtcggcaactggcccatcctgatctctttccttagcagcagcctggctcctcccctcccagccctgattcgctcctggctgggaggcagggtctccatttaaccccttccaaaccagtttcctcaattgctaatccaaccagcaagtactgcaactcacagctggccatgagttatcacagcctctgtctctcagtcctccagccaccctccaaggcagagatttacctgtcatttcttacagatgaggaaagctcagagaggggatgaactcttcctaaggtgacccagctaagaagtggcagggtggggatttcaatcctgagctcctggtcgttggtcaccccagctgtgggccctgtggctggagaaaaactagaccctgcacctgctgtgggccatcagagtcagtggaggtcagagcctgagtgtgaggaatctctgaatcggcacatgagaaggtcaacaggaagaaagaagatacttggactccaggaaatgatcaccgtggaaacccatctgctgcttcttgtctacggctgtttgttcctccagctctgggctgcctgagtgtctcacagcagaattagcaagtgcggaggctgaaggtttctagaggctctgaggtcacagctctcgcttgagtgcacataactataagccatgatgaggaaactgaggcttagagaggttaaatgacatgaccaaagtgtcaacagctaacaggcaggaaagccaggactcaaatccggcagcctgtttccagagtccacgcttggaaccacggagctgtatttcttaacaaagagtaagcatacaataaatactagcatattgttgttttatcagagactatgtttcacccaccaattttctttctctttttttttaaaaatagtatcttgac

SEQ ID NO: 2238 - DNA, 3318 bp, Homo sapiens
gttccctgccactgaatggaggctctccaggatggcggggccaccggggccctggaaccctaaatgactgcagggagcagagctctgcctccccatcaacccacttcagattcggctatgcctgaaacgcagatgcaagggctggagctctgcagacactgggaccagaggtgaccttgaggatggaagccatgtgttgggaaaatggaacagaaagatgagtggaacttggactatgaatgtctcttgccatacttggactgtctgcctccagacatcctctaaaagaagatttttaaaataacaatatacctttgtcccatttgagccacaactgttgagtttactgatctatactgccaaacctaattccaccaatatacctcacgacccagcaattacgctcttcagaaactgccctagagatgctcacacatgcacacagaggcacaaagatgttcagtgttgcttggactagcaaagacaaacagacaaacgacaatatgtatcttctctatggccacatatatatgaatgtaaataagtaggaaaaggcctggaaggaagcacagcaaattgatgatggtgggtacggctggggatggcggggagtcacaggaaaccatattcttcccctcaggaagatatgttcttattacctgtgaagttaaaacttacacgtcaagttaaaaagataataaaatccaaagggagaataaaagtaaacttgatactgcagaaacgtcacaggcatgacctcatccaggctatcaaggtcgacatcaacagtgatacagtatgttgacggaatgtacccaagatgctctgaaactggaactttctctctgcggtcctcctcccaaaacccatcaccccagtctaatcatgagaaaagcaccagaccaatcccagtagagggtcatcctacaaaatacctgaccagtgcttctcaaaagtgtcactgtcatcaaaatgaaggagagatgagagactgtcacagccaaaaggtgcctaaggagaccggaagaccaatgcgacacctgggaaactgtgacctgccacgacgaaggggaccgtgcagacatgactgcatcaaggctctcagatggggagagcgtcctggaatatctaggtgggtccatgcagatatggttacatcaaggttctgagatgggaagagtatcctggaatacctaggtaggccccagagaatcacaaaagtccttaaagagagaagcgggaagtcctagccagagcaatcaggcaagagaaagaaaaacgaaaaaacaaaaacaaattttaaaaccctaaaaaaagaaaaattaatttttaaaaagaggggctggggcgtggtggctcacgcctgtaatcccagcactttgggaggccgaggcaggtggatcacaaggtcaggagattgagaccatcctgggcaacatggtgaaaccccatctctactaaaaatataaaaattggccggacgtggtggcacatgcctgtaatcccagctactcgggaggctgaggcaggagaatcacttgaaccagggagtcagaggttgcagtgagcggagatcatgccattgcactccagcctggcgacagagtgagactccgtctcaaaaaaaaaaaaaagagggaagcaggaggttagaggcagagagaaattggacagtgctacactgctggctttaaagagggagaggccaagtgcagtggttcacgcctgtaatcccagcactttgggaggctgaggtgggaggatcacttgcaccctggagttcaagaccagcctgggcaacatagtgagacccctgtctctacaaaaaaaacacaaaaattagcagggtatggtggcacatgcctgtagtcccagctactcaggaggctcaggtgggaggatcgcctaagcccaggaggccaaggctgcagtgaactatagatcatgccactgtactccagtctagatagcagagcgagactgtgtctcaacaacaacaacaacaacaacaaaacagggagggctaggattaaggtcatgagctaaggaaagtaggcagcttctagaagctgtaaacggcaaggcacaggttctcccctggagcctctggaaggaacaaggcctgcagataccttgatcttagccttgttgtgttcctttcagacttcagactcccaacactgcaagatagtttttaaaagtgagccatgacatttgtggcaaaattgtgacagcagcaaaaggaaatgaatacagcaactcacactcagtatggagcagcagggtgggctggctcaccacttgccccacacagacccccccacaacaggtgtctagcagaaaaggcagtgtggcgaggtggttaatagtgcacactcaagcgtcgctgcctggatttgaatcccacctgggccgctgtgcaggcacgtgctcacgtggcaggcccgagcccttccaccccacacaggctgctggcaatgctggcccggagctggcgtctgggagcctggattcgggaggcctcccattgctccctaactgacaaggatggctcactgtgcctgagcaatctgtacaagtaatgtggtttatactgaccaccagcttgccttctaagggtctggaatttcagtacctgccaggcagagggtggccacatgaccagcccctagtaaaaaccctgggcactcagtctctctagcgggcttccctgccagatgacatgtcacgtgggttgtcacaactccttgcagcaagaattgggtgactcccctgggagagggctctggaaactggcacctgctttcctctggacttggccccgtgtggcttttccctttgctgatttgctttgaatccttttaccgtaataaatcatagccacgtgtacaaccatatgcttcgtcctgaggcttcccagcaaatcgtcgagcctgcggtggccttgggacccctgacacagccacttacgagctctgtgaccttgggcgtgctactgagcctgtgtcccttctgtataagcgagatattataacgtaactcttcctaggactctagggaggattcaatgcagtaatacatgtaaagtgcttcgaaaattacccggcatataaaagtgcttggcacatttattattgttgttgttataattgttaaatcccagcaaagaaatggacacacaaatattctgtcactttgccatgcacagcagtagggaggggagatggaagtcactgaggggcggtgacgaaagtcagcacaaaaggctcaaataccacaatcagagaccgggcgcagtggctcacgcctgtaatccca

SEQ ID NO: 2239 - DNA, 9096 bp, Homo sapiens
gggtagaggttggaggcagggaggcctggtagaaggctcttgtaaaagcccaggtgagacgttaagacctgaactgtgagatggtggttgatgagatagagaggagggcatcactttgatttcatagtagagtttcctggcagccaaggcaaaaaggagagcataatgaattacatactgttgagcagagaatggaaggaagcatgccagtttttcaagacattcccatacctgcctctcagtacttaatgcatgaaagaagaaacattacagcatctagcacagaggagatgtcagtcgatactttgaagaatgtggatttgtaatggactacgtcttcaatgacagttttttacagcaagtgaagaaataatctttatatagctgtttcttatttgtgctctttggttaaatcccagggcataatatttcctcttacctggtggaaagtgattcttcctaggacaagcgaatgtggtccgcacatgcaactttgagggttctgacttgaggaaacctctttgaggaagagaacttggttttcctaaaggacaaaatgagtagcctgtcccccagcctgtccttcttgaatatttcttcttgatccagatgcttgatttgggctggccacttaagattacattcttctgagtgcttaggaccctggtaacatctgtggctggttaagggcatctgtccccacaacatatgccagaaagttcttactgttgtccagtggaatcttttctggttggcatacaaaggaatagagtttgtatctgtctgaggaagacccctgattgctttttttttcctgtttgccactgaagtgattgggccctaatggtctgaaaatagaaataaataaagttaatccatgccactaaattatcgaagagaacaaggaagtgtgaaaaatgctgtgtcctcacaccatcttctccagagagggtgactctagagcagaggggggaattagggcttggccgagtctatggcagacgaggcaggattgagccgtaagagctgtgggtgtcaattacccactgaaaagtgatggtgaggagtcagtaacagtagttttgttgatatttgtgttcttacccaaacatctagattacttatataacagatggctgctgccttccgtcagcgcagttggcgtatcaaaaataacacttgagttagaaattgtgcttgcctttactttttgttcccaggattagttgttgctgtgtgtatgctaagaggctgttatgaggacagctggtcaagtaaataaggaaatatttaggtaggaaagagacattcagtcatggggcttattaattttctgattcttgatggacttcctgactatagtatcccaaatggttgaagaacagttaagaacatacgtgcagtgtatttccaagtagctttctatttgaaaggccacttggtcctcctaagtgtggatggtcgttgtcatgtggcctttgatgtgacaatgacctgtctgtgctcacttggggaagggccgcctcaccagagccctccttgtgcaggtgttcatgcgcgccctcttccactacaaccctcgggaggaccgggccatcccttgccaggaggcgggcctgcccttccagcgcaggcaggtcctggaggtggtgagccaggacgaccccacgtggtggcaggccaagcgagtcggggacaccaaccttcgagccggcctcatcccctccaaggggttccaggagaggtgggtctggggtatgttgtgaagggctggttccagagtggcagaggcacaggtacatggcagacccccaagtctctgccctcacagccagaggggcctgctgagcattgttcccccaaggtaagtaccagttgcacttgtgtttggtcttttcccataactagtgatgatggttatttgagatttaaaggaatctatggaaatttatgttattaagttaatgtgtgtgtgtgtgtgtgtgtgtgtgtgtgtgtgtattttttttttttttgagacagagtctccctctgtcacccaggctggagtgcagtggcgaatcttagctcactgcaacctccacctcccgggttcaagcaattctcccgcctcagcctcctgagtagctgagattacaggcgtgcaccaccatgcctggctaatttttgtatttttagtagagacagggtttggccaggctggtctcaaactcctggcctcaagtgatccacctgccttgacctcccaaagtgctaggattacaggcatgagccactggatccagcctaagttaatgtatattttataatgcatgctcagagaatgctgataaacaaaatataaaaatacagaagagaggctgggcatggtgatgactcacgcctgtaatcccagcactttgggaagccgaggcagaaggttcccttgggcccaggagttcaagaccagcctaggcaacatagtaagaccttgtctctacaaaaaataaaaaattagctgggcatggttgcacacacctgtagtcccagctactcgggaggctggggtgggaggatcagttgagcccaaaaaggtcaaggcttcagtgagctgttatcacaccactgcactccagcctgagtaagagtgagaccctgactcaaaaaacaaaacaaaacaaaacaaaaaaacagaaaaaaactgaagaggaggactatgaaaggaaattccccacgtctcacccttatctaaactgcatagtttgtttccttactgtgctttttatgtgagtgttgcatacagaatttggggtcttgctttttttttttttaaacatttttggcgtgagtattttccatattatagcatcgtttttgtagtgtgattttagtggctgtatactaactcatcaggagctgtgccattcattcctaggcggcaggtatttaggatgaattgagctggccttgtgctggcatcttgcgggctgctgtgaatccagggtttctgccctggaggagcttatagttcagtggaaaagccagacgctcttcaaacacacagtttatataaacgtgatgggtgcaagggaggaggacatggtgctgtgtgagttcatattaggaggctgcgccctcatccaggaatgcagggaaggcttctcagaggaactagctaagtgatttcactgctttcctgtggctgcacttcgattaggttgttcccaattcttcacttttataaggctgcagtacttacttactttgcacatagactgttcctcatgtttcaaattatttctttagacttccaggaaggtcagtcttgggtcagagggtggcagttgtgacttccactgtgggttgtagccctcacatcttttggtgtgtggactgtggtaaggacaggaccttggggttcacccatttcagtggccctcaaggtgtggccccctggctgggggcttcagcgtcacctggggacttgttagaaatgcagatccatgggtcctgcccagaaactcacattctaacaaatgttccaggcgattctgagatgccgaagtctgagaacgaagctctgtctcctcgggaaccccagacccatctccattttagggttcacaggtcttggcaacatcttaccagaggatgtgggggacagctcttcagctgcattttttttttttttttgagacatggtttcactcttgcccaggctggagtgtagtggtgctatctcagctcactgcaacctccacctcccgggttcaagtgattctcctggattctcctgcctcagcctcccgagtagctgggattacagacgtgcaccaccatgcccagctactttttgtattttttagtagagacggggtttcaccgtgttggccaggctggtctcgaactcctgacctcaagtgatcctcccgcctcggcctcctaaagtactgggattacaggtgtgagccaccacgcccggcccttcagctgcatttaaatgtggaaatctagtgacctctgagagccccacctctccactcatggccacattggacagtctgcccgggctgagccttccgctgaggggagggtgttaaattagggtcacttctgtcctcggcctctcctgggagtcattctgctatttctcagctccctcagagatggggaggctggggagtagagaaggggctgcctctccttagaaattggccataggagagtaatgaccagctgaggattgtacaccgggctggatcctgtgtggccatcttgagctggatgagctatttctggagcaagagactcagtttcttcctcctggtgagccagtgagccctgtgaaagtgttcccttcgttggaacttagtgctaagcaggaggccctcagagtgtccagtgtgtgcccacctgtgggatccaggccttggcttcccaagttttccagaaggttcctttcaagtggttatctggcccagctcacgggcccgcccatccccttgtgtccctgcagacgactaagctaccggagagccgcgggcaccctgccgagcccccagagcctcaggaagcccccctagacctgtgactgtgagggctacctcaaagggcactatgtgggtaaggaaattgaggctcagagagatgaagggacttgtccaaggtcagtcacatgccaagtaaaacagtgaccttaagccctagtttgtgaatgcaggggtcaccctttcatcttattattgtatttcctgaacaacctcttccagtagcaggaggaggttgggagaagtcagtgggactcagtcccatctccaggtctggccaggtgggaaaagtctctactgggagatcctgggacaactgggacaaatgccatggtgtccctctgcccctcctcccaagctggtcttcggaggagcttccggctgggctgtagggagagactgggtggctcgcaggaaggaaagatgtcctccggagctgagtctccggagctgctgacttacgaagaggtggccaggtaccaacaccagcccggagagcggccccgcctggtggttctgatcgggtctctgggagcccgactgcacgagctgaagcaaaaggtggtggctgagaacccacagcactttggcgtcgctgttccacgtaagagggcccatgtgggagtgtgtgtttgtctgcacacacacaaatattccatggagacttaactccccagatccatccaaatccttactttgggtttaaaggatcaccaggcactgcctgctattggcaaattgtgggacaaaggcatgatgggaagaaatccactcccagtggtcctctgagaccctctgaggcagaagttggaggaccacttgcttggttcctgcctggggtgggagatgagtccagagcacattgtaggcaaagtggcagcctcaacctgacaccacggggcccccacagtagggggcattcctcctcatcacagtgaattttgactcctgtggccgctgccctctgcttggatgagagggcaggtcagagaagccacagagccctgtgagtggtatttctcggcactcccttatagccagattccagtttgtcagggtagctgggtacattcctgggtgatgcctcccctgccaattcctggggcttactgctgccaggggcaccctgggatgtcaagctccagtgggcagaggatcctggttctgaatgtgataaggaggatgaggaggaggagaatgaaggtgccaggtaatgcaccaagagcttttatgtgtagtgccctgcgtcagccctcccagtacccctgagaagagagattgttatcatcttgtgtggcagaggaagacagtgagggtcagagaggttaagtaacttgtccaatgtcacacagttggtaagtggtggagccaggattcatacccaggcagcctgccccagtcatgttcttaacgaggatgcacaatggcctctcacctgccgcctcccacttcgtgcccttggctgccccttttctttctgggactcactctcagtccccctggcctcagagggatgcagtgtgaatgcctggtggctactgagaggggtgctgtgggggccctaatggggcctcctcagagtgttctggggcagagcaaccatgaagccttgctttgatcacaccgctctccctgggcccctgggcccagcgtctagtctgtgggttgtcagagctgtcttccacagcccaatctgaagtggcagggatgtgggggaggtggtggccctggggaggccatcctggcagcacacctgtgatggacctggagggcttcagggagccacggccttccaagtttcaggtggactgaaacaggacatgcagaggttgctcacacactgatcgttcagaaccccttggatccaccccctggagaagaggtacctggatggtcaggcccacctgcttctaggcactccacagataggagactttcctcctttgttttagaaactgggggagtcagggaagccttcccagaggcagtgacttttatgctgggttctgaagagtaaataggagttttccaggcagaagagaaaggaatagttctctttacagaggaaacaacatgtgcaaagggacggagcagtgttggggaccggggagattagtgtggatggtgtgctggaaaatggagctgagaggttgggcagatcacgcaggtctcagatactcagctagggtgtttagaatgtaacccatagataaatacaagtttttaagcagggggatgacatggttggaaaagtgaccctagcacctctaccggaggttggactaagatgccacagaaagaacacagggcataccctgggtggttcccatgggccagaagacacagtgcctcaagatcccattttatcttttggaaaatactgtgtgtgtggctttgtgtgtgcccttgttctgcagaagacctgattttcctcagaagtgtgcatcccaattctgttatggaaatcaatgagaaaacaccatgtgtttcaacatttttgtttgagagccagccttgctgaaacacatccgatctatatagggacggtctgtcttcctgtctcctttttctggagatgagaactaattgactaaagaattaaaagcatacatcagggtcaagtgtatgtgtggctcctttgctctcaaaaaataaaaaacaatgaagaattaaaagttaggactaggggtcccttaagtgattctttaaaagccacagcatatgctgggcgcggtggctcatgtctgtaatcccagcactttgggaggctgaggcgggtggatcacctgaggtcgggagttcgagaccagcctgaccaacatggagaaaccccatctctactaaaaatacaaaattagccgggtgtggtggtacatgcctgtaattccagctactcgggaggctgaggcaggagaatcgcttgaaccgagaaggcagaggttgcagtgagccgaaatcatgccattgcgctgtagcctggggaacgagcaaaactccgtctcaaaacaaaaaacaaaacaaaacaaacaaaaaaaaaacacagcatcagggagtcagttagcagagtggttaagggtataagctgggcatttggcagagagaccgattctggctgtgctctctactggttgtgggtcactgtgcacagtgctgaacctctccgtgcctcagttttctcagctgcaaaaggaaaagcctccttttgcctacatcaaagagttgttgtgtgaatcagtgatacgcctgcctggaaaggcacagtgcctgatacagggacatgcaatgaggtggaagtgcctggtttagacacagcagcagtgaactcccaaatgagtgcctaagcctgctgctgtccctgcgtgctgtgatgtgacatctctttgcccagctttccttctttctttaaaagataccaccaggccccgaaagagccatgagaaggaaggagtggaatatcactttgtgtctaagcaagcatttgaggccgacttacatcacaacaagttcctggaacatggtgaatataaggaaaatctgtatggaaccagcctggaggccattcaggctgttatggccaaaaacaaagtttgtttggtggatgtggagccagaagcactgaaacaactgaggacctcagaatttaaaccctatattatatttgtaaagcctgcaattcaggaaaaaagaaaaacgccacctatgtccccagcttgtgaggacacagcagccccatttgtaagtttaaagttgattgtttcttttctgaaggcctaagggaggctgttacaggaacgcttctagctgcataagggtgcttgcagctgaagagggatgcgggacacaccttctacatgtgattgtctttccattttgcctattgaaaaacttaagagaagatgattacatggccagaaggctcaaggtgaacagctggaagtgcctcccaaaccaggcaggtggctttgcctgggctcacgcccctccactccctcacataagcgccctcccgcaaaatgtgacacctgtcagggacctcatctgagtgtgacagactgtactcatcaaactatactcctaggccaaatccaagtattttaaattgaaaccccaactaacaaggtcattatcactgctatcaaaccagtttgaatcatcagtgaatgaagggatttctaaaactagtggatgagatcgtctgatgtgtcctaaatgaacttctgtttcactgtcatagattctttgttcagcccagtctatgtcaggatggcgagaccctcacccaaaacctaaatatttgacagagttcttccaggaggtgtgggcttggtgactcatcttttttggttcttaacagggtcagttagcagaatgagttggaagttgttgtgggtggtgggggcagtcagaagcaactcagtcccagaatagactttacttgctgtcctatatagctggtttcatctgaaggaggccttctcggatccttccccttggtcaggaagctcccgctgagtcaagattttgatgcaatcctagttcatactaattctcagttttaactgtccacgtt

SEQ ID NO: 2240 - DNA, 7932 bp, Homo sapiens
ggaaaaacatcgcctcttgataggttacttgatattgctatagtattgaggtctccttctagatcatggttcagtatagcaggtcatcattttttctgactggtgaagagaaagtctagattttcaagtaccttggaagagaatagatatgctaccacctgtggtagtcctgttatttgatcagggcttagctcttttcaaaggaactttccttaagaattctgtctcttaataccacttctcttgatgactggttcaccttccatgataccgttacatcagaggagagcctggaagaattggggtggattttgtgtgcatgtgtgtgtacgtgagcagtgcatgattcttattggcttgtttcctcataattcagctaaaggaaagcgtatggtggcgttgatctaactggtgtttattatctaccttatatttccaagaaatcagaatattctcttgagttccatttaccaaagtaagttttaaatcatcctaatatagagccaaaacatagttacttttcaaaattgcaattccataaattttagctttattttccaagatgagagaaacaatagaggaaaattctcactcacaacctaactcagttatcaacagaacattcaaggctggatctcctaatcaacattgaaaaagtatcccctacattaggaaaatactctggttctgtctttacttcatactgggttattcacagattggaaaggtatataagtatggcgattgaatctattcccttccccacatatccctccctttgtagtgaggtcaagcttggctctttcactgtgttcatgtcagcattttgtgttagaaatttacgatgggtgtgggggcattacagtgcattcaacatttttttcagtgccttctatttggaaatatggtgacatgtgcagccagcactgagtaaaagttttaatgggaggggaaactagtataaggataggaacagagcaacaggaggtgtagccgtcagtccttcaagacacatttgctacagacagcactttttctgtctcaggcagacaacagttaatcttaagttagaagaagaaagaagcagagctgatgcaaaaaaatatatatatatggagaaagttaagctgaatgttgtagagctaacactcaataagtatttggaatgttagcagtacaacctttattagcagctacaaaaatcagactacatagttttttgataacaagatgaccaattcaaggtgatacagaggcttgtgcttggagaaggatgtcttgtagactattgaccaatagggcagaatttccctttgtacattcatccctgttcaggtctaacttgcatccttttaagcacggacacctgacccatcacacccgcaaaagtggataagatcaatctcaagcagtgaacttacactgaccaagcacacaggaaatgcatataaaagtagattcctcaaggccacatctgaccagagtattcattatttgttacagaagactcgggaaagcattgaatggctatcttataattgttttttcctccccatctgaagctgcagacaccatttgaaaagtggctacatcccagcctatgattgttctcaggtggcatttttgtttttattttctaaatcttgatgggtacctcactgttattcccacatatcactcataatatttatattatatactggtaattgaatgtgggttccatattctacattcatttgctagacaaataattgagattctactgtatgccaagcactggagtaatctgttaattggttaattcatttattagtttctttaagacatactgtatttactatgtattggggactatgttagaagcttgaaatatcacagtgaacaagttagaccatggctactttcaaagtgtctatagaagaattgagaaatcaagtgaacaatcacaatacttctgataagagataacacagaggaggtaatagggttttatttttaaagaacaatatataaatatagtggctttggtcttgtaaaatttagtggcaatgtaattgtataaaacaagggaacccaagtggataaggtaggaaatcaaaatattagctagtagtaaaataattaaatgacattctctggtctggaaattttgccaagtcttttcaaataaacgaagaaaacaacaaaaaaaacttactttggtttgtttcctaacaagtcaaaaggaaaaccacaatccaacaacaatgcaagcaacagaaaatctttaaataatgacgctgaaattatcttataactttaataagtaaaagtaaaaatatggaaataaacagaagtttggcagaaagaacagatacaaaaatttcaaaactcaggagaaaaagtcgagatcttcatgaaacaaagctttaaaagagaaaagttaatgttagaaaaccacacaaaagtctaaaagcttagaatgttcagatccctaaagaaataaggagagcatcatatagattttatggggcattttattttcacaatagttgatactgaaagcaattttttttccaaagagaatgtgccacataacaactagtaaaatagcaaaaacaacaggcaaaattggataaaatactccactttctagcagtccaggagttggccctgtaatctgtcttctagtttttaacttagcccatccctgactgtctcatataacaattggtttgtagatgatcccatcattgagtagtttagcgtctctgaatcataggccaggtacagcattcaaacttacctaaaaacatcactcttttggttcttaaaaaatattttgtgaaggagatgccacaagctttcccttagaagccctgtggaaatcatctaactggtgggctattattagacacattatcaaagtttctgcttttttacaagtctcttcttaatacagtactagcacatgatgccaacagcccatgttattatcatgtcattctagtgctttaactaataggtccctggaaggagaagaattcgtttattcctttgggattatatatagattttctttcttaattttatctacagtgtaaacttatacccagatcatgtcttttattttgtattttatgtagcaccctctttgcctttagaaaaggtttagaagagacaatgaggaaagatagtttaagggtggtagaaataagttgaatttgagatttgagatggatgtgaaagggtttggagaggtagttgctgaggaaggggcaaagctgggactttgcctttggagcaggcttcttggacatgcagaacagtatctttgtcagagaacattctggaccaggaaaactgggaacattaatctagattagtacaggactttgaacatagctgtgactacctgacttgtaaattggcatatctgtatttttctgctgtcctgagttagttaacttcgtattttaaaatactcatctgaatatatctgctacttttgcccacccagaacccattaccttttcttcagtgcagcactgttccctccccaccttctttggaaaacgatgctgctccaacctttagggcttttgttttggaagggcagaccaccaacctagatcaagatgtagctgtcgtccaggcctacccaatgaccttattcaatttccatacctacaaagcatggttgagaagaggaaaaaaacccacacttttcagaggcaatcctaggtttgaacttttgaaaaggaggagctctttccactgtggtagttgaaggtagagggctgcctggagctgccagtagccatcttgccactctctgggataagcctgaccgaataaagtccacacagaggaaagcagaactgagagaaagagagggaccaagtccctactgatctcatttgacacactcgatctactgccttctgaacatttcttgagcctatagattactctacctcccttatttcccataagtcaccatgacttgcctttttctgttacaaccaaatcagtcctaggaaataaaatgtttgttttgcttccacacccacagtggggcttgggagcatctgtatttcaaagctgagaattctccacagaatccagttcccttctatcttgttttaccttctgaggagaggaccatgaaggcagcgtcaggcacacgacacaaatggcagctgtgtttcatctcttctgtgcagatagcttaataataaatacctccttccctttttagggaacaaaatagttttattttacatagaaatttcttctgtagtgagtagcagtgaaacgctaatatttattaaagagaaattgccactgataccctttggtgtagcccaagaggatgtaagaaaaaaaggaacaaatggcacctacactctataagctgcctaagtggaatcttaatgtagaatttgttgctttgtagtcttctttttttttttatctagcaagactagtgttacagaggatcacggacattagtcacttgttcttgataacctctgaagagttggataaaagaaagaaactgcccccagtgaaaagggatgatctgcaatatctgaagaattatttctgtggaagacaatgttattacaagacactgggatattatgactattttggtagcttaaagaaaaataaattcataatactagatattaattatattcgatgatatacataatttataatactaggatagaaaaaatctttattaattttcaagtagttacatcattctctcctcacttcttagcatgaaggccatttatgtactggcaggtaaatgtcaggttgagaaggctctaagtcatttcacagtagggaaagttggtttttcaacttggaagcaaattttattttattatttttagaaaattatatatatatataacttaaaatggaaaattgcacaaatcataagtggacagctccgtacattctcaccaagagaacatatcaatgtaatgaacacccaaattaagaaacactacatgattagctccccaatatcctccattcggctactgtctagccaattccctaccaagggcaactgctacactgacttctaacactgtaaagtagtcactggcagagattttgaaaggcagtatgtcctgctgaaatgtgagggaaattccactgatgattttaaacctaaaacgatatgaatatctttagcaacaaaacctactttcctccagaccacataagaacccgcccatgcctatgtcctatttcctctggagcatttttaggttaagttttagatcttgtagtctggtgatatagtacattttgacataacatggagtaaggatgccatgaggatgcccagctcatgtagggggtgcttggctggtctgtgatagtcactgggagaaaggtttaagggaagggctggcatgtcatttccttctccctcttatcctgctccataatgatcaccactgtttattctttaaataagtgaaaagggaaagaaataaatgtgtcatttaaagggttccaatttaagtctcctgctttattcttaagccctgcttaatctttcttgattctaccctaaggagtacaaatctcttttggctgatccactttcctttgaggaaccaaaagtgaacacgagcaaacagattaaaagatagcccaagagcactggtcaacatgtgccctgtgtggttggatcaagtagagggaaaccatgatttgctttaaaagaataacggtcattgcaatgtcctgcttctgttctggggttcagaatgtgatattctgcatccagttaaaggaatctcttggccatttaccacagctaatagtaattaacagaacctactgaaaatgcagatgcaccctcttcaaactagtaagtgttactcatcatgctgggatattgagagagatttgactttgagaagcatggagaaatgatttggtttaaaactagaaactctggattatacagatactcatggcactaagcaaattcagaattaaaagaatgtgccttcagagagacaaatgccacaggatctctctatatgtgaaatccagaaaagccaaactcatagaagtagagattagaatggtggttaccagaaactgagggtggtgatggtggatggagaaaggggagatgttggttaatgggtacaaagtttcagttaggcagtaggcataagttctggtgatctcttccatagcacagtgactgtagttaataataatgtattgtatatttcaaaattgctaaaagagaagattttaaatgatcctaccacaagaaatggtaaatatttgaggtgatagatatgctaattagcctatcagatcattctgtgatatatacatgtattgaaacaaccttatacctcacaagtagatgcagttattatgtcagttaaaaataaaactaaaaaaaatttttaaaagaatgtgccttaaaaaatattttgttcttttcattaaataataatcttagtaacactgacagtgagaatctataaatttagcaatttccaaagcaatcattttaattggatttaaaagggatattatagtggataaaaccctcagaatattttatgtagtagtgccatggtttattaaacagaattcatttaaagtacacatgcaacacatcccgatagtttcttacaaaccttgaaataagcaattattgagaagagttgagagggtgattttctgagtttaacgaagaaggccttacatctagaagcttgcagtcttcttgaagatagagattctgagttggttttggctcagtgtcacccttgcctgaaatagtatgtggaaagccacaataatgggaatgagcatagtgtatctgggggaggagtagacaggtcagtccagctgaatgccgtgtatgtatgtttgtgtttgtgtgtttatacaccaagtgtaaaataaaataaagtacaagtcataaaattggacatgttacggatagttttgtattgtcataaacacatttacactcaataaatgtggaacgaataaatcaaaggacaaaaagctttgaatacctaatggaacctgagggtgttcatcctgaaggtaactagaagatataagttatttctctctttgtggccagaaaggctagaattccttttatagacagagcaatgttactagttttcagacagatgggaattgaaacaacttttatctttaaagacaaaatcctacccaacattgtacatatttaaatttatgtgaagttgcccacaggcagtggaatgagttaatcaaatgataaagaaatgtcaaaacatcttatacttgtatataaacctggtagttcagtatcctataaagtacaaccaatccatctgtccgaaagcctaataccactatttttggtgacactaaatgctttaaattttgtcagcaagatttgaggcaatgtcaaatgctagagtgatcaatatcaaatactagagtgataaaaccccaatattattatatataattatatgtgtgtatgtatataaatatatgccaaaatgctatacaaatctatacacactttatataagtactatatgcacacatacacacacataattattaactaagtttaaaaaattccacgtgatgagatttttttttaactttaaaaagtattagctcattagacttcacttttttttttttttttttttttgagactgggtcttgctgtgtcgcccaggctggagtgcagtggcgtgatctcggctcactgtagtctctgcctcctaggttcaagaaattctcctgcctcagcctcctgagtagtgaggattacaggctaatttttgtatttttagtagacacagggtttcaccatgttggccaggctggtctcgaacccctgacctcaagtgatccgcccacttcggc

SEQ ID NO: 2241 - DNA, 882 bp, Homo sapiens
ggaaattcccctcctggtcctcgccattggaaaatcgcttgagggtgttagccgggacttggagctgctgccagaccgcgtcgtctccttactcccctgaaggaagagaagaaggatcatcaatggcaagcggcagctgcaacaaaacaacactatgagctggctgcatgctcaggaaagaatgcccgcctcctccgtttggtttccagtgctctaaacattcagagaaacttctctagtattgaatgacagaaatgagccctgagagtagagtcttagaagacttgattttgttaagacaacaatattccccaaagcaatatgcagattcaatgcaatccctatcaaagtccccaaatcccacaaattccgttttgctgaagtagaaaagctgactctgaaatgtacatagaattgcaagggatcccaaatagtcaaaacaatcttgcaaaaagaagaacaaggtgttaagactcacatttgccaatttcaaaacttactacaaagctacagtaatcaaaatcatgtactaccaacataaggatagtcatgcatatagatcaatggaatagaattgacaatccagaaataaacgtatgcaactatggtcaattgattttcaacaagggtgccaagaccattcaatgggggaaaagaagggtttcttcaacaaatggtgccaggccaactgattatccacatgcaaaagaacaaagttagacgttaccacacatcatgtacaaaaattaacacaaaatgaataaaattctaaatataagagctaaagccataaaagtctaagaaaagaacagctttataaccttgggtttggcaacagtttcttagaccaaaaacaaaaggaacaaatgaaaaataagttgg

SEQ ID NO: 2242 - DNA, 3971 bp, Homo sapiens
cctcacctggccagaaagataactttgaatgcatctgtgtatctacacatttttatatatacaggggcgctgcatcaacttcaccagggtcaagaacaaccagccagccaagtacccactcaacaacgcctaccacacctcctcgccgcctcctgcccccatctacactcccccacctcctgcgccccactgccctcccccgccccccagcgcccctacccctcccatcccgtccccaccttccacccttccccctcctccccaggctccacctcccaacagggcacctcctccctcccgccctcctccaaggccttctgtctagagcccaaagttcctgctctgggctctctcagaaacttcaggagatgttagaacaagtctttccagttagagaagaggagtggtgataaagcccactgaccttcacacattctaaaaattggttggcaatgccagtataccaacaatcatgatcagctgaaagaaacagatattttaaattgccagaaaacaaatgatgaggcaactacagtcagatttatagccagccatctatcacctctagaaggttccagagacagtgaaactgcaagatgctctcaacaggattatgtctcatggagaccagtaagaaaatcatttatctgaaggtgaaatgcagagttggataagaaatacattgctgggtttctaaaatgctgccttcctgcctctactccacctccatccctggactttggacccttggcctaggagcctaaggaccttcacccctgtgcaccacccaagaaagaggaaaactttgcctacaactttggaaatgctggggtccctggtgtggtaagaaactcaacatcagacgggtatgcagaaggatgttcttctgggatttgcaggtacataaaaaatgtatggcatcttttccttgcaaattcttccagtttccaagtgagaaggggagcaggtgtttactgatggaaaaggtatgttgctatgttgatgtgtaagtgaaatcagttgtgtgcaatagacaggggcgtattcatgggagcatcagccagtttctaaaacccacaggccatcagcagctagaggtggctggctttggccagacatggaccctaaatcaacagacaatggcattgtcgaagagcaacctgttaatgaatcatgttaaaaatcaaggtttggcttcagtttaaatcacttgaggtatgaagtttatcctgttttccagagataaacataagttgatcttcccaaaataccatcattaggacctatcacacaatatcactagttttttttgtttgtttgttttttgttttttttcttggtaaagccatgcaccacagacttctgggcagagctgagagacaatggtcctgacataataaggatctttgattaacccccataaggcatgtgtgtgtatacaaatatacttctctttggcttttcgacatagaacctcagctgttaaccaaggggaaatacatcagatctgcaacacagaaatgctctgcctgaaatttccaccatgcctaggactcaccccatttatccaggtctttctggatctgtttaatcaataagccctataatcacttgctaaacactgggcttcatcacccagggataaaaacagagatcattgtcttggacctcctgcatcagcctattcaaaattatctctctctctagctttccacaaatcctaaaattcctgtcccaagccacccaaattctcagatcttttctggaacaaggcagaatataaaataaatatacatttagtggcttgggctatggtctccaaagatccttcaaaaatacatcaagccagcttcattcactcactttacttagaacagagatataagggcctgggatgcatttattttatcaataccaatttttgtggccatggcagacattgctaatcaatcacagcactatttcctattaagcccactgatttcttcacaatccttctcaaattacaattccaaagagccgccactcaacagtcagatgaacccaacagtcagatgagagaaatgaaccctacttgctatctctatcttagaaagcaaaaacaaacaggagtttccagggagaatgggaaagccagggggcataaaaggtacagtcaggggaaaatagatctaggcagagtgccttagtcagggaccacgggcgctgaatctgcagtgccaacaccaaactgacacatctccaggtgtacctccaaccctagccttctcccacagctgcctacaacagagtctcccagccttctcagagagctaaaaccagaaatttccagactcatgaaagcaaccccccagcctctccccaaccctgccgcattgtctaatttttagaacactaggcttcttctttcatgtagttcctcataagcaggggccagaatatctcagccacctgcagtgacattgctggacccctgaaaaccattccataggagaatgggttccccaggctcacagtgtagagacattgagcccatcacaactgttttgactgctggcagtctaaaacagtccacccaccccatggcactgccgcgtgattcccgcggccattcagaagttcaagccgagatgctgacgttgctgagcaacgagatggtgagcatcagtgcaaatgcaccattcagcacatcagtcatatgcccagtgcagttacaagatgttgtttcggcaaagcattttgatggaatagggaactgcaaatgtatgatgattttgaaaaggctcagcaggatttgttcttaaaccgactcagtgtgtcatccccggttatttagaattacagttaagaaggagaaacttctataagactgtatgaacaaggtgatatcttcatagtgggctattacaggcaggaaaatgttttaactggtttacaaaatccatcaatacttgtgtcattccctgtaaaaggcaggagacatgtgattatgatcaggaaactgcacaaaattattgttttcagcccccgtgttattgtccttttgaactgtttttttttttattaaagccaaatttgtgttgtatatattcgtattccatgtgttagatggaagcatttcctatccagtgtgaataaaaagaacagttgtagtaaattattataaagccgatgatatttcatggcaggttattctaccaagctgtgcttgttggtttttcccatgactgtattgcttttataaatgtacaaatagttactgaaatgacgagacccttgtttgcacagcattaataagaaccttgataagaaccatattctgttgacagccagctcacagtttcttgcctgaagcttggtgcaccctccagtgagacacaagatctctcttttaccaaagttgagaacagagctggtggattaattaatagtcttcgatatctggccatgggtaacctcattgtaactatcatcagaatgggcagagatgatcttgaagtgtcacatacactaaagtccaaacactatgtcagatgggggtaaaatccattaaagaacaggaaaaaataattataagatgataagcaaatgtttcagcccaatgtcaacccagttaaaaaaaaaattaatgctgtgtaaaatggttgaattagtttgcaaactatataaagacatatgcagtaaaaagtctgttaatgcacatcctgtgggaatggagtgttctaaccaattgccttttcttgttatctgagctctcctatattatcatactcagataaccaaattaaaagaattagaatatgatttttaatacacttaacattaaactcttctaactttcttctttctgtgataattcagaagatagttatggatcttcaatgcctctgagtcattgttataaaaaatcagttatcactataccatgctataggagactgggcaaaacctgtacaatgacaaccctggaa

SEQ ID NO: 2243 - DNA, 1325 bp, Homo sapiens
cccctgatgtgtatacagtctgtcactgactgaaatgttattatgtgctgcatgaacgcatctgttaaatgtataaactaaagagttgaaacaaatcccatgtttggccaatgtagaatctaagtagaaggaagacatagaactaaatttttcatccttttataactacaaatggatttaaatataatattaagtcttctgttcacatagtacatggttcaaatgtacatagaaagtacatataaatatctggaggaagattattccaggtggagagaactgcaagaccttgtggcaagaaggggctcagcatgactgacaaatagcaagaaggatgtcagctgtggcactggctaccttgacacatcttcatctgaagaaaaaatacaaagaaggcctgccatgatgacaatttacttcatgaagagaacgggttctgaaacggtcattcttttccatttaaacaatgttaccatctcccaaagaacagctttggggtaggaaagaacagtatttcatttcaagctggactactcatctaccaaaaaaccattctgaccaaagaaacagatgcagaattacagtcacagctgcattctgcacagaacaagttggataatgggtcatccaggctggaatgcaagtgacacaatcacagctcactgcagccttgacttcctcggctcaagtgatcctcctgcctcagcctcccaagtagctgggactacaggcacgtaacgtcacaccttgttaattttcatattttttcgtagagacagcgttttgccatattgcccaggctaatcttgaactactgggctcaagcaatctgcctgtctcagcctcccaaagtgatgggattaccggcatgagccactgggcctggccccactttttcctttttaacactatgggtgtttttctgtgtgtgcttttttgaatagaagtggtgagagggcacgttcttgcctttttcctaatcttaaaaaagttttcgatactaaatatattatctataggtttttcaaagaaatgagaagttgcctcctattcctagtttgctgagggttttattttctcacgaatgggtatgttctctgtacaattaaccaatgaaatcgtctgggtctttgtgggaagattcttagtaacaaattctatttccttaattatgcagattttctgtatcatcttatgccatcatgctaagttgtatttttcaaggaatttgtcaattttgtataagttgtcaagtttactggaataaaggctttaatgatattacctctttcaatatctatagcatctttagtggtattctgctc

SEQ ID NO: 2244 - DNA, 1433 bp, Homo sapiens
ctccacccagtggtcctgcttgcgtctttggaggacggtagcagtgcgctcagtggaggccacgggtgcctcagagggatttctcttggacctcctgccctaccccagcttcggcgttgcacttggagaaggccctggatatctcagggtgctggggagaggagcagtgagcaaacacaaaatccctgcctgtttagaactgatcttctagtggtggtggttggggctgggagcagctggacagtgaattactaagaagggatgatccttgcctcccaccctgtcactgaagaccaggagaagagtgatcccccgaaatgccctcagctcctgaaatgcccactgtcaacattcttggttacagacaacggcaacacctgtttcaagaataaaatggatctattgaatatttgggatcattaggagttgaggggcagggaaagcaaattccaggttaagtttccagaaaaagtgccccaaccgcactgtagaactggcctgaagatgaaaccaccattgcagctactgagaactcaatgataagaacttgtcatttctaccctgtgcactgctgcttcccaagaactgatgctaccgtgtcagcgaagggattcccttgctgagcccagttccttacactgctcacttcatttctaaagcaaaatcttatgcaggtgtgtacaaagacagaactatgtcacaggcctgcattctaactgcaagagaggctggcagtttgagttgtgactacaatggggaggcaagaatgctatcatgagattttcccccattatagaaaggattggcaaagatagagccaaagttccctgtaggagatgtgtacagaaggtctgatgaaaattcgaagtcttattcagaacaaaaggcctagataaccttccagggaccctggaaagaatgatgcctaggaaggtggcttctgtcatgaagtgatcaccaaccatggcaatgtcaactggggaatggcaagggggagtgctgggcatagggtccagctcccaggaaactagaaggagcccaggaagctagaaggcaagcttatgtcagcttggtctttttaacagggctccaccctgccaagagaacaaggcctacatgggaaattatgaagaacacacacacgcaaaaaaaaatctgagtttgctttgtgtagggatttaattactgacttatcctgatgcttatgtatacttgcagcttagaaaagtgaagacatctttctgggacagttctgggaaacagaagcccatgcgcactaaaaggaaccaaggaatgttttccatgtatcctgagctggacaccaaacaaatgtgttcctctttctttgctcacttagaagtcttcttcctgtcctgggttaattgacttcaactttgaaggagatgatgtttattttcatcttcgaatctgac

SEQ ID NO: 2245 - DNA, 1149 bp, Homo sapiens
gccgctgtccccgcgccctgcgcccggtggccccccacctccgccccgcggccgtacctggcgccccctggctcccccggcccccgcgcggcgtggagccatcttccctcacctcctaccggcaccctagcttgctcccggcccatgcggcccccgcgggctcccggccccggcttcagaactcagccctgcacctgagcgcggggcccggcggggcgtggcggcggcgatggggaaactgcagtcgaagcacgccgccgccgcccgcaagcggagagagagcccggaaggggacagcttcgtggcgtccgcgtacgcgagcggccgcaaaggcgcggaggaagcggagcggcgcgcgcgggacaagcagggagctgcccaatggggaccccaaggaggggcctttccgggaggaccagtgtcccctacaggtggcactccccgctgagaaagctgagggccgcgagcacccgggacaactcctcagcgcagatgacggagagagggcagcaaaccgcgagggcccgcgaggaccgggcgggcagcgcctcaacattgacgcactccagtgcgatgtctcggtggaggaggacgaccgccaggagtggacgttcacgctctatgactttgacaactgcgggaaggtcaccagggaggacatgtccagcctcatgcacaccatctatgaggtcgtggatgcctcggtcaaccactcctcgggcagcagcaagaccctccgtgtgaagctaaccgtcagccctgagccctccagcaagaggaaggagggtcctcctgctggccaggaccgggagcccacccgttgcaggatggagggtgaactggcagaggagccaagggtggctgacaggaggttgtctgcacacgtcaggtgagggctggggtgccagggtggggctgtgccttaggcgggggcaccctggccacacccctgcttcccgcaggccacaggccacaggccacacaccatcctctaggtcagacctgcagggggcacctggtccagcagctctgtggggcatgggcccttccagcatctggcaccctggctgagctgggcccccaagtctgtctgagcagagggctttgaggggcagcagccacagcggccttgacaccctcagtctggac

SEQ ID NO: 2246 - DNA, 7616 bp, Homo sapiens
agcccctagcgcagacggcggagagcagagagggagcgcgccttggctcgctggccttggcggcggctcctcaggagagctggggcgcccacgagaggatccctcacccgggtctctcctcagggatgacatcatccgtccacctccttgtcttcaaggaccacctcctctccatgctgagctgctgccaaggggcctgctgcccatctacacctcacgagggcactaggagcacggtttcctggatcccaccaacatacaaagcagccactcactgacccccaggaccaggatggcaaaggatgaagaggaccggaactgaccagccagctgtccctcttacctaaagacttaaaccaatgccctagtgagggggcattgggcattaagccctgacctttgctatgctcatactttgactctatgagtactttcctataagtctttgcttgtgttcacctgctagcaaactggagtgtttccctccccaagggggtgtcagtctttgtcgactgactctgtcatcacccttatgatgtcctgaatggaaggatccctttgggaaattctcaggagggggacctgggccaagggcttggccagcatcctgctggcaactccaaggccctgggtgggcttctggaatgagcatgctactgaatcaccaaaggcacgcccgacctctctgaagatcttcctatccttttctgggggaatggggtcgatgagagcaacctcctagggttgttgtgagaattaaatgagataaaagaggcctcaggcaggatctggcatagaggaggtgatcagcaaatgtttgttgaaaaggtttgacaggtcagtcccttcccacccctcttgcttgtcttacttgtcttatttattctccaacagcactccaggcagcccttgtccacgggctctccttgcatcaggtaggggctttgcagagaccatcgacgggctgacttgagtaagaacacgaattatgcatgtggccatttccagagcactttctatgtgatatgaacatgtgatttttatgtaatatgtgtatgtaaacgaggcagcctcatttccaggtgaggatgcatttggtagtgttgatttttgtaatttaaagaagctgaaagggagagaggacccgtgaggactgaactctctgtcccatggggtagggcttacatttacattaaagaaacagaaacttgctgggaggtgtaagtatttggtcacattgctggcaacagaaggggttggagttggacccagggtgccacgctagctgccctcaccccttcttcccctctggcccagagttatactaagagtccttttatttcaaaccaaatgtttgacaatgggacagtctgtttgaaatcccagctgcctggggtggtcttgggggtctgggtggccccagtgctggtaccatgtgctggcttcaccttttaataacagtgtgaccttaaacaagtcgcttaactactctaagtttcagtttctttcatggtctaaatggagattaaaacacacacacacacacacacacacacacacacacacacaccccctcgtgtatctaccccacagggcgcttttgaagaccaaatgctgtaactactatgaaagtgctttgtaaattgctgtggaaagtgtgagctactcaagcacccgaggctgtccctccttgctcacatgtccagcccaattctcccttagtgagaacagcactcagtaggtgctgtgtgtgtttgtgttcaattaagaaattccagaataaataaaaatgaattaattcaacaaacattttctggggcaccgacaatctgcccagtgcaccaggctaggtatctgatacaaagataatgaaaacagtctcttggaacctaattggggtcctcatttgaccaggaatttctttcgtcccgttttaagccaaccagttttgtccggacaagacaaaaacaacttgggctgctttagagaagcccagctcagtgtagacaatagctgcccagcctctgaaaggggctgattggattatgtggcaaatggaggtgcaaggatgacttggacggtgacaaatgaagtgggcggagacctgctttgagttaatccaggctattaggaggggaccttttgtcttccagagactggcaggagcttttaccagtggtttttacatccttaatgttcaggacgaataatttatggtcagtgaaaatccaggccccagtgagattcgagtgggctgtaaaatcgagagtcctgctcccagtgagtaatggtagtgaatgtttctgtcactttttgcaaccgtccattcatttgatcctcacaactccctgtcctgagccaggaccggccactgccactcccagggaaacagaggctgtcaagaggctccacagattgggccccactggatcattgaacccctgttccctgagttctagaggaagaattgtacctgtctcagtcccggccacctccagaaggcctccctctgcatttctgactttgctgtgccggcagcctggagcctcccaggtccctgctgtcatcttttctagccactacagtctctgtctttcctttcacagccaagcttcttgaaaggcctgtctacacttgctgtcttccttcctcacctccaatttcctcttcaacccactgcttcctgactcgctctactccgtggaagcacgctcacaaaggtaaagacttttctgtggcttaatccttgtcatgttttcggctcatggacacaaggacacattttcatgccttctctcacagggctctgcgtctccggttcacttctgtgtctttacactcccttcacagagacacttgctcccccttctctcgttcttagcatcccctaggaacttgcacacccaggtctctcgacttctggacctgcttcttaccatgccgtcttaagcagtcaggagtcgctgcctgggttcgagtcctagttaaattacttagtgctgagaccttggggtaggtaaacttttccaagccaggtttatctcagtttcaaaatagggttaatcgtctttatctggcaggtcaggtgggatgtctcacaggtaagcaccagatgccatttgaaaggcttgaagcaaagtcaataaagcattcatgggaaaatacaactggaggcaccactagattttcgtatacattaggttcccacggggaggaccgaagagagaagaaagaagtggaaagggaggagcgtgcaggagagacaggagaagagaataactaaacaaagacattaaagacaaaaaaaaagtaggaaagggagacttagaaaatattaaaagccaccaaaaacacatccaaagacggtttccccttacgttagttgggctaaaagaaagcaaatgggaagaaggttttaaattgattatcccagtgacaaatcccaggaagctttcacatcaaatcaccctattctgggtttttaactccttccatcgagtttaacctctttacctcccacatcctggtaaaccctgccccctccctaccgccccctttgctggtgattaaatcctgaaggtacacgaagtatttcagtgaatgaatggctaacagaaaagggcctcccctcccccttaccctggcggtgtttttcagttttattccactttccgcccttttcccttaatgaacacagggctaatctcgggccttgtcgaaggaagaggctgcagacgttaatgaggttagctgctggattccagtattcgtcgcataaggatccttctttgtctgcgaaggaaaaacacactgattatcataatgaggtgaactggccaccgccgggccggggcgatgtggcttcttaagccacacttctaattttggtgatggagccgacatttctttggcttctcatttaagtctttgcctctgtcccagtgcgaagtccattcagcggggttgaaagttgcaggcagctttgggaaggggggcgtcggacagggttgcattgtagaaagtggctttgttcgatccttcgcacagatgcaaatggccagagcattcattccctttcttcaagagctgaggactgggggggccactggtgatcagttcccaactctagctctcctctgactcatctcaggacccattgaggacatccaaaactcactcaagatcaccaagtggtaggaaagtactaactcctgggcatagccctaggggagtgactacaatgtgaatactcatggaatgcctagccaggtgaagaagtgaatgcatgttggcatcccagagggaccccccttaagagggcatagtttggggttcagatttgactccagcatactgttgaaattgggcacagggggctagtgattagtcaggatcaatcagtggagaggagattaaaactcacatctgggagtccggaatcagaacttgtagttcttttttttgaaatggagtctcgctctgtcgcccaggctggagtgcagtggcgtgatctcggctcactgcaacctctgccttccgggttcaagcaattctcccacctcagcctcctgagtagctgggattacaggcgcccaccaccacagccggctactttttgtatttttaggagagacggggtttcaccatgttggtcaggctggtcttgaactcctgacctcatgatccacctgccttagcctcccaaagtgctgggattacaggcgtgagccaccatgcccagccctatagtagttcttcttttgccccttaatatcttcacccacatgtcctgtaccctgcctgaaccctcctcctctttttgttctgatctttgagctccctagagcccataattctttagagcaggtatgtcccgagtctgaaacatgcccttatttgtcccaagctctggacatttctcaccccaaggcggatcaatcatgattaaatcactccaattaaactttaggctccagtcagaccttcagccaaatggaaaaaaaaactaggggataagggaggtagttggagcaagaaaatgttattagttgaaaccttacgggaccttcctcccttagtgagtctgttggctaaaggttctctggcttcgtgaattagaatcggatactgtttccaagttagcaaaaccaactctaccccagcaccccacgaggaagaatgtggaaggatctcccattggccggttggggcaaaagcctgaggcaatctttcatccccttttgccaaggcgagactttcccagtgacggtgatgtagttggccactctgactatgggtggactcgggtgtagacctctgaagctgagatcacacgaaaacctggcctccccgccatgtagctgttggagagtagaaaaatagagcacgcctgatgtttctaaatgagaagactttcaatagtaatgaagaatccatggcactctcctcaccctcaaacacatggcagtcattcacatacaggccccaaagccactgttagtgctgcagtagctcctgtggacattggaaagcccggagagggcgtggaagaaatcagctggcccccggcaggttctctggggttttgtgcccaaggctcctggagccctaaaaactttcaaaagttaactccccacgtccccatcctgcttgggtttctggacttttctgaggcaccggcagaggggtctcgttgctcccttgagtgtaggggcagccctttaacctggctccttgagtccctgctttttctgcttctgttgccttcttcctcgtcttcctctctctcaatatctccctctctttgtccctccccagttcctgacctggccatcccggggtgcccttgaccagccccgtgtctcctcagggtgtcccagcaccagcctggcacagagtggggctcagttagagtatgtgggatgttggtttcgccaggtgagtgaatgaaaggactcgaccaccacagctgagccactagctgggccatgcgaagagttctaggtgcaaaggctggagggtggaattcatttttgagaggtgtgtgagcagcttccgacccctgccccatttgaacgggggccttgctggtcgcgtccctgcattcacccgcgcggccatcccgtcatccaacagttgatcctaactgagcacgcccacggccctggtctggcctgggcaccggccaccgtagcccatcccttgatggcctctgtgtccccaggagggcgggccggggggttgcccaggggctggagcagtggactgtggctccatagaggtaggccggagggtgtgagggcagattcaagctatccccagggctctgctctggtcggagccagccccttctccctctctgccttccccgccccattcctgatgctgaactgttctggacccctggccctgagtctctcaggaccaaagtgggcacgggaacagctgtagtgtgtgcccccccgggctttggccacaggtctccctctcgaggtgtggttgtgactgcgacccttcccttgccgtgatgccttcctcccccggggcttggtccagctccttcactctctagcagctgctggggcccacctcccatgccgaggaccagcaggggaaacctccagggagcatctgcaggctctgcttctgcccggctgctggcttgctctccctggtggctctccagcggccagcttcctcacccacccggcactccgctttgctctgtctcctgaggtgggcctgaccaacctccccttctctgcctcagtccctgggctccagggctcagctccacagccctctgcctagcaggctggttctccctgccaagcccatacctgtggtcacctggccctcctgtggtctgagtaccactcccctgccccaggagccactcccactccagctgcctgtttccagcaggttcccagtgcccccgacaagcccctgctggtgtctccatctcctgccaagcatcctccagtgcctcctcctgtgggcctggcctcagggctatggacagactcctgtcccatcccagagacccctcgtgatcgtgccctggcacgtgggccgtggcccggctgggtcggctgaagaactgcggatggaagctgcggaagaggccctgatggggcccaccatcccggacccaagtcttcttcctggcgggcctctcgtctccttcctggtttgggcggaagccatcacctggatgcctacgtgggaagggacctcgaatgtgggaccccagcccctctccagctcgaaatccctccacagccacggggacaccctgcacctattcccacgggacaggctggacccagagactctggacccggggcctccccttgagtagagacccgccctctgactgatggacgccgctgacctggggtcagacccgtgggctggacccctgcccaccccgcaggaaccctgaggcctaggggagctgttgagccttcagtgtctgcatgtgggaagtgggctccttcacctacctcacagggctgttgtgaggggcgctgtgatgcggttccaaagcacagggcttggcgcaccccactgtgctctcaataaatgtgtttcctgtcttaacaaaaactgat

SEQ ID NO: 2247 - DNA, 9851 bp, Homo sapiens
cctgggtgctaagcccctcattgtcccggggggcagggttggccggccggccgctccgagtgtggggcccgccaagcccacacccacccggaactccagctggcccgcaaatgcagcgcgcagccccggttcccgctcccgcctctccctccacacctccctgcaagctgagggagcccgctcccgccttggccagcccagaaaagggctcccacagtgcagcggtgggctgaagggctcctcaagtgctgccaaagtgggagcccaggcagaggaggccccgagagtgagcgagggctgtgagggctgccagcacgctgtcacctttcattaggacctgctaattggtttcacatgtgtgtggaaccatcccaggactggattccaatatgaggagagaaatgggttatttcactgaaaggtatgactgagttagactgaagaaactcttatatgacactgtactatggctttaatgagcattagtgttaggatgacattttgtttagagagatattgatggtaaaaaagaaaaggatttgaactccagttcaccatttcctaagcatgaccttgagctattcattcactctatgtagtcatttaataaatatttattgagccctatataggccaagcactctgtgaggtgatggaaattctcctgccctcaaaaagtaacagtaattattatttgcaatctacctccctaaggcataacaatgcctatctttcagagttatgtgtaataggatttgtaagtggatttttttttgtctcataattgtctacttggctccaaagttagagacaaataggtgaaaattaggagacaaatagatgattggtaaacaccagtcattaagaggcaaattcattctgctactccgcttaccactgtactcactaatcttgaggggactactgaattgtaaatcttcagcctcagaaagggttctgtgtcttttccttttactctttctcagtgccccttatgcataatccaatggagtattccaaggaaaatatttttaatgactgggggttgcctgcaataagttgagcctgaaatctcatttttcagttggatacctactcatgtcatggatctgtagtattctttttgcttactccagcagtaggaaataatatagggacagaactcaagagagagaaaatgagcaatagggcaatgaggcacactcccattgtctggtagaaaaaagatgcatgagtcttccatatgtcaagtagatactacaaaggtaccaggcttgaactattgtgaagcaagttcatcctagactgtgacttactaagagaagagaccccagcagcaaaagcctgtaaggtgagttatgcaggaaataaggagactggaagaggtctacaggagtcgatttcctatgaaaggaggttgtgcaatgaagagactgcctgctacatggaggacagaggtcacaacaacaactggctggagcagtggaaagagaactatgcacaaggatgaggagaataattgtgattgtgggacagggccccaggagagaggtatagcagactggccttggaaagcctgcagctgcatcaggaaggcaaagcatgcttggaaaaaatgctgactgaagtaaggcagaacctagagggtgggtggatactccataactgtattcaaattgggcactctcttgttgtaaagcctttgcgtaagtgcaactgagaaaatatatggtagaaaaaaaaggctatgttctgaccagctcgaggatgggggaatatcatgcataatatgtgcaaactatgtgaagaaaagtacaagttaatatgatcacaaaaatattcagaaaaacacagagtgaaggaggtaagacaagaggtaatgaaataattagtgaagtatgggctcctgtgcaagggaatatcttgagacagatttttgaagagaagttagatgtgggctgatgaagaggaactgtcactccacattgagggagtggtctctgcaaaggtggtagcttagcttgggttcctaagaaaagagtctgaggttaatcttatgagcacatgctttattgtagagtacaagtccagagaagcaagtgtgacaaaaaaggaaggataggaaacaaaaagtcatgttattgagctctggttataggaaatttaaatggttactcagttacactgaacatctccagagagattcatgaattcacggcaccttagaaaaattctttggtggaaagaagggcaaacaatctatctactggcttctttccatctcctgtttctcatgcttacttgacctaacaaagtgttaacttgcacatcttccctccagacagctgctgggttagtaactaactccaacttagttactggagctgctgctgtttctgctgtgatgagaggtatggaggccatgtcaaagcctggctttttctccccaggatttgcagggaaggctgcaaaaaccagggtgagagatgctgagtcttctgagttttatgaccattggaatggcatgagtcaatcaaccattgctgagctcctctgatcaggactctgggcaagcaacagtctggggctgagggtagatgaggcccaggaggatctgaggaaatgtccaagataggtctggaagagtgaggaaaatggatgatgaaaacttagcatgtctagaaggagtgaggtctcaacaaatgtgtaacttagtgtatgtagtattggagtgacgttctaggaatggccaaaagctaggattccataggctgatttgaatgaatttgagatgtgtgcccattttgttgtgcttattatggctgatcctgtagttttagcaattcagtgatcatctcaactttcttcctaaacagctgagcctggaaagctaaaactaacacttttcagacttcaatgaaattactgttctgaatatgattcaggttctaccaaagagatgtattcatgagaactgaatttagaactgaaggaagtggggagagaagcatgagctgtgatggtagtagctgctgggtaagtggccagcagccactatggtacttcctatcatggcagagacaactggtctcagaggtgcccagttgtgtcttgtggctttggacatttctcctggatgctcaacctagagactgtttatctctcaagtgatttgtaaaccttttaatgctctgtgaaaaaaaaatttaatcccttttgcctaaaccagctagagtggattctattctgaggaaatgaccatattttaaaggtttgctggagaagtctggatggggggtggagagaaagaaatataaaaatagagatagaaatagctaaatggagggtagagatattaattccggctcttagatggtgggcaactcactacccacaattattaaatctgatttttcctctcagcacacattcatatagataccatgtatgaagaatacaggagaaccctgaaggtatccaaatgaaattgacttcccagtcatcattaaacatttaaagaacttcaacaaaacatgctccatgttaaggactttagcacctaaaaataaggaaagatgcagcttttgattttaaacatttattgttttcaagggaaagccttctgtatccctgcacactttaagcaggtaaatgttagattgctgcatcagctcctggactctgcataacttctgatgtccttctggtaaaccttgatcccttattgcatcatgtgacctcctctcccccagctctagctctgcctagccggtaagtaaaaggttattttcaagaagctgcagttagataagtaaataacaacttgtacctaatttcatattttatctgaaggtgtgcggaaggtaatacacccagaaacattaaataactggtttacatctaaacggtttttgactaaaaccttaaagctagacctatcaaagggctcaacagaataaaaagtgtttccctttgaagaattctgtgtccttagaaggcatttaggttatggtagaaatgggttttctttcaataactttaagaggaaaaattacttaagactggtaacttaagactgacactatgtgaaagaagcaaaggtgacatttgaagtaatcaattatcagaggctttttaataacattccagtgaccagtcttgatgtcttgatatttctcaccaaaagcaaggatagttatttgcggaaatctcaacccaaagtaaacttatattggctatgctgaaataatttaaaagatatgaactgttttctacatccgtactattttaagtgtcatcagcaacattcatattacccaggaaactgttagaaattcagtcttaggccccaccctagacttactgaatcaatatctgcattttgacattgccaggtcatttttaagcacattagagtttctaatgtcctgttctagatgctgtaaaattattcataaggtcacttgttgaaatgattgcattcagcacttaaatatgttatggacaatgtccattaaggatcagcaaatacttatttgtgtccatattagtgatattattatatgagtttttaatttatgttatatgggttattaatttagtcaatgtttcttgttctaataaagggctctgattttaaaccattttatccaatggttttcttgagcttcctaaagtggtaaacagtctctgttttcttcttatatgttcttgtagctaattgttttaatcatctttttgttgttacttcagcctcagtgatgggttactatttaaggattctctaaaagccttctaatataccctcaatgtggttctggcagactctgtctacctgacagccatttccacattctcctttgtttacagagccacagtttggttgtgttgtagtgtttttattcctagtctaagaaaatcatgatgatcttatgttcctttgccatatacttaatttttcatttttgtttatagctgagggtgatcacatgactgagatctgaccaaaatggggtttaagtagaggcttatgagaaagtctttgttccataataaaacagacagggatgaaaaagatagcttattggctcctgtgatcctttctttcagcctacacacagacaggatgcttggtgctatgacagccatcttgaagccatgaaatcataaaaacaaggacaaaaagtcaacttactgagaatggtagagaggaagaatagaaagacccaattcctagtgacagcattaagtcactacttatgtcctgaactctgtatccagagttcagattttgtaaaaacaaagcaaaaaagaaaacagaaacaaccctatctatttatgttattattaatttactttgttatttgctgctgaaagcgttcctaactggtataaataagaaggactaaagaacttaccctcgtcagagatttactctgtaagtgagcatggttgttgaatatgtgaccagtctaagtagtgaggcaacacagagtggaagaatatctggattttgttattggctcctgtacttctcagctgtgtacaaagcaaaccttgctttacaggaactttggctctctatttacaaggtcagtgtcaactcctagtgcctttttttaatttttctggcaaaagggaaatgggctaagttctaggaattttcctttatgtgagtatatgaggttttctaaaactttctagggagtcaaatgttttccttgctattggttgcttctgataaattaggtttaatcacagtatattcctagtagtaggtttttgatttttgaaatggtgatttttctttctcttttggggatgaaaaagaaaaatgaaagcttaatgatattttctttcaaagcaaccgtcttctttttcaagataaacaaaatattatgctaaattgaaaccaattttatgaaattatattttaaaaaaggatttcaaaaagccatatctaagtcttttgaggaaaatggaaacattataagaaaaataacaaagcagcatttgtagtattttaggtctagtagacttaggtaaaatttaatgcacgcttttcaacctggttggctttaatagtccacagatatcctggctgaatccaccaaggtttttaacaatttgaatttgctaccaatagttccttttttctcatctcaccttacactgtctccatgtcctgatgtgcttcaactcagaagcactggaactctcttgataccaaagttgtgttatggtgtgtgataaggttgatgatggtgggtgttatgggttgaattgcatcccccaaaaaagatattgaagtcctaccctccaggacctgtgattgtcaccttatttggaaataagttctttatagatgatcaagttaagatgaggtcattggggtgggccttaatctaatatgactgggttcatataagatagaatagaaacggaaggaagagaagatggtgtgaatacacagggagagcaccgtcaacaagtgaaggaactcctgaggctcctgatgctaagagagagagacatggaagacattctccctcacagcccccagaaagaatcaacttctctcatactttaattttggactccaaactctcagaacaatacagttctgttgtttaagccacccaatttgtgctttcttacagcagtccctggaaagtaatacagtggaggaggacccccatgattacattctgcgagaggagttcctaagcattgcagcatgaaaaacagtgcttaaaagcttaagcaatatttttcaaaatattgacctatctcagtaggaactgagataggcaacaaatctgactgacagaatacatttcaaactttcaaaattgtgtcttcctcttactgtgggtccttacccctgaacaaagttcatcacacctggcttcacgttgcagggtatatttttttgatgcctgccttatctggcttccagtcatgccctggaatttgagtgtctctcaaatgtaaaaatcaaaaagtatattgtaaaaatgtctatactatgcaaagtaatatacagattcaatgcaatttctatcaagattccaatgacatttttcacagaaatagaaaaaaatctaaaatttatatgaaaacatcaaagacatcaaatagccaaaacaatcttgaacaaaaagaacaaagctggaagcattacactatttgatttcaaaatgtactgcaaagctatagcaatcaaaacaacatggtactggcacaaaaacagaaatatggaccaatgaaattgaacagagagcccagaaataaattcacccatttacagttaactgatcttcaacaaaagtgccaagatcatacaactgagaaaggacagtctcttcaataaatggtgctggaaaaacttgatatccacatgcagaagaatgaaattggacccttatttcatcccatatacaaaaatcaacataaaatggattaaagacttaaatgtaagaccagaaactataaaactattagaagaaaacctagagacattgacattggtcttggcaaagattttttggatatgaccccaaaagcacaggcagcaaaagcaaaactagacaaatggaattacatcaaaccaaaaaaatagcttcacagcaaaagaagcaatcaacagagtgaagagaaaacctatgcaatgggagaaaatatatgtaaatcatacatgaaataaggaactaatatccaaaatatataagaaattcaaacatctgaacagcaaaaaaaaaaaaaaaaagaaaatttaaaaatgggcaaaagatctgaacagacatttctgcaaacagaatgtatgaaaggccaacaggtatatgaagagatgctcaacatcactaatcattggagaaatgcaaattaaaaccacaattagatatctatcatctcacctctctaagataagcatttgcaaaaatgtggagaaaagaggacccttgcacgcagttggtggaaatgtacattagtatagcctcatggaaaatagtatggaggttcctcaaaaaattaaaaataggactaccatatgatccagcaatctcacttctgaatatgtatccaaaggaaatgaaatcagtatggtaaaaagatatctgcattcccatattcattgcaacattacttgcaatagccaagatagggaatcaactgatgaatgaataaagaaaatgtggtatacataatataatggaataccattttgccttaaaaaggaggaaatcgggtcatctgcaacaagctaagtgaaaaaaaccaggcacagaaggacaaatactgtatgatctcacttacatgtggaatttaaaaaagtttaactcatagaagcaaagggtagaatagtggttgccagggactggggctaggggtgggagcagggaatggggagttatggtcaaagactacaaagtttcaaatagacaggaggaataagatctggtgaactatagtacagcatgtgactatagttaataatattgtattgtacacttgaaagttgctaagagagtagatttaaatgttctcatcaccaaaaatgataaatatatgcagaagtgacagatatattaatttgatttaattgttccactgtgtatacatatatcaaaacatcatgttatacaccatacatatatacaatttttcaccttgccaattagaaataaaaattattcatataaaataaaaataaaaataaaaaataaaattcaaattcataacccaaatttccctagacctctgcttcctctgcatataacatgtttgagtctcgcctaaactcaaattggacctccacagtcttagcaaaactcttttagaaagtgcaataatatttcttaataatctgtcccaggttatcactttccataagaatatccttttttgagttctccttgaaaccatagttcaaaacaaatgtgtttgttcttgcattatttttggtagagagaagaactatgtgataagataaaccttaagataaatccatgtctattggggataaaagttttcagttattctgctcttcacaaactaaccctagttcctctaatcttaaaggttttagctttcaacttttagttatttgaattttgggggaaagatctcacatcaatttctccatgttaagatttaaataaccaaactggaagttaagtttttttttcttttttgacagagtctagctctgtcgcccaggctggagtgcagtggtgcgatctgggctcactgccagctccgcctcccgggttcacgccattctcctgcctcagcctccccagtagctgggactacaggcgcccaccaccacgtccggctaattttttgtatttttagtagagacggggtttcaccgtgttagccaggatggtctcgatctcccgacctcataatccgcctgcctcggcctcccaaagtgctgggattacaagcgtgagccaccgcgccgtgcctggaaatgaattttttacacaccaagtgaaaataagtggtatacattttcacaggaaattttcccacaataaaatttctagatggaagttcaagtccttgtgcctgagctccttagattaaaaagcatagcagttatttaacactcttttaaaaaagaaagtatgaagacatggtgaaactattttgcttatcacattgacattcctttgagaagaaagaaagaaaatgacatgtggttgggaattcttcagtttagccctatagagatttttaaaaatgttttaactttcaaaggcgcttttatagagctataaaattgcctgtctcctctccaggctatgctgtacacaaatgcaattctaatttttatcgaatgc

SEQ ID NO: 2248 - DNA, 760 bp, Homo sapiens
tatggactacctcacactgccagcagcacacactgagctcacgtctcctctacatgttcctggacttttgctccaacttaagtatagaatgcaccccaacttaagtatagtttaacacttgattttcttggtttcaggccatccttctgggtcgttttgagtgctgtttggatctcaatgtgatcatctggggaatgtgctctcttttcattggcgtcatctgaaatagaataagcacgtgcttcttgtcttcatctaagaggtgggagaaaatgagaaacaggacaggaccgagggcagagtctcaggaccagagactgcccaccaggtgcagctcatcaaactacttccttcctcacaacggactttgcgtatgcttagcttccagcagttcatcaacagaggcaagcgccagaacccagagctgcctgaagcagacaggatgcacttggatgttcgagtaaaaagctggaaggtcatcctcttcaagggagcaaggatggacacacagtagctgcgtctggtgacaccgccccaccttcctggccctttcctgcttctcatcttgattgtggattgccagatgaatgagaaacctcagccccagggcttcagcagtccccacagtgaatctacacgtgccttggctgcctgaggattcgatgtcgtcagcagtggtcaggtcaccacctccccacatgtacaagtccttgactacccacaccggtcacatgttccccgccctctagggtcacggtga

SEQ ID NO: 2249 - DNA, 1692 bp, Homo sapiens
taacattgaggttgagagattgtggtctcctgagtggagtcacggggcagccatcttccattatgtatcctggaaaacaaaacagctggtctgctagaagacatgatcagaccacgcagtgagagacagacacacaaggcagccatctgggttcctaacagttctctggttcccagttccatcccatctgatgcctaatgccatttcccactttggaatatcatgagatgactgtgtattcgtctacaaaggaactgaggcaccaagaggttatggaatttaaccaaggtcacacaatcagagtggaggagctgggatttgaactcaagcaggctagttccagagtccatgctcttatcactacgcttcctctgaagtcatacttacaggaaaagagcaactggcaatccgatttgtgtgagagaatggaatatgtcgactctacctcagaagacagccaagactctctgtagactgtccatggcttctgctgctgggatgcactaccttcaatctttcctcccactggttctatggctgctgaactaggaactctttgagaacagtgacatctcctatacctctcgtacatacctccaccactgcatgtatcaccctgacctgtaagttatcccctctgtcattcttgaagtcaggtacttgttcttatctgtctgtgtaaccaaagcatttatgacagcatctggcacgatgcatagttggtcaataaatacgtgttgaatattcaaataatgcttaatgtttgtcccaggttttagggaaggaaaagaaaagataccctattgtttctttctaggttgtctaggctcataaatgaaggaaaagggtcaggaatatggagttgaaaatactatatatgttcttagattatgttcctgtcctgtattctttcaggacactgaaataaaactgctgattacatcaatgaaaacaaatattctagtctgggtggtcaggcttctagaatgctcgcaatgttgatatggatgctgtttacagagatgtgttctacagaaatcgttctaaaggagctatacattcatgatgtgaacttttctgcatatactttatatctcaataaatattcctaaagcaaatgctacaaatccaaaaaatatttgtcctataagatttaaatttagtatcactctaaactgtctttcttttccatcagaatcaagttagtgaggatcttagaggtcacaaagtctacctctgtcctgactgatgcttacatacatgcagagaataggctgaatagtagtacacttgaaatgcaggagagcacctggaaaatatatttcattcatgatagcaaaacattactttgcaaccactagagtaatcaatgattagggcaaatattatccatgaatgctaaaaccactgagtagaagtttagtggtaaatggggtatttactttgtctcagtttttctccctgcaggtcatttattaattacaaagggaaaagatgcctttacagtggaccacaaagtgatcagagttaacatcaccaataatgaaacaaagtgacattatgtgcctcctaataggatgcactggcatgggatagaaactcacctacataatgcttctgacagaaatacatatcctgaatctaatcacaagagaaaaaccaaaatcaagggccattctacaaataattcca

SEQ ID NO: 2250 - DNA, 1856 bp, Homo sapiens
cctgtccccacggccacctccctccccacagggatgtccccttctctgtggtgtacttcccgctctttgccaacctgaaccagctgggccgcccggcgtccgaggagaagtcgcctttctacgtgtccttcctggccggctgtgtggctgggagtgccgccgctgtggccgtcaacccctgtgatgtggtgaagacgcggctccagtcacttcagcgaggcgtcaacgaggacacctactctgggatcctggactgtgccaggaagatcctgcggcacgagggcccctcggccttcctgaagggcgcctactgccgcgcgctggtcatcgcgccccttttcggcatcgcacaggtggtctacttcctgggcatcgcggagtccctgctggggctgctgcaggacccccaggcctgagcccagcacccgctccaccccagccagctgggcagggccggtgtggggctggagccaggcagctagcccaggacggagcaagggaagacccctccccagccctcccgtcggcaggggcagcagggggcagggtgcagggtccacataggtggtgcacacgcaagccccccggggtgctgcctgcaccgttgggatcaatgtctcatttatgtagaaaatgcagaaatctttacattcctcaagctagcccctgccccaatcctgccctggcctgaacacccccagggacagagctggtctctgggctgggggcccccgggcctgggccgggcaggctggaccatacccccagtccaccagctccagtctccacagccatcctggcccacacaggcaccccacacaaacctatttattgaatctgctggacccaagcggctctccagcccttccgtccttccccagccgctcttgtcgccttggcaggacttgactctgcctccctggccagccttgcaagaggactggggtctcctgccctctctgttgagccaggaatcccaagtgaggggttgccctgaggtctgactcttggggcaagcccgccacccactgtgggactttctggtgggctcctcagctcccaccccaggctggggcccagattgtgaggtctgtgtgcatgtgtgtgtgtatgtgtgtgtgcatgcgtgtgtgtgttgtggggatctggcctggcccttggggatggggctgctggggactgccccccttcccgccgtggccaggcgctctgtgtgctgtgtgtgccccaggctctgttgaccccgtccaggaactaacttacccagcttggtctctcctgagtcctccaccctggcctgggattggccagggagcagggcgggcattgggaccagtgtggagcctgagggtgcctgccctgctctggagggagggccaggagctgccacacccccaagtcctctcagggcccaccctcctttttcagcctctgcataaggcccctgggtacactgcagaagccccatccttcccgcctccgggcataaggcccctgaccacacttcagaagccccatcccccctgccaccgggcgatccctgctgtgagccgaagctctccctgccccgccctggccatgtgatcgtgttggtgacagaccctgatgtgctggtgctgtgtccccaaaaccggggccctccacagaggccccttcccagcgacactacctggggctcaggcctggacccccccagttcacggttgctcctgggagctgcccctcccgtcacatcagaaccttggaagctgctgctgctgcttacagaattatatttttttcttttgaagagttttaagaagttgtaactttttgtgtcttgtcatgtcagagaataaataaatattctaagtaga

SEQ ID NO: 2251 - DNA, 3940 bp, Homo sapiens
cttttattaactatccagaagcaaacttgaaataaaaagatcatattaatgttaagcacaaaaattaaacaatagtacattaaaatctggggtagataatataatgggattatttggggaacatttcttttaaagagaattggcattctgcccatcaacaacaatggctttttcatttattgttgatgatcaatacttttttaacattttgaatacatttatcattagaaatcgtaattcatcttttccctatcacatatgtgggtttctaatctccacttgtcccatgtgatattaagaaaagggccaatcctccagttacaaagctacaccagttttataattcttatttgctttattcttgccccacaaggaaatgtatttacaggggttatacatggtatttagttcagttgctggactggaagtgtttatattctttttaaaagaatagcagtttttattccagaaaaaaatattaaattataggattgtttttgatatctagactcttttgctaaagcacagttaattatcttataattatgctgtatagattttccatatactgctcttaagcattagtgatttccacttacttctaggaatgttttctcttcacctttcactaaactaactctaagaattgttacacagagtatctttagacttttcatcttttctcttcttctaaaatttctcccgttatggaaaaatatgccatgattctatgatcttggcctttcccaggattcggtttctacttctactcctagttttgaaatcagataaaataagacacaagtgaggatgtaattctgacttattctcaattttccttttaatatatttctgtatccttaagctaaattagtgcaagagaccaaaaaatggattcacctggggtgtttgatctgcaggacctgttttagcacatgtaatcatggtggaattgcataaggcctgggggtgagagtaagggaggtagcttggctctagcaagagaatttagatgtagtaagagaaatgtctgcagtgcttgttgttagtatagtactgactacaggaaataaactttctcctattgcttagaataagtaaacactcagtttagtagcatgtattgtacaagagttaattttgcttcctttagttacttccctgggaaatataatttagactgatccacatcatggatttgtgtatttcaaaaacagaaaagaaaagaaagagagacagaaatgcatgataaatgacctaagcctgatcattgtgtgatctcaggtaatttgcatattggtgaaaggaatctatacactcactgtaaatttagtttaggctcttatttctcaaagtatataaaattctgctgaagagatcaggcaaaacaaagccaatgcaggaactgtgaaaggacttcccttggacaccttggtccctaaaagatacttatagcttccagggacagttgccagtgacccctggattttactggatccaaaatggaattttttgcagcacacaggccttttaaattcatcagtctcagctgaggtctacagctttcctctctattcaaagaaatgacaggttaaaaggtcttcttaatgactctggaatcaaatttttatttgagaagatatttattttaaaatagaatgactaaatacatcttaataagccctaaatatatgctaatgtaaaagtttctttttgaaggggaaaaagggaagtgagaaatagaaaattcagatccagggaaccgtcaatggcattcatctaggagagttaatttaacatacacacattaacacataattttatcttttgttaaaaatgtgtatttactcattttattcctatttgattagagcagagaatttatgtatcgctacctaaaattggttaatagctttcgccctttcaaaaatactcagtgtcctcattttagcttcagcttctttggtttggatgcagtgtgtgattttttttgtgacagtaagccagtagttattatgcatggggaatcctggtagaaatgcagtattttgtgctaattgctaacagaaagatctgtaatactggctgcatgatttgccccttacatgtgcccagccataacaatctgaatttagtactgtgtttgttaatattagacacaaatttatcctgacacttttataggcaaagcctcggaaacatttagtcatgtaaaatataatcatggtcttgaaatatttgcttttgctcctgtgcattttaggcaggatttcactttgtaaccttattagtattgctgaatttggagaatggtttggaaaggttctttgaggtcctgattgtaagataggtgttcatttacactgagccattactgcactttatcaaagaacagttgtttacagaatgtgaatattccatgtctctacacactcttcagattttccctatgatagtaaattacatttggttttaatttgcattccatttccaatgtttgttgccagacactttggactttttgagggcaaataaaagtagcttctggtgtaagtgaaatattttgtgtcagaataaaatagcaaaccattatgtaaagggcactttccccatgtgtttaccttataacttcatgagctagacttgtacagaagctttgaaaaaatccccatggctgtcatattcataagtctctctgacccattcagacagatgttagtatattgcttggagcgtactataaaacttacctttcacttatggaaatgtgcttgtactttgttccccaaaaagcaaatacagataccataagacatgggataataataaacctttggacacagaaacataaaatggaatgtatgagcccttgaaagagcaattaaatacattttcatttcaacagctgaagatgaggaaccaaaacagatgggcaggggatagaataaatgagagaaaaatcagtattcatcatgcctcttggcattctagtacaccgtagcatattacagtacatcagctctagttctgcattctggtccctgatttattcttgtatgaagtaaaaactgagaaaacgataggtactttccttggaaatttctggaaccatctagtaaggagtatctagccatcctgttatcaacaaactgattcaattccttcttggaaataggtaggttatatattattaaataaattaaagaataatttaatgtttgctatcaaaggcacacactgccctaaaaagcatggtgaaacatcctattatcattaccaagtatctttaaagatcttggaggtgaaaaaagagcaaattgcttgcttgcatcctaggaacatctgcccaaaatacatcttcactagaggtcaaatggaacttttaaaacaatgatgaacttgggctcagtgagagaagaaccttcctattcttcataattcctaataaaattataattgttactactgctgtttttaacctatgaattgcagcttgaaagtctctgatctgaatcacatgtgcaaaacttgaaaaagtgtgtcagttatcgattgtatcagttatacattccaaagtttagtagcttaaaacaacaagtgcatacactctcatgattctgtaggttggcaatttgggctgagctcagttggacagatcttccactgtcacgcctaggggctcccagatggcctcaagcccaaattggggcctcaactgccctttcctctctcacgttgcctcccttcctcaaggaggctaacctgggattgttctgaaggcagcaggggtccaagagtgtgaaagcagaaagtgcaaatttcaatatgttgctctgccacattctgttggtcagagtatgttgcaaagctaacccagattcaaggggaagggaagtagacttcacatcttaatgtgaggtgtggcaaagaagtattaaca

SEQ ID NO: 2252 - DNA, 6788 bp, Homo sapiens
ccagggttcacccagcatgcatcgggtctcaggaacctgcgttgctgatggatatgtgaatgaggggatgaacaggcgtggaagaagggggagtagggagaagacagttgtatctttgcattcttcacagagcctggggcagcacttagcacaaacagggctggctacttaaaacccggggtcactcgttcaaaaggcaggaaaaaaagctttttcctttcttcgtgttctctctctggatctttcatagtggtgtgtgtgtgtgtgtgtgcgtgtgtgtgtgtgaccttctatttaatgtcacattcccccaggcactaggatactctcactgccttcaactgggcaggtagaaggcatccatccagcccccatcctccctgttgaggagttgggggagtctcagttgctggtcggggcaggaagtggacagtcaagaacccagcgggatggagcagaaggtgggccaggtgtgagttgaggggtcataccccggcacatgtcccattgccccaccagagttccctcacaaaacacaagttcagagataaaattcttatgacatatgaaggtagcagttacagagcattaaaccccaagcatgaggggctctcttctgagtgagggcctgagcactgctctgctctcgtgttcccgaagcccaccctgagtacgagaagtgagggtcagagccctgcagggtcctgcccatggtgactggcgaaggactttcttttccgggggagcacagccagagctctcttctctgattccatcattagtttctggaaaggccttccctgcccactctatctgatgttacctatccaacttccagccccaagttactttctgtacccccgttttactttatattgtcattaaagcacttaccagtatttggaactgtggtatttacccattttctcacccgcaagaacgcaggccccataggatagggatcccatccctctgtccccttgcacaagtgctggcatgagagaggcacccagtgaattttaggtgcatgaatgaatagtctttacgtgactttgtatccttttaggagcaagctggatataaataaatacatgaagtcaactaacacctccaagtggctcagtcaattttcagtgatttttctctgtccaacaccagactggcttcagtgatttctttcactgatgtggccacatttgttttgttttattttgtggccatgcagcccgatgtcgcaggggctgttggtcctcctgactccctgctggaacgtaagggagagcctcattccaggtctgcactggccccaaactgggccaagactgcacatttcagttcactttgggtttctgatagcagttctctccccagcccccatccctaggattcctaagagctaagggatgtacccaccaatccaagccacctactagcattgaacttctgtgtcttgaaaagggattttgttttgaaccagtcactgggagatgcgttctaaggtgagggcttccgggtcaataaacctgtaggtgtcgcccaccaaaaaaagtaaatctgacctcagcccagtcccatggtggtgcctattccatcagggcagagagtcagcagctggcaagagaggctcaacccccaccactcctgagagccaggaggccctggcattcaaactcaggcttcacagatccacacatctttgttctcagagaggagaacccaaagtgtgtctcccagtgagttctgaggatgagggaattatgaaaggcaccgtgtccacttgtgagataaaccgacccacctggttcctcatagtgggaggtggctcaagtgtcaagtggcccatgctacctggtcttcttggttttcttccatccgcgtccctggagatggttatgtgctttgcttcttactaaatgtatccagaagccaaggcaagctaggaggaggagtgggatctggatctgcagatccagaatagcaccgcaaaattacccagctggggcttagctgactgtccagaccctgacggtggggtttagaattggatagcatccaagcctttctgtgatttcatcagcaccatcatgcaataggttgtttaaacaccgatatgaaaacctgttttccaacgatgctgcaacatttgattaattcttctggatgggatatcaaggtggctaaagcaagcattgcttgcagttatgatgaatttgctgagtgtcagaggaaaattgtcaggccacaaactaatcattcttaggtgcctcatttagcattctgtccatgtttataccaactctacacgagcacacacacacacacacacacacacacacacacgcacgcaaagtattggagaccaccttgaactaaatggatttgacctctatttgtaaagggtgcattagcgtgaaatggaggggggctttctttgagggttcagcaagccatctagcctacatgctgctgtcttagatgccagccttggtcttaaagagcctggtttctaagggaaaattcatttcatggacatcttgttgccaggaatcagtgtgattcacttttcatttcaggatgatgttgagtcctctgtgttattcccagtgtggacgtggagtagtgactgatgtctaattatttggaagggagagagcttctctaagaaggacatgcaatgtcagaagcttccgttgcttggcaacacgtaactttacctatgtttcaccaaaggcagtttaaagggctaaagatgcccattcaggcaatagtagattacaaggaagatctcgaaagctggcccgtcaaaatcgctttccaccatagaaataaacacctaagagagggtttgggacgtgagtggttgcgtgttgcacaccagcaaacagggtgagaaagaaggcagtggtgccatttttccagaatcatactgtgtacatgccctgttaaagttgattcaaattgctcattccttacagtaaaacctccaacctgagactccccttcagaatgtatgcccctgcagcttccccagtttttatgactgtggcacctcactggaacccatgccagccccttcccatccagctagtatgcctcccggcattcggcttcagcctccagccttgtttcatgtcagcagctgagctcatgaaaactcttctttccaatgaaggaggaggctgagaggtgcaccaatggctggatccaggcacacgcaggctccgagttcacagaagcagggccatcatgtcccggctgttgggagttcctgtgaatgttgcaactctcatttctttttgaagtgggtgtgtaagaagcatgtctgttcattgtggcagcctgagttttggaggccccacaacattctttcctatgtggaaagagttttctttttaattcagaaacaacaaaccttctcagcctcaaaccaggccaatcttacagtgtcatggcaaaacaaagaaagaaagaaaaagaagaaattaaaacatgcaaagcaaaaaacaaatagaaaaaaaaagaacacagtgcaacagtcaaaatcaggttaacttaatgaatttgggccgaacttagatttaacatttccttgaagtttggctcccataaatcacctgtctttttcaaacagcagcctctgaagtacaatccagattatttctccccttttgatcaatgcttttcccgggaatcaaacccagctcttaagagcatttataatgaaagctaaagacagctgaccactaactggccctgaacacccaggtaaactctgagtttgcccacaaggaaaagttatggcgtccacatgctccaaaggggactccatgttcaaggtaatctcccaagtccctctgctgctgctggctgtgaggcatcaacatcctcccccaacctggactcaggggctgcagcctcagaggaccagcgtcgtggagttcaagttcagttcagcacttgaatagtacatccttcaggaagccagggcactgaagactgaaaagcagaatcctaacattcatgtatattttaaagccagagttcacaaatcggagaccttaggaattaatataagtacatgtacatgtatttgtggctatgtgtactagttacaaataagagacaagaaaggagatatacaaataggagaacaaagcatattcaaaaatgaatatggcaaaagttcaaatgaatgtgaactaacaacaaaaaaatatagtttctcatttctaggcatattacttctgctttttcaaaaccatttctcaagttattgataataatacgaattctgtccttaaattgctcagtgaaggagagtaaattaatgtattttaagatgatctttctgttttgaagtcctgctgcttccgtcacatttacaccagcagacacggacacttccatctgtccccattcgtcatcactgtgagatgaagctaagagttcgattcactaagttttatatagccagtaccatgtgaaacacaggatttgatttaagtgtgtggtgtgactgcaatgggaagcagtcgaacacacagcagcaatactgcaccatcaccatgacaaccagtggaaataatggccccctttgggaataaaagagatctcaaatcctgttgcagtcagtagcgctggctgtctgcagtagagatggttttcaatgattgtttcagaaattccttatcaacagaaaatgaacgagacggggagttttcagaaaataaatggatttgcagacaacttaacgtcatcatcgaagtcaccaaagaaagcaaagcagcgactggggaagctgaggctgaagtagcaagggcatgccacccaggctgctattccagtcgctgtgaaagcctggtcactgtctttgccacgcagaacacatctctgggaatgctgtcgatctatgcctccatcttttaaaggctttccatttctgtctggattttttctttatgggaggcagaaataatagtgaattgaatgaaatggagtatataagtgtctagcacagtccttggcacatagaaagtgctctgtaaacagtacttcgcatcaaattcttgggatgaatgaaagtgagtgcctggcgctgcacataagaaaagacgtggcagcaaaccatcctcccgacatgacgtgctgcgttggtgcgtttacgtccctgttccttctgaaagactcaaaattgtgttggagctactggtgcacctttgtaagacctgcactaacgaccgcgccactgggaagggcacttctttatgaagtcgccgtattcccagggagactggtcaacccatacaatgtgaaaaaaaaagaagctatgtgaaaaaatattcccctttgtcatagagaaggagaacttggtgaggctgggcagctgcaggagcctcagtttttcagataacagaacagagtagaccttgagggtccatttccctttttgttttaggaagtgctgtagaagggggcaaagagatctttgatatgagaaggtatttcttcaaagcagcatcgtgcctgaaatagcattgttctttacgctgagagaggaggaaatgggaatttggtgttcaacgggtttaaagtttcagttacaagaaatggacaagtccgagagctctgctgtgccacatcatgcctaaagtcaccgagactgtgttgtacacttttttgttaaaaggtaaatctcatgttaaatgttgttactacaattaaaaagaagccctaggctgtgtttgcagaaaggcactaaccatacatgtgctcaagagcccttttgtgttttcttcacttcatgttgtagttcaatttagttttgctttgcaaggatcctcggaaagtgtatcatcagcaatgacttttattttagaactaaatgtgaaccacggggggaatcatgatcgacattgctcgttgtcctttcttcctccctgtgggctgtgaatccaactcgtcctgggagcagggcgctctcgccttctgttcctctccgagctcagtgcacagaagcattctgcttacccagctgggactgctgactgcaccatcgagcacgcaggttgcactgttctcagcagctacactggattatatgccgcctttcttactgactgattatgaacttaaaacaaattcactctgctgctgtgaattatacatttatttttaagcatttatttcaactcgagatgagcggtctctcctgtaaatttctccctgctggatctttgctctggtttctggtgacatagtgtgagtgccggcagccgcgagcctcagaaggaaaattacaaagggaatactcagtaaatgatgtattgcctttcgcatcagtagcctgcttggaaatgttcaaattatcagcccaggagactccagtgctgtggacatgggtctgaacgaattgatcacctaggggctactgagaacgcggtgctctgtccaccatggagcccttgtgtccactcctgctggtgggttttagcttgccgctcgccagggctctcaggggcaacgagaccactgccgacagcaacgagacaaccacgacctcaggccctccggacccgggcgcctcccagccgctgctggcctggctgctactgccgctgctgctcctcctcctcgtgctccttctcgccgcctacttcttcaggttcaggaagcagaggaaagctgtggtcagcaccagcgacaagaagatgcccaacggaatcttggaggagcaaggtacagaagctgctctctggctggggcttgggggaaaatgtgttcttttttag

SEQ ID NO: 2253 - DNA, 1826 bp, Homo sapiens
caaggatatggtcaattttagagagtgctttttgcacagatgagaaaaatgtatattcttcagttggttagaatgttctgtagatatctattaggtcaatttgttcaagagttcagtttaagtccagagtttcttttttatcttaagagtatgatcacggtatatgttgtatatggtcatttggcttttgtttcattatttctgcatcaatgatctgtatagtgctatcattggagagttgaagtccccaactattactaggggctattatatggctgtctatctcttttcttaagtctagtcatactttttgttataaatgtaggtgtttcagtgatgggtgcatatatatttaatatagataaatattcttgttgaattgaactgtctatccttatatactacctgatatggtttggctctgtgtccccacccacatctaattttatagtccccataattcctgtgtgttgtgggaaggacctggtgggagatgattgaattataggggtgggtatttcccatgctgttctcatgatagtgaaggggtctcatgatatctgatggttttaaaaacaggagttgccctgcacaagctctctttgcctgccaccatccatgtaagatgtgacttacttctccttgccttccaccaagaatgtgaggcttccccacccacatggaactaaaagtcattattgaagaattatgctactattccttgctgagatggatgagggaaggaaaaacataatcttattaacttttaaaattatatttcatttatgaggtaaggaatttatgaaatgaaacactaagcatcatatttcaggtaaattttgtgatataaatcagttgtatttatagattcaaagctaagcttgaaaaaagtctcagaagctaaggggctgatgaccctataaactgtaaaatgtgttaacaccaataaattctggtccctcagttcaaagggcatttgattatacgctgcactgtcagtgctactcacatcggagctcatcttggaatgataaacaaggcaggcctgtaatgtataccagagaatgacaagatgcacctgtccctacaagttttgagacaaaacagtaggcacttgcagacagctgtgtcatctatgagaaagtctactcataggctcaccaacaggcaagaagaaacacccccagccagtttagactacaacatcacaatgtttgcattggtatatcttttatttctctgagattattttgaatagaaaactatgttggctaaaatctattagtaaaattcctttgtatgtaataaagggctgttgatctctggtggctttcatttctatgcacaacattttaaagtattttaataagtattacgtaaatcaatgttaataaatgttcaattggcagaagaacatgaattattatataattacctttaaataatttgccttatggtttttcatcagtatgatttttaaacattctgagggtttgatttacatctctttaagagggaaaaattttttgccttaatagaaatttttccagtcctgaatgttttactttggtcatttatgcctaatcacgcatctctcacaaagaaccaccccaacaaaacagatagttatttaaaacttattacaagatgattaattgaaatactttatggtcagttcttatgtttaacagctggtacttgtgctggcttgttatcaaaggaatatttattgagcatttggtattacttattatttggaacatatataggaaattattcctgctttcttgttatgtatattctgaagaaaatctgtgtaacctcct

SEQ ID NO: 2254 - DNA, 9853 bp, Homo sapiens
cactgagcactgagacagggtaatgagatctggcattgctgggtggctgctttccattggatggtcagggaggcttcttggaggaacaggatttaacttgaggccaaaacggcacaagggtagagccatataaaactaaggagaaaccattttaggatgagggaacaaaccctgaaggtgtgaacaagctcggtgcatctagacatgtaaggaaggttccagcatgtgaaggagcgaggacggagaagggtccggtgaggtcttacagcaacagagggtccagccacatgaggctgagcagccaagtgatctgcctaggccagctccccttcatcttctgccatgagtggaagcagcctgaggccctcaccagaagcagatgttggcactatgcttcttagacagcctgcaaaactctgggaaagcggaaatctggagaactaaaatatcttgctgaagatcacaatgcagtaaagcatagggcaagtttccaactcgaacatcaccccagaacacttccttttaaacataaattatgttgctaacttttttattgttacttagcaggcagatttcaaactgatacaaatgttgaaaatgatacaaaatgttttcccaccttaaaggcattctgaaacctagcacataacatctgtcactgaagtccatagtttccaatgccatgattggataaagaccctattgagactcatgtgtttgtctctcactgcttaaaacactcatgtgttttaagcaacatgacaagcacaaaagagaacaagtactgctcctgctctccaggaagttaccataaaataaaggggataaggtgccttccaaagaaaaaacaaatactaggagaggtcagaggagaagagagattattccagaaggagagactgaggcagatttcaggagggaagaatataagagtcccaaaagaagaaacaggaacccaggttagagagcaatgggcaaggggtaggaggtgagactaaactcacaaggaagttgcttcaaaacaatagtgccccaaatgccaagctgatgggttggacccatttaggaaaaacccacaaagtccacaggagagcagactgcacttccatgagcttcaagctgtaaacagtaacctcaaataaaacttttcccggatcggtaatttccatcctgaacaatggccaagtcaaggaagctgaggatcgagccccctaccgcatgccacaaagaacctcaagggaccccatgctctggggagctcgcaggaggaccagcacagaggtgtgactgcgttggggcagggtggccacatgtacaatgttgtaccttccaatgttcctccttaggctgtgcttatgaagtcccaacatgtcttctgggctgtgttttcaaccaagagagttaataaaaagtgggatgggcaccaactatgcctccagagacatcaggcagaatatgccacagcgtgccatgtcctcctgcaaacagtcagaaagaaaagatctctaaaagcagattggaagagactatatatacagagcgagtgccggtacagaagttttgctgcaaatacaccctctaatcccttgcaacccactgcaagctcgagagaccagtgcccttggtaaaacataggagagatcattaattaaagcctaggccctttctttgatcctgagggataaggcttgggaaaatgcacagtgataaaagtgaacattttaaaagagcagagtgagtgtgaattcccaaagagaccattcatatcaagacccaagccatgagaaaatgctacaatgcccttgatcaatactttataggcattttgacctcagatctaatcccatgaggcttagaccaagaccttgcttgatgcagacctctctgactgctgaaattggtcaggagctcagtgatgaaaatttggaaagtcaatgctgatacctgaagaaagtcccatcagagatctgtgacctgaatcttcataactttcacaggccctttctaaatgccaaggaggatgtgtgtggagaagaatatgccacctatggcatcccaatatgcctgtgcccgcctgctcttcaacaagggaatgaaacctgggtattctcataggttttttaaagcacttgtccacatattttattccgcaaataacacaatttaaaattcagctagaatttgccattttctgtcagggttgtgcatttcttccagtcaccatgacttcctgagatagccaaaacacaaaatttaaattgtgtttaaattaaataaacacaatttatgctgaagctgactttacccactctgttccaacattacttatcctcagcatctctgaattcaaatatcagccaggtgtggtggctcatacctgtaagcccagcactttggcaagccaagatgggaaggttgcttgaggagttggagaccagcctgggcaacatagcaagacccccatctctacaaaaaaattaaaaaattagccaggcatggtggtatgcacctttagtcctagctacttgggaggctgaggtgagaagatcacttgagcccaggagcttgaggtggcagtgagtcatgatcataccactgcactgtagcctgagcaacagagcaagaccccatcccttaaaaaaaatacctgccctctgtacttcatagcacctggggcattttgaacagttcttccttcacctgaggtcattatttgagaatccaattttagagactacaatgctctcattacttggattgtatcatttaatcttcccaacaatccaggaaggggagtctcttaatgattgtccttgatttccagttaaaaaatctagacccagaggtaaccttgtgaaggtcacagagtttcagagttctaagatcccatgcgagattgctgaacttgaacttgtttcttctgatctcatgtcaataagtgacttagtcaacacctgggtagaaatcatcactaaagtgagaaagcacatggtgagggggatgaatcctgtgcccacatggtccctttcacctgcccaatcctcaggcctctcacctggggtacccctcacacacatggcactttcctgaactcatggacatttcagtttgtaacgatcctcctaagattatctactttcacctatccacatttgaactatacttctttagtggaaaaaaagaaataaagccagtgctgagaatgatcaaactccagaaatagtagactgctgtataatttgtcttgcgtgacaccagatctttcaaggaactgcaagctcaagtgcacagttaagcaagatcaagatctacctttgtctttcagagccttcccttggcgaggtcaaggatatctgctgtgagcctgggctggctgaaccaaagggcaatggaggcggccaagaagccccagccaactgctcccctccccaacccccttctccctggaggtcccttcagctagaatttgccattttctgtcagggttgtgcatttcttccagtcaccatgacttcctgagatagccaaaagcatttgctgtgagcagagccccatggctggctttgcacatcaaacatttcagacagccatatatttcatagaatacaaggggaagataacactggacacacagaactttccaacagcttgagaaaatgtggtgcctggtgactgactaaatatacaatcggacaacagccaggccatagcaaaagatggaactctgatccacaaggtgcagcaactttcccagaaaacaatacccttacccacaaaaagcaaccccggaagctggcctgctctaaatcagacctgctggaagccaaattgctctctagtaactatccaggaagctaaataataacttctgtaacaattgactcaaaatgttcaggactggattaataactgatggcttccctaatttttgtccccgattccaacttaggacccaccagagaaagccaaatatggtcccctgaccaagcacacaggatgttcgcttctagtgagccgcctccagcttccccgcattgataacctccaatcagggcacacctgaagccttcgcctttttccactataaagctctcccactcgtctgcccacctttgagtctctgccaaattgcaaatgatggtgtctgactcccttgctgtagcaagctctgcataatagcttgtgcttattctctttgggtaggtcttcatttcttttcacaccagataggcatcatctttgaaaacatctttactgggtctcttgtctccctcctgcagccactgatctaaatcacagacttttttagaaagagggaaaatagtaaagaaagaaagcgattgagttgatgctcccagccactgtctgtaccctgaattttgtttttctgccatatgtcaggtggcctctcctggaccatcgtcactgtttctcctgcttccctgcagctgcagacacaggagcactgtgtaggtctggccttgagcacccacccacccagtacagagccagcccctgctgttctgaatcagtgcagtgaccacttagaacacagtgcccatgcctctgtgatctgaactgctctttccagttccatacaatgttaagaacccacttaagaatgttttaatcattcagtagtttttcgtggtatataataaaaaagtgatttaaatacaatctattttattttagattatatcattaggggttattttacaaagttacctttaaatactattgtaaataaaattaataacaaataagcaaaattcttacttttccttgtttgacaattgacatggtcaatttaatttcctttaaattaattatgcaagaaaaggatatttcctcaagaaaatttaaaatgatatatatttcttggttgggtgccaaatattcattcagaagaagacggaaatttaaatccttgtttctaatttaaggaaaaaactactttcattattggatgtgtgaaattcacccattttgtgtttatctagaaaatctagtttattgtccaaatgttcttattttccccaaaagcatcagttaggagagaagatttccagctgccattaaaatacaattgtgtgcaatgaatacattttgggtatagatagtttttattctctataaatgaaatgccaaattggatagaaccatcctttttttttttttttcaaaaaaaaaaggcttttggagtatcagagacatcctcttatgttattttaaaataaataattatttgagctgtttgcttcttggaagcagataacaagggggcaggtgagataaaaaaaaaatatatccaaactgaggtgagaccaaagatggccaatctaagaaccaggcagatgtctctgcctgtcctgggaagattccctcaccaggctccctcactggccagaggagcccacttgttgggctgccaactggttcctataaattctaaggcaattagaatcatgtggtgactgtaacgggaatgacacagctgcccaggcattagaaggaaaccacacccaatggctcaagccagtggcgagagataaaaactgagagacatctcccctgactagcagactgggctccctgcttccccattgcttcctttaaacaggccattcacacatttgcctgaaaacttacagtggcccagaccctactccctatacacactgccagttgccatgtgccttgtttctctctctctgcatgatgcttcattcctatctggagtggcccagggacaaaggactgccctcccgactctctgtgccctccctgcccaggatccgtaaattacactttttgaatttgtttcctactgtggtgtatattgcctttgcaccttccatctgaagaccaggggatgccccaggccaggttttacctgggatgcccaagagagcacaaggtttggctcccagcgccagagcaatgggcaggggggcataaactgaacacaggaaaggcaagagccacaaagacatataaacaagtttcccaggcgaggagcccctggtcacaggtcagacaactaggcattgggccatctaccaggtaaaagcagcatcctatgaaaggcacgcagtaaataccatgtccatctccccttcatttccccttagggcggtttgctagctgttctgggactggaacctcagtttagctgggggctctcagaacagacagctagatgaattaaacaatgaagtctctcagccttaggcacatcttccaggacaaggggaaggccaggggagagtaacatcagtgatcctacaagatgtgcttccaggccaaggccaggttgcagttgcagctacttagccatggtacacggtgggcctggagcttctgggtgtgcaaagatgtgactcaagagtccatctgccagcagtgagcagggcaggccagctctcctctcactggtacggtggttccagccctcacaggacattaaaaccacctggaaactgtttatgaaggttcctatattcaggaaaaatccctagagattctgaccgaaggaatttggtgctgcctgggtaccagtatttttaaatttccccagatgatcctaacatgcagtctgagtgaaaaacccaagtttgacggctacaggaatttagagcttctctaaaacatacagggaataataccagggccatacattggaagtccttccattgggaatgcaaagaaaaaagaaaaagatggccaacatctaccattttaaagggattccagcaagcatattattaaatgcagggctgcctctggcatctggaagcagcttgggtgccctggatataattctcttttaaaagtttttttcacagcttttatagaccacttaaaactggccttcatcttgtgccaaaatagcagggctgtgtttgtttagcttcaagattttcaggtccaattgattaaaaaaggtgagtgagaagcctgccaacacacagtgaggctgtcacccaggcagctgctgctgctggcttccagcatccagaagctggaacatcagccagctccaatcacctgacagaggatggatcctatgagaaggaggaccggggcttaaaaccagacgtacccactgaagtcagggcaggagatgaaaatcttaacaagtgaaggaggtatgaaaacaacagattctagggatcagcaaccaatgaatgagggtccattttttgaaaaacaaatacttctactggctgtcttttgagtgccaggcattaaacaaagtggaagaaaaaaattggagggtgactcaacagatggaccagatcaataatgaggggtaatttgagcaggacaaggctggagctggaagtgcatgcaggatgccagcatcagagcagccaggcatcagagagccagccttgactactcgccgggcctcaggggctgagccttcgtcccaggacaagggagtggccagagcttggctggccccgttccagatgaggactgtgataccagtcaggtcaacgagcaccgatagaggtagggcccaatataggaccgtgtctcacaatggtgcagacccgcagtccaacacacaggaaggatgcttgttgctaagtcttagacacgggaactggaggagggttgagggcccccagcagtgggaaggcaggcatggcatgcagacggtggacgcggactcaagacaccaactctcatcactacaggtccgtggtttggaaagtcccagcaccattccagagaaggaaacaggcccaggtttctgatggggatgggtagtagccacagagcacaagtcagccgcacccaccacacacttgctgtagtgccacactctcggccctagagggcactgacgctttcccttcgctctgccccagggccagggccaaagccatcaagtcctgggcagagggcgggagcgttcagtgagagcagcacagaggttaaagagctgctcttttttgagatcttcgctctcacttcctttccaggcagccagttcagcaaggtgggtctggggctgcctcctgggagaagaggcctttcaccctcgaaccctgcaggacctcagtttgtcccagggcaaacctcctacattgggcagttaggtcagacctgcttcaggccttggaagactgtcttctccttggcttctcttactgcactggatccagccaggacactgatcagacctccagggcccaggttaacaatatgtggcccagctctgggagagaagccagcaggtctcccaggcttttgaactcggagctgaaaaccaaacaaaaaaacgaatccaccccattgacaagtggcccagcctagttggccagtcaggagactgcacaggcactgaggccaaagctgccttggattaagaggtatggatgccaccgctgcccttttactacaggtacactggccgggaacctgtagcactgagtgacacctgatcagagagtcacccactggctgggtctcccccaactcagatgcatggctaacaatcactagctaagcatgtattcactctgtggaaagccacgtcacgttcatatatttattatctcatgtattaatatactgatgtaccacattattctaatttactacctcacttaattcttacaacaacctaatgtgatgggcaatattattattagctccattttacagatgaagaaacaagacctgaaaaggttaaacaacttgcccaagatcatccagccaagtcatgataaagctgcacttgaacacacacttctcagattccaaagcccaagtttctctctactaactgtatggcccctgcactcaaaaactgagaaatctctctgccctggaatacaacaagaagtcaaccgtctgcagcctgtaagagggcctctcaccagaacttagccatgctggaaccctaatcccagacttccaggcttcaaagtgatgggaattaaatttctgttgtttataagccacctcgtctacagtactttgttatagcaactcaaatggagtaggactgtatgcaaacaaaacaacccatttttgatatttgggaaaatctaagatctttaatagtagttggaaattttcagcaaatcctaatattgggtgcgtatcagtatatgtgtgtatccacaatatacagtgtcatacacacacccatataagcaccatctgcattatataataggcacacctgtatcctcaacgttggtgtacagatgcattcatattacccatacagtatgttctgaagatagtcaataaactcagacccaagacagtcctcccatcttttaattctacatagaaatcaggacgcacctgataaacagcagaaaatgtaagagaggccaggtgcggtggctcttgcctgcaatcccaattttgacacactgaggcaggaggatcgcttgagctcagaagttcaagaccagcctgggcaacctagcaagacctggtctctactgaaaatcaaacaaatttagctgggcaaggtagcatgtgtctgtagtcccagctacttgggaggctgaggcaggaggattacctgagcccgggagatcaaggctgagtgagctatgatcatgccattacactccagcctgggtgaaagaacctttgggtgagcagagcagaagtcaagcatttctgggtccctggctccgatgctgtcttacgggcaccacttgttcctaacaggaagctctctttgtacacaagttataattacccatcaaacctgcggctctgtgacctttagcaaaatcactgggtgttgttttcagaaataaattagatacagaaatggagaaaatgcacagagtaactccagacatttttg

SEQ ID NO: 2255 - DNA, 1143 bp, Homo sapiens
gtacaaacaatgcaggcccaccacagtctacctccaggaggaagggggtgcaggtgggagcctctggaagccaccaggacctgcaactgatctgggggtacggactctgtgcctttctcagatgcagcacttgctcagggagagggaacaagacctgcgccacctgcaagggggagaagaagctgttgcacttcatccagcttgtcatcatgtggaagaacagcttgtttgagtttgtgtctgagcaccggctcaactgccccagggagctccttgctaaagccaaaggagaaaacctctttaaggatgaaaactcggtggtgtaccccatcgtggacttccctctgcgagacatctctcttgcctcccagaggggcattgcagagcacagcgctgccttggcctcccgtgcccgcgtcctgcagcaggtgagccagggcggaggggccatctggctctgacgtctcttcctgggctgctgagccctctttcctgagaacgtcggagcggaaggatgaggacgtagagcgccagaccattgagctgatccccctcacagaagttcactattggtaccaaggaaagacttatgtctactacatctatggcactgaccaccaggtgtatgcggtggactatcctgagcggtattgctgtggctgtaccatcgtgtgacatagcatggctgtccccagagcctgccattcacgtttgccaaggaagatggccgacactctctgagtgtgttcactgttggctgcattggacaatcacatacaaaccctggcatgtccttccagaaaaaccagcttatcatctatcaagctccaaccccttatacagctcctctggtggaatccatgactcatatgtttaacctacaataattcagctatacacattcctgtagaacaaatgagagaaataatttaaatggcaaggactttgcctctggtctccaagttaatgccccgatgatgcgtgtgatttgattttgctttttccctttgtcggtcttggttctggtgtgcttcttctagtgggagcctcttgacgatctgagtattactgaaatgttcaaggatacacacaaatatctggccctaatgcacaataaatactgcacttaggcataaagtgcaa

SEQ ID NO: 2256 - DNA, 4586 bp, Homo sapiens
ctcacacagaaccccagaaccccagtgtataaaagaggtgatgttaatataaaagtattgcacaaatgggtaatgattgcttattataaaacctctcaaagaaaacaaggcagctttgatgaaggcagacgtgtggcgttaacggttcccattgctatcgtacatggacctcagaatccatcatattcaagccaagtgtgtgcagtaacgcaatgccacagcttcaaggcttcaccagcaggtcgatggaggggaagctgtcctggagggatggagccctgggctgtctccctttcactatggagactcaaaactcaggacttagccttccttccccatccaccccacccctccctgggaagtagtcacagctaaatttagctgggagctaggctttctaggggaggcgagagtgagagggaaactgtgaggaacaatgccaggcacactaattagtggtttggcagctggggaggacaggagggactgcggtgggccaggccctgaggctgcccaggctcctctggaggaaggcaggacgtagccacgtctgcagggcttggcagagaggtggaagtggtccatctgttgggaaggcatggggctggcttggagggtgcttgtaggaaagatcaagccagtggagtcgaaacgtacccgagtgtgaatcctggtgctgccacttgctcactgtgtgtctctaggatcatgtgaatccaaagctcccagaagccatcttgttgccacataaaagagaaaaaacaggactgagagatgaatgaggtcccagtgacactggatccagctgttcctgaggccacacccgccaccctttggatttccctggaacttaagccaatagattccctttcgtgttaaaatttatttgagtaggccttctctcatacagaaaaatcatggaagtaggctaaagacattctcattggcatctagccagcttgctagagcatttggagccacagctttacctagtaatcaaggtttttttttgtttgtttgtttttgttttttgccagcgccattctttgtacatatactatattttcttgattcaagcacgccatcaataataacatgtgtcgtcaatttaattagggctttttgggaaaaagagagaaagaaaaacacagcataaactgcatttgttgatagtaagatttgttttgatttccaaaaggttaaactattggttagggtgtaggaggggagggagtacatcttgcaattgagaatatatgaaatctccctagggggctttttagaacgagatggcctgaggtagggtccaagtattcctatggcctggtcaaatagcatcttaattccacctaatctattatttccaactctctcctacatgtaggagcttgatgttgttctgagagtgttccccatctggctctggacttgccaatcctcactcgctctccttcttcctcagcaattacctcttctcaatcctttctgggctgggctgagccctgacctgggggtcattcgacaattacccctgaagacaatgggcatggatggctcagcagctgtagaatcccccaccactttccatcagtggctcttcatgctgacatgggaaacccatgaacagagttcccatttaaagaaagtgacctctcaataagaaagctaattagatacgagagagagaaatcttcccagagtaataggaagagctcccaaacccaagcacattcagctagggagaccctctctgccttggccaagaggcagagggagagtgaaagacctacttcctgggcaatgacgggtcatgtgctcatttctggcttaggcattttatgggtgcatctgtgatagtgaaaatacagacagtgcttaggctatgggagaggattaggtggggagagaaaagagaacttttaaatgctcctaatatctcacttgccaggaatcctccacttcccctttgtagaaccaatctgtgatttatttatgattaggtgtaacccatatggctactgcaggctctaccacgcccaggccttgaatgtggtcctgactagggcaaggacatcattagaaggtggagtccaaattagccatgtggccacaggcccaatattatgagtcaagaggagcccatcaagcttgaaccttccttgcactcaccggtttggtatagtgtctatgactgagtttctgcctcagtttccttgactcatgctataggtctcctagcactggaaccttgtcagattctggtcaccaaggtttgggacactgctgagctcaagagtctttcttccatggatggctcctactcctctgatacctcagatttgtattctagcagagcctatgcagcctgcttcccaggtataagcatcaatcatgcacactgttatgatgctatcctctctgccatccagcaatatgctctgtgatgcctgaggtcagaaatgacacaaatagcacatgtgccactattttgctcatccacccccatgcagacatcactaattgatctctgccctcttctcagtgaatctagatgtggtctgaacacatggtttttgtcaaccacaaccaattgactgatattggcaatacaagacaaagtccatttgccctcactaccatatccttctatcagtatatacttggccctcttagaactccagcccatcttggttcatcactcactccatcctgaatcccagccaaatacaaagccaaggtgcctcagtctagagaacctttgagacagtcctcccagacctcatcagggtcccttagtccttaactcagagattaatatcttgcctagaggatggggatgctgtacgttgcacctggagaattctgtgtccccaagaccccacctacacctgcttctattattccaggagcttcaacctagagccgccaatagatcaactgctcctattccaccccatcccaccccagatctcattacctgaccctctcaccaccgttcacctccacactgtttccagaggaacttctctagagtataaataacagataaagataggtgagtagcctgggtttccagagcctcagaaagaaattattctagggcttatcaaacacttcattgttttgcaattgctggttgacaggtttgtctgtcttacttgtgagctcctacaagtcaccaaaagacttggtcctgtttatcttcattttttttccatctaataactagcacaatgcaaggtgggatgaataagcaaatgagccacagttcattcttgggtactaggctcaggaagttcatgctctctgccttctcatcccctataagccaccagccatgtccagtgtggagtcgtaactaccccaaggttccccaggtccaagacagtaaaggcccccaaggagtatgcaagtgctggtgaggaaggtgagtgtcccccagggattccactgccagactctctcaggcatggaaactgtgacacgctcccatctagccataaaaaatgttctctcccggggcagaatgctagctcactgcctctggagattctgcatctagtctggaaagaggcatgccctgtgaatgaccagagcatcctggtgcccacttctggtggaacctaaaaaaggacctttatttaagtcgaagtccagaattgcatccaagatgataagcagaggactggcccgcctcgacctgaagctccctctctgtctccaggactcagacacccctgagcatcacgcctgacctcagcctcatggaagtgacctcagcctcatggaagtgcccactctggggaaagcatacaaggagcacttactcggtcctctgtggatgggaagcaggccagaccctggccatggaacaacaagcttctgagaaacaggagttctgctaagagtcctacagctgttgggatatgggcaatccctcaagattggcctcctctgacccctgttgttgaaccaccttttacccatccaattttaaactaattggtttaaaattgttaatattcagtgttggggagggagtgaagaaatgggtatgcattactgataagaacataaatctccctggaaagcaatttgaagccacataccaaaactctttgaaatggccatgcccttatagatttattctaaggaaataatcagatgcatcccaatgatttatgtataggaatgtttcacgacagcattatctgtcaaaggggaagagtagaaacaatctaaatttaaacacaggggattggctgaataattatagcaatataaatagcataaatatatatatttcgaattttatgcactaatatgcacatatatgcctggaagaataaattacatattaattgtggttatatctagggggtgtgataatagttgattttaattttcttctttgtgctcttgtgaatgtctcccattttcttccatgaacatgtaacacaatctgtaaaagcaagacatgtggtcttgaaaaaagatgagcatatccaaggctggctgtcaaaatgcagtttgagtataaattgtttgactatttgaaaaagcctggagatctcacttaaaccaac

SEQ ID NO: 2257 - DNA, 2836 bp, Homo sapiens
agcagaggaagaaaatgaaaagaagaaggaggagaagatgaagaaagacactaaaaggaaaagtaactgctaatcaaaccaagaaagcccagctaaggggtaatcctgcaacttaaaaatatgtcatttgttattttgacagctccttttgaggtgatagactaggaggagctgctggcatcatcaccgactggctgggagttctacttcttgcttaagacatcagtaaatggataactgcagattgcaaggagtctatcttctaagattcccagcttgagctcttcgtatactggggaagaccaagcagagggaacatggccacctgcagggacatccctaggaccaggtaatgggaaagcagaatctgagctacctaagttcaagaatgggtcaccttggcacgtggaagaaaatggaccaacctgaatggagcagggaggtgcacacggacacagggcatctatctggatcgtggagacccctctgctggggttggaggactcagtatggggagcaggaagagctctggccagaaaggcagattggggctgggactgggccaggcagagacaggcagcaggcctctgttgagggccttctgttggagggcccatgtcgggcgctctgcttgtgtgatttcctgcgtctttgtggacttcactctcttgtcattaattccatgtgtaatcactgcctcaacacgtgtctaccctggtgggaaatgagcttcaagagcccaggggagcttgtcagttttgttcatcaatatctctcctgcccttccggcctagaacagggcctaaaatgtagctacattcagtaaacactgaatgatcgaagaaaaaagtgatttcatttagcagacatgctcccaagcataaagtttattggaggagctactcaaaagcatcttttgggaagatagggtgtgagattgagggccggaggcttggaaagagaataaacgtggcatccagttagagacaagggagttggccacagagaggccctaagaatctagtctgtggaccggttttcattgaccctgtgcttcaaaacctgttagcactcactagctgtgtgtcctgggcaagttactgtacctctctgtgcctcagttacttcatacctaccttacagggccattgaaaagtttaaagaaccgaatgtgtgtctgactcatagaaagcaatcagtaaacaataaagtattgttcttgcaaagactgggactggaatgatatgaaatggaaggaagagatggagttgaaggacactgtgaacaaagaatatgtcgcattcaatggcttgttggaaacagggtgggcgcttctgctcttccacgcgcccttgattggaagctgctgttcgcaaggcacagacggctctgagctccagacaccgatgacagaggcaggcacagaagtcagacaacacacgaaaagaagaagggcagaatcgcccagcgactccataatcagcttatgtcgtggaatttgatgtgagcacgttaggaatgtcacatacgactacgtgggtttttcagcctatttttcctgaatgcggattttgttggcaactgaatgtgtgctaacaccctaagatttagttgcattttggttaagaagtccagaagactttggacttggctttgaaaaaccgaaagtgaattgaatttgcattatttaaggggcttattcagatgaacactgctatctcttcagatgtaaaaattccaagactcaagagttgatatttcagcagcaacaatgacatctaggggctggttgctacaggtttaatcttagctatatatggtctacattttgaaaacgaagagtgctaacatgttgatgcaatccagaatgtctgcttggactgtgtgaacttggttggtggccagggcaacgctgatggatcaaagaaaagaaaaagctgaaagtggcttatgctgtcatctaagaaaattactttgcttctgaaattgcaacacctctcagtttgcttgatatactcattttccccctgaccttttaaccagggatgtggcatccttctcagctttcctgtttaatccaggtccactcttcccatgagtgacagaaccaactttcctgcacggagaggggctggggcctcaggttctagccgcttttggtttttcccatcctttgaagagccggtggagcaagtctttggcggttcatttcatctctcccctatggttgtttgttttgttttgtttttttgacacagggtctctctctgtggcccaggctggaatgcaatggcctgatcctacctactgactcctagctgagcctccaactcctggactcaagtgaccctcccacctcagcctccagagtagccaggactacaggtgcatgctactgcacctggctaattaattttttttttttttggtagagatgggggtcttgctatgttgcccaccctggtctcaaactcctgatttcaagcactccttctgactcggtctcccaaagtgctgggattacaggtatgagccaccatgcctggctcccttatatttttatcagattctttcatttcatttttattttttttgagacagaatcttgctccgttgcccaggctggagtgcagtggcatgatctcagctcactgcaacctttgcctcctgggttcaagtgattcttctgcttcagcctcctaagtagctgggaataacagggcctgtcaccatgcccggctgatttttatattagtggagacaggcttttacaatgttggccagtcttgaactcctaacctcaggtgatctgccctccttggcctctcaaattgtt

SEQ ID NO: 2258 - DNA, 637 bp, Homo sapiens
gggacctcagtcctataaacaccaccaacagaatgaacttggaagcagattttcccccagagcatccagataagaactcagtccactcaacatcttcagctttgtgatattccaggcatattgtgctgaacttctgacttacagaacttcagtcctgaaaggattataaaagcaagaaagaaacatggactctaagaattaacaacagtgtgggaagccacggaggagatttatgactaccctaaattggtttgtgtttggatggatgactatttcctgctctttattactagaaattggcagcaacatctcagattggataatggtactggtggaataattaccagaaagaaaaaaacatccccactaaagtgatgaaaacatgtacagattgtccaaccttttgcttttgtaccacttccccttccagatgtcagggttgtgatttatttctccctaagagtttaaaaataaaactctcatcataaaatttgcctgatactgatgaaaaataagatgtagtaatttaggctttcagactagactcagaaatagaatccattaatatttttttactagggatccatttaaaaacatctaaacatgatgaaaatgaaagaatggagagaaatatgcc

SEQ ID NO: 2259 - DNA, 4968 bp, Homo sapiens
cattgtagcatcaagaagctgcagtttgggaaaatgaatccttcctttaaaatgctttttgggaatcacttaaatttgattttacacatacaaacatcggcaaatttttcagaaactggctggagatgtagcagggacgcatccaaggtaaggagatgcttggacaatcctgcagctgcagctctgggatataccaggccatctgtcctaggatgaggcctcattcacctagaagaggcttgataagactgtagctaagagagtgcagtacaggtatagaacattccaattcaataagaaaacgtgtgatttatcatgaggcaataaaatacatacataagaatctttagattgtatctccattataatatctactagatatctgttacagctcaaatgcgaataaaatgggtataattttatgacattccggtctgctgtcttgtgtcaaaaaaaggaagacaaattgaggcagaggaactgtgaacagctctgctcatagaccttaattatagacactattctatttgcgcttcctaaaaacaggaggcatctgcacttttggtcatacaattgaaagagttaaaaagagagagaaataaaggaagagaataagctcattaacagaccactaagaaacacgagagagtaatttatttcttgattttatattgagtaggaataaataaattttactgaaaaaaatttttgagtcagtctaccttttagagttctgataatttcaccttcattatctaaggaaaaaaaagtctctagttaatttgggacctaataaagagaaaaattttctaaaaaataggcttcatatacacttttaatagaagaatggtctttctctatctgaaaaggccatcatcaccattttatgatgcaaacctaagaaggaaaaagggataatgggaataatctctgaaaaagataagctgaatgcttaaaatgactcttgttgcaaataacttatgagcatattctctcctattttttttctgaaacataacaaaatcttattttctaaaatgtaaacaccagattttgaagcataaatgagagaaaattgttcaaaaaaatttgttctttcctgaacaaatatctttcagcattttataaaacaaagctttgaaaagataagcattaaaaaaaaccattttctcctggattgaacgcataatataaagaagtacatttttacttctgccatgtgtaagaaacacttttttccccaaattgttcaatggcatgacaaaactccatttgtgtatgaatatataaaatagaagcatctaataaactcaaataaccatcagtgatttattaggaaggacttactgcttagatgttttagatatgaatttgtccttctattattctattatccaaattttcaattaattatttgtcagttttatacttttttacttatttagaaatgtaataggttgtttatggcagcaaaacaacaactctgtaacagaaccattcacaattataatataaagacactgtaatgtatttttgaaatataattgtggaaaatgaaatcaactgcaaaataaacagaagacaatatgtgaaaaagcagacagccttggaaatcttatacaaaaggaattatttactctatatgggtaacacagagggactttgcttttattgacagccatgacaactatatgcctagcatacttgttgaagtctctagatcctgtgactttctggtggaaaagtccagaaactctcaagaaggtacctctatgatgtgggggcagcagctaaaaggtgaaaaagaaaaagtcagacagaagaattgctggtgtgtggtgtgtatttctactaaaatttacgtagagcccattctaaattagaccaatttttaaacacatggattttttatgatgttgtaaattctgcatggttgaggcccttgaagagtcatacaggtgtgtttgtgtgtgtgggtgcatatacacatacacacatatatatacacacacatatatatatatacatgcacctttgtgcatgtgtgtacacatatatgtgtgtacacatgctgactcataacataattcactattacaggatccatatctatatatatatcaatgaaaaggaaccagtattgaatttcccctttatttctccattgggctttgttgtctctcaggcaagacggactgatgtcaccatgaaaataatgaaaaaatccactggacctaactttcagggatgactgctcatgtccaagttctagggcatatcttcactatgaaagacccctattttataaagtggctgattgaattcatttccaagggtagtgtccttgcattgtagaatagtagtataaatttagtttagaatgaatcagagacattgctttgacttctaggcagatgtggtttgtaataagaaacatgttaactatgaattttaatttatttgaaagtggcataatttgatatttgtaccttgttcctcgaagactaatagatttagaggtaaataaatgaggttgagagatgtgtcacaacttaggggagtttgcagtgggcgcttgccagagatagatgtagagggatttgcattcaaaatgtagatggctggcataatgtaagctatgataaatggcatgcattgatttaatgaccacatccttgctcttatcaattttcctctaaccctgtgattaagttaggaaacacattctgatgacccttggtagaggttttctctgacattatttgaactctttcaactttaatagttttttccccctgttgttgccacagacattatgagatctgcttgagggtagaaatatctagtcattactcaatctgctaaaaatatattataaagaggagtgggaaaaggaaaaaccttcatcgtttgagagtggctggagtttgacccagttgccttcgaagaatggaagatcttcccttaggagagaacttcatttagaaaaacatcctttcaagtatgaagaagctgtgccttagagcattatgcacagaaaaaaaaagaagaaaaagaataattaaagaaagaaagattttattcaccaaaaggaggaaatcgtgtgcaagttttggctggcaggccaaaggactggaggattcaggaattagaatgaggaaggtttggtgaaagatctacaatggtaattttaaacctgactgcatattgaaattaacaagaggaactttaaaagaatacctcttggttccacttcccaaagattctcattcatttaatatgagtggtcttgcataacaatatttttataaagcattttcagtgactccaattctcgcccaggagagaatcactagagagaaggtgtccatgtctgtcccaggatgggttttacggggaagatggatagtaagataatgtcaagagtggaaataggagcttgataatatttaaacttgaattatttctgttctagttatttcatccttactctgtgctaatgtccttactttggtgaactgtgtcacacgtacccatcttggactgatgggattttggggaatgggaatgaggatccagtcctggtgagaagaggtgcccaaaagagtagcaatagccaaaaatgaaacaagaatctgcagaggtcagctattaggaacaagagctaatcagaagaatgcggtctgcttgatatgcctcaggaatgttgttagggttctggacatcccactaaatgtggcatggggtctcaggatttattatttggaaacaattatctcaaggggctagaggaattggagttcacctcttgattgtgtcaaaattcatgggatatgtgcacttcaaaatatgttaggagggtagatctcacttcaagtgttctatgtacctgtatatacatacacacatacatacacctccaaaacaaaaacaaaaatgaaagagcacaaggaaactttaggaagtgttggatatatctattttgttgattgtggtgatgatagtatgtgtgtctgcttatgtccaaactcattacctttgaaattaagtatgtgcgtcctttgtatatcaattatgcctccacaaagctgataacagtcaatttgtgtttaataaaaattttatgtacctgttcaatgagattagtaaccaccttgactaatccttgttttaaatccaaacttccacctttttaatagccatgtgatcttgagcaggctaattcttctcagttttcatgtgttacacggggataaattgtgcatttcaggttagacatgatgtctgtctgtagggcaagtatgtttccgaaattaaaattttgcccagcagttttctttttagaaatttgtctcaaggaaataagcacttaggtatgcaaagatatatgcataatgaagttaatgatgcattgtttattacagcaactaatgagaactattaatattttaaatgctcaatagaagacatgttaaacaaattgtatgtcaacataatgaaatgctctgtatttatgaataactgtgcacattcatatttactgacaaaatttccatgttacttcccatgttgttgttaaatgaaaaaggtttatgaaatagttcaatcccttgtgtgtgtgagtgggtgggtgtgtatgtatacgcatgtatacagaaaactatcaggaggatatatacagaaattaaaatctaatcatttgtcagttttatatcatttttctttttttaatttcacagtttatttaaggcagcagaacaacaactcggcaacaaactattctgaaataaattaaaacacaataagttggcagtgttttttatgaaatgtgattgtggaagatgtgagtttccccgggtcataaaattttgatgagttagttttcttcttcatttgttttatattgtctgtttttaaaaacaatgagcatgactgtctattatttttataatcaaaagaaacgctgac

SEQ ID NO: 2260 - DNA, 6712 bp, Homo sapiens
gttgactggtgactatccacaggcagggctagaaaagggagtggaacattttacttaggcaggaagcactgaagagaagaatctttttttcagtagacatttgtgggaaataaaaatttgtttagaagaatttaggccaagagataaaatggtcttcttttgactgaggagagataagatagattttaagcagacatctgaagttaaaggtgagagaaggaagataaactgggtgattttgctcacctaagaaggtacacagatccaaagaaaaagagattcgagaggtgtctccagcttctgattttgatgacatctcccagagaggaccgtgttgccatcaccatcccagagtctgaaagtgtccaggaaatatcaatgaaatcatggaattttgaagaagatacaacaattttatttctgctacaacagacgttctgctaatggaacagaagtcagcgaaggacctattaggttttaggtcacttattactcaaagtttatacattctacactaagttatttattgctcaaatttatctcatatttattcctagattgtgtgtattaatacaaggcccagaaaagttgaataatgtacagtatatttcaagtattataattaaaaacttagagatttagcccaggtttatctgaaccaatatcttctgtttttttcactcaaatattttgaggatgagcattatttagcagtgaataggtgtgttcttaggcagaaaatcctccaatgcattcttcttagtgaaagaagccagacacaaacaggatgcaaattgtaagattctatatgaaatataaatccatggagacataactcagattggggggttgttagagtatagagaggaaggatggggagaaacttctaaatgaataagttttactaagctttgtggaaatattttgcaactcgagagagatggtcattgcacaatattgtgaaaatgctgaatgacacttaatcgttcattttaaaatgggtaattttatgttgtgtgaatttcaccctagcaaattatttttaaaatagaaaatacaactgtgatgacaaagaacattagactccagttctaacattatgacagttaatgcatggaaatagatatgactcttttcttcccccacacattacattacaaaagttgatacccaacattaaatcctttcgtaatagagaaaatattgctagacaatgacagtggttccaaggcagctttaagaacagaagtgccacatgtaactcactgtgattcatatctgtgttttgcttagtacctaacaccatacctggcaaaataccctataaaagtgaagaggattaaattttgaaatccaggatcaatataaataaataggtacaagttttctgaaagctactgcctgtatgtttcatagttttgcctttataatcagtcatggttcaacatcttatttctaagtttaactaaagatatattcttcatactttaagggtaggagaagaaagtataaattggattaaaattaaaatatagctttttgatgaaagttgaattctttggcaccagccatcacgttataagcaactttattgacacacaagtaattgcttatacacagtgtaaacatacactatagtttatctcagtcagtggtggctttttattttaaagagctctataaacatgaaaccattttgttatatgtaatcaactacactttgctgcctgattaaaaaaagagattttatctctttcattggatgacactttaataaagaaaaaggtaatgctgttgaatattagaaaacacgggtaataaacagcatcttgcagttgccaaggctttggtaaaaagttagcagtcaggaaaatttccaaatggaaacaagtgttatttgacgattttataaaattcagcagaacacaaagcaattagtcctgtttgtggcttttattgtccactgaagtaaagtaattatagtatttctgatctcatgtcaaacagctttgactctttgagctataatgtgagttctgacattaggactcaaagtctgaatcaaacatcaaacataaaacagtgagggactgcatctttaaaacttgaagatccctcagattttaacctgtaacaaagttgaactgttttatgaaattaactaaatgaaaatagaattattcattcaaggtggaatggataatatttaatggacatgggaaaataaaatgtcccttcaccaaatatatccagacgtgttcagaaatcactttccatcaaagagaatttatttacacccagtatgttgcctggtcctcactgtcagtaatgatttacaaattaaatagtcatggtgaatattcaaacagccttctgcctcctgacatctctcccttcctttcttcattctcaccactcccttccagtttttctttgctttcagcatttggctggccaatctgttttgaacttttggggtagcctgatgtttcagcagggtagttttttaaacagaactttcaaatcttagctatatcccaactttaaaggtcaatgtaaaaataatttaaagtatggagtttttaaaagggatttaaaaaaagtccccaattctgctcagtcatctctgcaatagcgcaaaactacctaataaatagcaaaacttgggaaaggtcaaaatggaaattattaataaatgctaaataacccagagccagtaccggtaatatataaaatgatgaaatgccaatttaaaaccaccatgtgaagcaaaaatatctttatatttaattgaaaatgtccataacaggaagaaataaaacaaatttccaagctaaagccttccaaggcttgattactagattgctgtcacgaggaatatcatttctgcttaggatgtcatggtgcataatggggttttatctttcgcagattattgtactgacctcattaaaataaattaactaattcatcagttgacttgtagtttttgcaaaagatagctaataaataagaaaaggaagaataatttattttttaaaacttgaaagtatttgtctttaatgacaaacttgtggacgttggttgctctcccactcaaggtcattaaccctataatactacatatgctggatagattctgaactttttttttttttttttttttttttggagacggagtctcgttctgtcacccaggttggagtgcagtggtgcgatgtcggctcactgcaagctccgcctcccaggttcacgccattctcctgactcagcctcccgagtagctgggactgcaggcgctcgccaccaggcccggctaattttttgtatttttagtagaaacggggtttcaccgtggtctcgatctcctgacatcgtgattcacccgcctccacctcccaaagtgctgggattacaagcgtgagccactgcgcccggccacgatttttccatagtcaagaaaaatcttaaaatttaatatttaatgcagttatagcctatgaaagcctaaggatggctttcagaaactttaataatcttagaaaatgaccacttttttaaggcacacatctgcccgttgtgagcatatttgtcattagcatttagtaaaataggtacaatccattactgcttatttctaatactatttccgcttgtgtttgcatttcaaagtagccttatgagaaaaaaatagagctttaccatgagttattattgttatttaaaaagatagatggctcatgataatattgttagagttgctttgcccaaactatacttttattttctgaattttcagacttcctttatttctctatttcattcttcattccccctgaattgtttttaatttctggggcaaatcataggaaaaatctccaagatatttaaggctcatatagttagagaataaatgaactttcctatattataaactataaattaggtaactgtaaaatcataaaaaatgcccttggcttgcagaaacaatggtaagtgacagactatgaaagtgtcttcataacttttatctaaatttttggggggctcagtttattattgttctcttcatgcatgacttttctaaaatgagatttggaaggaacagtatttcaggaaaaccctaagttttaatgatgaatgttttaagtaataaggataagaagatttattgtgattatatttaaaacattttccacagtgggtgcccttgggaaaatctgcattctgtgtggtaattaaaattctgcacaagctatattgaatagaacaatgtagaaataattcttggctgtatagatttagcatctatttagtggaatgaaaatctcctgtgaaaaagtagggtgacatcaattaactgccaatttttaatttataatagtgacataaagatgagaagtaaagcaaaagtaaaattaatcaatgcaataatgacatcggacactacttttctaatgcctaggaactatgagaatactgtaagaatattttacattataaaagtaatatatcaacattgctacagtctggaaaatacttttaaataaatataaaatcagtacctagaataatgcctgctaggcagtcaatacatatttttgttgttattgacctatataaatgatctgaacacaagagtattttagacttaaaaagtttacaatattgaaatcagaaaatcatataaaatttatcagaaaataatacaactatttatgcgatggaaaagacaatgttattgaaacaaaagcaatttttagaaaccagatgcactgatgctacatataaatgcagttgatagaactgctagtagaccaaaatacttttatgagtaaacatataaagaatgattgaaagttcatttatcttaggagttatttaagtatgtataactgtccatgaattttattgtggaacatttaaaggaagatgttaataaaccaattttgaatgttgctattcctagacacctcattaaaaatcagaaattagcctatcttatttcataatataaggcagcagagttgtgcctccccgaagtaagaatgtgaagataaaggtatataggtactttaaaatatcttctaaattatatgtaatgttaaaagtaaataaaaatggatgaaataggaatgcatttatgccaattcatgattgatgagaatatatttggaggctttggcaagagatagaaattgtcaagaccagtgactgaggaacagaacttgtttatggaaaagctttcctttctcttgacctcatgtgtacacatgaagtgatgaagggaggagacagccacctttacacttgatcagccagccaaatcaatcacgaaaatcagtggactgtttgccatattgctttcagtccaaagttaggaaggtgttgaagaaatgctgcattttgatggagggcaggtagtctttcaattagtatgtgacaccatgcaagtttagtgaggaaggtgagaattcagcttccttacagtcaggtttactttctggaaaaggcactatacatagaatgacactatatacatgggaaaaactaagaatatactaaatatgataaagctacctgaagtagaagggaatactgtgagaagtctaatggggatattaatgaagaagaataagtccatcttgaaatactgagaaaattaaaagctccctgtatttttcctggtgtattccatgaagagaattaagctaatacagacagagaaaattgcagaagacagaggcagtatatgaaaaaatctacatatattaaaggtaaaggaatatttgagaaaaattattaatacaccatatttcaaagaagagctaatttattaacttttgaactgagtcaacgaggtaactacatattttttttcttttgctctaactcctgtaatttgagacacaattatttgatggaatctttattctattatatatgtattatattccaatttctgatattgactataatatgctgtgattttctctgtgtataggtctgtactggaataatactcatcagtttgcttataaaggctatcattaaaaataataatgtaaaaattaactgcaatacagcaagcttttggaagaatataaacattccctcaatgacccagaaaactacaccaggatcccttcagcatccctctgagtgctgagttgcaggagggatggctgtggctctctgatttgaattgaaactacagacatccatcctctcattctccatcctatggacataagaggcagttgtccccatgtttctgctgcttcttatcgtctacttcagtggcagcctcgggccgtggtttctctggtgtgccaggtcaatgtgtccacggaagagcttgctcctgcaaacccttcctgatgatttctttagacaactccctgtgttcatttctgccctgcgtaagatacctggaataatttttattctctaatgaatgattgaaataaaagtctttcatgaaatatctggattatggaatgaataaagtaggagtaaattctataaaaatgtttgacatcctgtaggttgtaagaaaacatttcaagtttaatttttataaatttctttatattaaataatgtatacttgtaaaaaatttgaaactataaaatataaatgtagtgaaaatgtcgttgtttcctcagatcaaagtaacaagtaagcaagttaacattttgaaatatttccc

SEQ ID NO: 2261 - DNA, 5776 bp, Homo sapiens
cgatctcggctcactgcaagctcccctttccgggttcacgccattctcctgcctcagcctcccaggtagctgggactacaggtgcccaccaccgtgcccagctactttttttgtatttttagtagagacggggtttcaccgtggcctcagcctcctgacctcgtgatccgcccgcctcggcctcccaaagtgctgggattacaggcgtgagccaccgctcccggccctactcctaccaggttttaatgaggcaccctaccctgcctcatttttgcttgaagcaagaggtcacagattgtccctaaggcttcttcccaggaaccttctcctccacacttcttctaaccactgtctcctcccattctgaggaaacaggggttgttattccctcacttagaccagatgcctcattcccatctgcaccatgggactagttcctgtcctgtaaaggtgtttaaagaacctccccaggtgagactggctcaagtcacactgtgctccgcggggggcttgaccttacttatctgtgacaagatgtcacctgtgatttattccttgataaaaagggaagcaggagccctaaattattttctggatgactgctaacgcttttctcttgtctgagttggtcatctacctcttcccaaggatgagatagacatcagtatcataagaggctttcagcttaggactccttttgtgacatggccctttctgaagttaatgatgggcctcccgtgcttcatgtcctgtgagaaatagtgtcgtctccacaaattacttcaccccaaattatttgtatgggcccctatagttttcagcttaaaaaaaaaatctaaatgctttatcctcagcataacataataacagttacatgggctgggcacggtggctcatgcctgtaatcccagcactttgggagaccgagatgggtggatcacgaggtcaggagatcaggaccatcctggccaacatggtgaaaccccgtctctactaaaaatacacaaattcgctgggtgtggttgtgcgtgcctgtaacgccagctactcgagaggctgaggcacgagaatcgcttgaacccaagaggcaaaggttgcagtgagccgagatcatgccactgcactccggtctggcgacagagcaagtctccgtctcaaaaaaaaaaaaaaaaaaaaaaaaaaaaccagttatgtgaaatcagatttccaaggttttatgtggaagcagtctatggaggtaccttcaccctaatgcgttcactccattcccactaacggaatctatccagagtgaagtagccatttccataatatgaaaaaatgtatgtgttcaatagacaataagaaatataaatttataatattggtagtgcaaccctgctatttatagtaaataggatagaaacacgtcagtaactaaagcatttagtagaattatcttcaattttgttgttgttgttgtcataatgtatttgctaacatgtcctagaaatagcatctttcatttggaaggtgtactttataaatatacgttgatcaataagtgcttttattatactttatcccaaatattgtgacatgttcctcttagggaaggtcattgctacttttcctgctaacactcctcctgttgaaaatcgcaatttaatatttaattgctcttcactctcatttagtataaatcttctgtattcatttgaagtctcatgaggttgaatgttatcttgctattcagtggtgtgccatcacttcaccttataggtatttgtgaagattttattcacatgatgctctcaagcttggagttgaaatactacgattcacttaatagattaggatattagggtctattgaacagatgcatagaaatcagtcaccatttcacccgaagttacatccaaatacttagttttattaaatgcatctctactgcttagaatatccagttttgccttacagtaaaattgggtaggctgaccacctactagtaacacatttgtaaacataccagaggaaaaaagcctacttttatttacatagcaaataccttctcttaaaaagaggtaactttttaaagattgtgtccaaattgaagaacttacctgagaataacaaaaaagtacaagaccaatactgcctatctttttctttcacccttagccatatggaggacaagctggctttagcacagctatggcacagactacagagtgcatgagaaaagaaacgatggggtcaccaacagtgtggaagggaaggagcactatagtgagctggagcttggacacatgaaggatccaatgagattcttaaactctgtgtgtccggcaaacgctagcagtgaagagatgttaagttcatatatcttctccttgaagaaaagcaacatcctaagatctcaataaacaaaaaatccttcatttggttcagaagatcctagaaaagttaattcaagatgctgactaaaatcttaaagatgttccctggtagaacatgtttttgttcgtttatttctaagaatcacaaagtcaatccagttccttgcacattgcaaacctctaagagatccctttgcaccctctaagttctgcagtttggattactgacagcatctcctataatcaatacagcataattggattattaccaaaggcaaaataatatatttgctgttttttagtttttaaaagctaatattttaaaaatacaagtttaatcatctttaccatctaggtaataaaatacatatgtgcccccacatgtgtttaaataaccaatatcataattaatattttttccagaaataaaattcttaaatctttataaaaagttttgaacatacaaatactttgtatccctagctattattttcttaacttctgttttcatttagaaatatttgcttttgaccacaatcttcttcactaaacagttttcatctttgtcctcctttgaccttagctaatataatttcttagttctctttacttggtgcagtttttaaaaggtctatttattttgagtcagcttacaatgtcttaaaaataagcaaggaaagaaaaaatagggagtagaggggaggaagaaacaaaaaaaattcagttatgaactgttgactttttctatgctttgtttaaatgtctaatcttaaagggagtatggtggaatcctgctctttgaaccagccattaggaggtgctcacagtttagaacaaactcttcagacctttaagacttgtctagtttttctgttctgtagaactttaattttagaaattttctttcacttgaacataccacttgtaaaaattgtgtagccgacagctctgggaaccaaagtcatccaattagtccaaaaaacaaatgttttatggcatctatcaccacagaacaccaataggccctcagacaaccacatcaggttaaaagaaaaacatgtatttgagaaggaaagccttcttggctattttgctttcagagagaaatggttgatattaactggtgtaaggcagtggtcttcaggaaatgtttccaagggctatatctaattttgtaaagtaaagggcatatttgtattctgaaatatgcctacagggtagagtgtactttcttttcttttattttttttttgagacgcagtcttgctctgtcaccgaggctggagtgcagtggcgctatctcggctcactgcaaccttcgcctcccaggttcaagtgattctcctgcctcaggcatcctgagtagctgagattacaggctcgtgtcaccacgccccactctcacagctgtttattatagacacattcacaccgttactttttcatttttgttttaccattattgctttttatttgctataacagacccagactggcaacttgacgagcctttggcacaagtgtggatatgtttggagcaaagaaggctgaaggacaagtatgcgccatcttttggtgggttttcattggcccctaaagcactgtttggaggagagtaaacaatgttcgcctacttatttataatagaagttaggggttataggtgtttgtacagatagtacaagcatgaaatgctatgcatgaattacttaactgatttaatgatggcttccataatcttgtgtcatttatcaagttcagtgtgacaatcaaatattgacattaaattttaatttaaaattttccatattaaaggaaatcaatgcacaaaatttcaaaattatatgcctgagaaaacaggaagccaacttaactttaaaataattattattacttggagtcaactcctagcaaatgggaacgcttatcttatttcttttcatttctttggcacccaactcataatgtcttaagtcatttgctaggacttaagagaggcattaggcgtgcactgcataatgttgatgatgacacctactggcaggacaggattttgcaccctagttccataagacactgaagccctttgtatatttgaaatctgtatttatgaattaagttaaatttcactagaaaagtcttattggaatatgattatcagttcatataagctaaattatgctgtgccaaaaaaactccctaaaactctgacaaaggtttcattctttcagattattaataatgaaagatgtgaaatgaagattaaatgtcaattctgcctccaaccccaccgttaattactagcaaagagtaaaatcattgaatatttctccccttagccattgatttgtgatgtggtcatgtactaagtctctattttggaacatctttttctgtcatggatttctgtgtttgctaattgttacagcttcatgatgcatttactgtatgagaagacttttactgatatggttttaaaaaaattttgtaattctcacctgattattcttccaggaaaagtttagcattattttgttaaattatcacaaatgacatttgattttatttaaatggcatgaaactacaaattaattctataataattaataacatattgagtcttctcatctaagtattttctatctctccaacatatttgtaattttattcatcttaaatgtgtttttataaaaatttatccttggaatgttatattttgttataacccctaagagttttttacataattttattttcacatttgctatagtatctgcatatgagtatgctactgcttttgtatcttcctcttgtaaaaaataaaataattgtatgcattttccataggatgacattttgcaatttctctaaatgagttactatttttcgtcttgtatttatatctgttagttctgtatgtcttacaacattggctaaaaccttctagtaagaatgttagaggctgggcatggtggcttgagcctgtaatcccagcactttgggaggctgaggtgggtggatcacttgaggtcaggagatcgagaccagcctggccaacatggtgaaaacccatttcaactaaaaatacaaaaattagcacggtgcacacctgcaatcccagctacttgggagagtgaggcagaagaattgcttgaacccaggaagcagaggttgcattgagccgagattgtgccactgcttgggtgacagagtgagaactcatctcaaaaaaaacaacagaaaaagaacgttaaatgctatttagaaaaagcaatagctttttctagacttaatggtagggtctcatgggttttatcattaggaatttttaaaatcatattgattttaagtaattgtgaataaatattttaattatcaataataaatgttttaattat

SEQ ID NO: 2262 - DNA, 1264 bp, Homo sapiens
caggaggctgaggcaggaaaatcgcttgaacccaggaggcggaggttgcagtgaatacaataaaatacacccatagaatggccgatatcgcgccattgcactccagcctgggtgacagagcgagacttcatctcaaaaaaaagaaggaagaaaggtacattctcataatgccttaaattagttacttgggatttatttgacaatgattaggaataactgtttcaaaagatatattttttcatataccttagaaaacaatagatatttgttcaactctctaattgtgggtttgcatttgaaatgtgtattgtgattcaaaagttttctctacctagaaggggaatacaacacatggaaattattattgctggtgacaccagataatattttgcctaaactcctgaggtgagtgctctatgaagaccccattcaacccagacctttgaaatggctcacttcccatttaaactctattaatcttctacctcatggaggcaacaggtggtttagaaaagagccaatagaaagataatttttgtccttcaggatcagtgccaatggaaaaaagtgacctgaaatacagatctcaggcctgacatgatgaaaatctagtgccacagctgttgtctctcagaactgtcactcatcatgttttaatttcacagttttgatttaatcttttctaaatacagcactggataaatacagaacaagataacaagagttcccagcaaaggatccagcttgaaataacacggtgctaagcatggatttttccaccgaatgaggaaattctaattctaattgttagtctctttatcaatgacgccaagtggcaaggaacatcaccatctttggagacctagtggtggagttaaactactacagggaaacaactttacgtatagaggagttgagcttcctagaggaaaagaaggaaaatcattcctaatggaagatcaactattcaagaaagaaagaagagcaatgagaaagctatgtacagcttacagcaatttgataaagtattcttttgtacataaaaatggaaacatttgcttttcttccctacttgatctctccaaaattcagaaactattattttctctaatatctgggtacaactcttcaacaaagaatgagaactgctctgttcctgaaaccctatagccaaagtttgacaattcaatatacattccaagggacaagtctcatgcctgatgtttgagccacacagatagtttgtgagaatgtctgatgccac

SEQ ID NO: 2263 - DNA, 7319 bp, Homo sapiens
gaatgatgacagtggaggggctgattgcttatgaatccttcagtccagctctaattagaaaacagttaagttggtggagaaaatcagggcttgcttagtgcctgcacattccctcctcctctttctcctctccctctttcccttctttcttccttccacccccctccctccctctctctcttcttctctccagttctcccttgtaatttgccgtctagcagcatttgggattacaaggttttttttcttttcttttctttttttccctatcactgaatctgcaactggcatggaagaatgagatactgattcatgctgaagtcttttaagaaaaatcttaatatccacagtcagtagaattttcctttctttctaaataatcaatgactagatcctcatgttaactggtagatatgttgctgcactggagggttttcattgataaggaagaactaaatatttttccaggtgtctaagtgtgtctgtaaatctaaaatcctcattcagactaaagggaccataagataaccccgtgaaggcctcaaagaagcagcatgatgtagatacatgggacgtattattaacgttattatactagtcctaagaggtacagtaaatctgatctttgttaatctttgctactttgtagtaaaatatagagtttagagcaaaaccggtctgagaacctacatcccataggatttatgttaaatactcattcaaattattgcttcaagcaaattacatacacactagcgacattttctttcaagccgggaggaaatcactcaacattcagatgaggaagtgtgatttttcatacgtgttctacggaaatagtaaataatggacttcacctagtctgcagtgtattatggggttcagaataaaatatgagttcaactggcaatttcaaatgcggctttggagagaaaacatttatttgactgaaagatttgcttctgacttgaggcccaggaacattcccagttttaactgtagtgttgcattcctgggaagttctgttccatagcttcctttgcaaattcatgtagatggatttctttagctctgacagtttcctccaaacctttcctacattcttccagggcctttgcttatagacaggggagttacaccaggatggttaggtttcaggttaacaaaaagaaacacttttattgtcaatattaatggcaaacctcgatttttacaaggcttgggtttagcagtgtgagcagatcaaaagcagcttggtttgatttctcaatattctctggagcttagacaattaactgcaattttgctcctaacaaaacaacacaaaaaagttagttacagaaatgttataggtaatcttttggcagagatttttacctgagtacaacatatcagaatctagaaaatttatctactgaacttgagttgagttttgcaggaaaaccccttaagaaaatcttgtgtgaactacgtcctcggttgcaatgccatgagcctgtttcagtgtgtgcattccaggcttgcctttctagctgggtaaggatccggcagactgaggtctccttggtaatttgggtacaccaagtctccagttaatgatagataatcagcctttgggtcattcggtcattctcttattacaaacccctcctgctctctctgatctcctttcaaactaaatttcacacaaacaaataaagcaagacagggacaagttcttaaaaaaagagagagaaatattagaaacgcctgatacagaactctaaacaaggaaaggcaagctaaaagaggataggaaagaacatcttatcaaaatgaacatgttgtgtacaaaacattaaaagaaaaggctctggtttttgttaaagtgacagaaaattaaaataaaaataattgcaggcaccaaagttataaacagggaaggcaggatgctagctggaaatgcgcagcactagggagctaatttgttgttacagattatatatctgcaccctgcttggagaagtgctactttgttccattttccagaagagaatggtttttcttcttaatacttgtgtgaatgcccacttaagttaacacaggccacaactttgaggaatgagaaatggaattgcattctgcttgcgaagcatccaacttcaaacgaagaaattggttgtgtacaaaaaaaaaagtagaatttcattcagaatacgtttggagacttcactaaattggtgtgactgatgcttttttgttttgctgacagaaggcacagatcattcatggggatgtataaccgaaaccagtcctctccaccgcctggggatcttcactttcgcagtctacgactgcctgtgactccagaaagacaaactgcagattggccaaggttaagaccagaggatctgaataaaaaagtagcaggatccttgctctgatctttcctgacatttcccaaatccacaaggcagagggcatggtgcagggttggagagtaaactgttccatactcagctctcaatgaggagcaccggcaagctagtttttgcagatggggaaattgaggcagagaagccaagacatgtgctaaaggtcatgcaggctatgaatggagctggaatgtgaacgcaggccatatgaccccagagcccatgttcttgaacccttagaaagacagcagcaacacacctggtgcagcagctgcttagttggagtggctgacaaggagagaatgatttccaggaagagcggaacacatatggaaggccttagcttatctttagcgcctcatacacccgttctggacttcagaaaggccagtgagtgggattaggcctcagagataggatgtcagtcccagtgagggatggcctagagcattctttaattctttcctttgggtcacacataagaaacaattttccagcactgatgagtgttattaacaatgagatgggatagaatttagttttccctatggctgtgcttcaaaaatagaaaagctgtcttttctctggaatgattgaatgaagctctggggaggaaaaggtggattggcagatctcttaaaggaagcttctccttctaggcactattctaaggcttaatattttaactccctatattaacctagttcaactaaacagtgatctgagtaattttatttttattaaagctcagatcaaaatgccattaacattgattgagaaaatcaaaggaatctttgatgtgagtggttaaattgctgaattatttcagtcccataccctcacagcatgagtacctgatctgatagacttctttggaattccttttttgtttgagacagagtcttgctctgtcgcccaggctggagtgcagcggtgtgatctcaaccattgcaacctccacctcccaggttcaagtgattctcatgcctcagcctcctgagtagctgggattacagatgtgcaccaccatgcccggctaattattttgtatctttagtagagatgaagttttgccatgtgggccaggctgttctcaaactactggcctcaagtgatctgcccgcctcggcctcccagactgctgggattacaggcgtgaggcaccgtgcctggctgggattccataataaatccctctgtgtctatttcttttttcaaatataattttcttcatttccaaacatcatctttaagactccaaggatttttccaggcacagtggctcatacctgtaatcccattgcttggagaggccaaggtggaagttcatttgaggccaggagttcgagaccaggtgggcaacatagtgaaaccttgtctctacaacataaaaaaaaaaataaaaccctaaggaaataatggtgcctcactacctttcaaagcttttgaccttcaagtcagaaaataaattatttttaggaaaggcatctcaaccttatttacaaatgaactatttgtcaagagcaacctctataaggataataggacttcctggtttgaaatgcagcatgaacaattctcagaggctcctggaagactaagaatgaggtttcttgatccgccttccctcggcatcttctcactctcttccctccttctcagaagctgtgtgcagcaatgggctatgcaactggtttcactggtgcctggtagaacttttaattcctccctgtcagcacatccctagtccactttcatagtttggataaggactggataagcagctgaacttctggggacttttccaaatgaaattcaacctttagacctttggaggtttacccagtcttcctcactacccgaagatgagtttggaacaaattttctcttaatggattctatttgtgggtaggagaggtaatgactgccttgctcagagtcatgagcataacttcaaataaggaaaaagagcctcgcaggaatgtgagaatagatgcgatcctgaggaaggtgtgtctgaggaggtgctgggaggttctgatcggctgttgaaggcagatactgtatctcacgtgacagaagtcacctcctgacatcagagttgtgtttgagtggtaatttaaaaaataatatagctgacaaggaaatgtggaaggcattacgttgcaatacagtgaaatgaacatacaacattcaagatcaattaccgggtactgattagctgggagaaaggcaataaaactttaaaaatagaattggtagaaatagcaccctgtcaaggtgggactgactatgcctcctgctggtttgttgcgaggaattctttttttgggaaaatcctgttgaattgtgtggcttgtgaatctggctctagaactgttaatgttataagaattgaaagaggactatttaaaaataccaagacatcttttaaaattcctatttttagaacagctacttgtcattaaaataaatcattccatttctatttgtccaggttactgctttcacagcagggccagggctatggtgaagtgtgggaggtgcccagtccccttcactgcagtcatggctctgtttcatgccacatgtgttattttataagtggttaagccccacataggcatgcaaacatggtacatctctatgtattggttttggtaatgttgtaaataattgggagaatacattaaaatttggtaatagtgctcctttggactcagtctctttttttttttttaagacagagtttcgctcttgttgcccaggctggagtgcaatggcatgatcttggctcattgcaacctctgcctcctgggttcaagcaagtctcctgcctcagccttcctgagtagctaggattacaggcatgtgccactatgcccggctaattttgtatttttagtagaaaaggggtttctccatgttggtcaggctggtcttgaattcccgacctcaggtgattccagttctaattccccaacagagttgtcttggttgcagtgagatatatatatatatatatatatatatatatatatatatatatatatatatatattttgagatggggtctcgctctgtcgcccagtctggagagcagtggcgcgatcttggcttgcagtgagacatttttatccatcctgatcacagcacttgcctccgggctcatgaagcccagcatgttactgctgttctgaacgtctctgctttttgagagacatgtttaatgaattgggagtatctgtgcacattgcattcacttaaaaagggaaaaataccttttaacagttatagctacagaaattcaatttagtttatttaggaggaaatgagagacttgaattgtaggtgtgaaatcttacaatctttcagaatgatttggtttgggggatggttggaactgcatggaattccttcagccaaaataatttttgtgagcacattcccaagctcacgatcatgttttgataagaaaaatccctttctccacaagttctcaggtcccactcattggcccctgccctcatttctggaacctatgttaggcagttatgtggctcagttcttggtgatatgttttcaatttgagtcaacttgatgagagaaaaattactaaaaagtgggaatgagctgtgaggtgaacagggttttcctatcaaagtggaggtatttttaaaagcatttattatttcaaactcaaacatttatagaaagccatgagtgtgaagtgtatgattaccagttgtggcttgctgcattgaaaaattcaagttcataggaaatatttactgaggctctggtttgcaagcagtttgttcaagagaacaatttggtccagaaggcatgtcagccaaaaaagagtttactaatatagtagtaacaggcaattaggattcataagcatcgccatggctgagacatgatttaaggtcttagatggaaagagttctgttattaagataacagaatttaaatgctgtatctgtctaggtcttatgcatgtcagaagtgagaaaactacttcttcattttccatttttatgagctctgatgtaacacagtttttttttttttctgtgttgaaaatgatgaatatagttcttggcacatttgttccatagtaaagaagaatttaacttgcaagtgaaaaacctctgcctttggccatggattaaaaagatgttatatgatgaagtttacttcctaaggaaaggttagttttgtgtggcactttctgaaaatttgtttgggacatatacaattcttttgtataaattctggaggtctgaggaaaattacttaatcacattagatgagaacatttctttttgtgtgaattgagttcttatcaaggttctgatgttttttctcatgtatttgcccttgggttcatctcaatacaatgcatttgtgtactattgaataaaaagcaggctgcaacagtatttatgacatatgatcctatatacacgtaaaatcttgtgtgtgtgtttgtgtgtgcacatgcatataaaaaaaactacattgttaaagttgttaatagttaactcccggtggtgggttttaagtgattattattttctttgtataagaaaaatagtgcacagttttcttttgttgttacgaaaggtgtcatacatttgaaagaggacatatgcacagtttaaataataataacatagtgaatacccactgcttggctgaaaaaaataatttattactctgttgcagaaggcaagccttccttctgcccctgcctctgtcatggaggtagctacttgcttgaattttgtgctaatcatgtctttgctttcttatatagtttagccagctgtgaatgtctccataaaacatacacagttttattttgattgtttttgaactttaaataaatgaaatcat

SEQ ID NO: 2264 - DNA, 39439 bp, Homo sapiens
cccagcactttgagaggtcaatacatgtggatcacttgagctcaggagtccaagaccagcctgggcaacatggtgagaccccatctttatcaaaaatacgaaaattagctgggcatattggttcacacctatagtcccagctacacaggaggctgaggtgggaagatcactggtgcctggaaagtcaaggctacagtgggccatgattgcactaatgcactccagcctgggtgacagagtgaggccctgtctcaaataaataaataaaatccccaagaaacatggattacataaagagacgaaatctgcgactcatcggcattcctgaaagagtaggagagagagtaagcgacttggaaaatatattttaggatataatccacgaaaatttccccactcttactagagaggatgacatgaaaattcaataaatacagagaacccctctgagatactgttaatggtaaccagagagaagagtcagaggtcatttataaagggaaccctgtcaggctagcagcagacctcttagaaaatttacaaagcagaagagactgagggcctattttcagcatcgttaaagagaacaaattccaaccaagaatttcatatcctgccaaactaagtttcataagtgaaagagaaataaaatccttctcagactaagcagatgctaaggaaatttattagaccagctttacaagaagtccttaaggaaatgctaaacatagaaacaaaagaaagacacctgctaaaacaaaaacacacttaagcacatggcccacagacactataaagcaactataccaatcaagtctacaaaacaaccagctaacaacacaatgaaagaatcaaaatctcacatatcaaaactaaccctgaatgcaaacggtctaaatgccaccacttaaaaggtatagagtggaaagccagataaaaagacgagacctggctgggcgtggtagctctcgcctgtaatctcagcactttgggaggctgaggtgggtggatcatttgaggtcagaagttcaagactagcctggtgagacatggtgaaatcccatctcttttaaaaatacaaaaattagccaggtgtggtggcgcatgcctgtagtcccagctacttgggaggctgaggcaggagaatggcttgaacccaggagatggaggtttcagtgagctgagatcatgccgttgcactccagcctgggcagtgatgtgagactccatctcaaaaaataaaaaaaaaataaaaaaaaaaagacaagacccaactgtctgttgtcttcaagagacccatcacaaatataatgacacccacaggcttgaagtagcaggatggagaaagatctaccatgcaaacagaaaacaaaaaagaacagtagtcactattcttatatcagatgaagcagactttaaatgaacaacaattaagaaggacaaagaagagcattacataatgataaagggttcaatccacaaagaacacagacctatcctaagtatatgcacactcaacattggagcactcagattcataaaacaagttcttctctaactacaaaaagacctagacagccacacaatcataatgggagacttcaatatccaacatcccactgacaacattagaattttgaggcagtaaactaacaaagaaattctggactttaacttggcactcaaccaatttgacctaatagacatctacctaatctttcacccagcaactacagaatatacgttcttctcatctgcacatggaacatagtctaagatcaaccaaatactctgtcattaagcgagtctcaataaatacaaaaaaaaattgaagtcataccaagcacactttcagaccacagtgcaataaaaatagaaattcatatcaagatgacctctcaaaactacacaaatacatggaaattagacaacttgctcttgaataactcttgggtgaacaatgaaacaaaggcttaaattaaaaaaactatttgaagttaatgaaaacagagacatgaccaaaatctttgggatgcagctaaagcagtgctaagaggaaagtttatagcactaaatgccttcatcaataagttagattttaagttaatctaatattgtacctacaggaactagaaaaaaactgaaccaaccccaaagctaacagaagaaaagaaataactaaaactagagaagaactgaacaaaattgaggctcgaatccatacaaaagatcaatgaaaccaagagtttcatttgttagagttaaaagaatagaaaggattgatagactgctagctagactaataaagagaagatccaagtaagtccaatcagaaatgagagaggtgacattacatccaatcccacagatatacaaaagacctagagaaaatggataaattcctggaaacaacctcccaatattaaaccaagaagaaagtaaaaacctgaacagaccaataacgagttctgaaactgaatcagtcataaaaaacctgccaactaaaaaaagccctggaccagacagattcacagccaaattctaccagaggtatgaagaactggtaccaatcttacttaaagtatttcaaaaacttgagaagaaggggctcatctctaactcattctacaaagccagcatcggcctaataccaaaatgtcggcagagacacaatgaataaagaaaactgcagatcagtatctccgatgaacatgttgaacaggtatcttcaacaaaatactaacaaactgaatccagaaacacaccaaaaattaataaaccacaatcaagtagattttattcctgggacaaaggctggttcaacatatgcaaatcaataaatgtgactcatcacataaacaaaattaaaagcaaaaatcatatgattatcttggtagatccagaaaatgctgttgaaaaatccaacatcccttcatgataaaaacacttaacagactagtcatcaaaggaacatactacaaaataataagagctgtcaatgacaaacacatagccaacattatactaaatgggcaatagctggaaccattctctctgagaactggaacaagacaagggtgcctactctcctcactcccattcaacatagtactggaagtcctggccagagcaatcagggaagagaaagaaataaaaaacattcaaacaggaaaaaagaagaagtcaaactacttgtatttgctgatgatacaattctatacctagaatacactaaccactctgccagagggtttctagaattcataaacaatttcactaaagtttcaggatacaaaaatcaatgcacaaaaatcagtagcatttctatacaccaataatgttcaagcagagagtcaattcaagaacacagtcacattttacaatagccacaaaaaatgaaataccaagaatacagctaactaaggaggtgaaagatctctacaaggagaactacaaaacactgctcaaagaaatcagacgtgatacaagcaaatggaaaagcattccatgctcctgaattggaagaatcaatattgttaaaatggccatactgcccaaagaaatttatagattcaatactattcctaactaccaatattagttttcacagaattagaaaaaactattttaaaattcatgtggaaccaataaagagcccaaatgtccaaagcaaccctaagcaaaaaaaaacaaaggtggaggcatcacattacctgacttcaaactatactacagtaaccaaactaacaaggtacaggtataaaaacagacatgtagaccaatgggacagaatagagaacccagaaataaagctacagacctacaaacacctgatcttcaaagatggcaaaaacaagaaatgaggaaaggactccctattcaataagtggttctgaagtaactggcttgacatatgcataagaatgaaaccagacccctgcctttcaccctacacaaaattaattaagatggattaaagatttaaatgttagacctcaaactacaaaaatcctagaagaaaacctaggaaatacccttctcgacattggctttggcagagaattcttggctaagtccccaaaagcaattacagcagaagcaaacattgacaagtgggacctaattaaattaagagcttctgcccagcaaaagaaactgttaacaaagtaaacagacaacctacagaatgggcaaaaatattcacaaattatgcatctaacaatggtttaatatccagaatcaataaggaacttaaatcaacaagcaaaaaccaaataaccccattaaaatgtgagcaaaggacatgaacaggcacttctcaaaagaagacatacaagcagccaacaaacatatgaaaaaatacacatcatcactaatcctcagaaaaatgcaaatccaaaccacaatgagaggccatctcatactagttagaaaagctatcattaaaaagtcaaaaaatgacagatgctggtaagtctgtggagaaaagggaatgcttatacactgttggtgaggatgtaaattagttcagccactatggaaagcagttttgagatttttgaaagaacttaaaaagcagagctgccatttgacccagaaatcccattactggatgtatatccaaaggaaaataaatcattctaccaaaagacacattcacttgtatgttcactacagtgctattcacaatagcaaacacatggaatcaatctaggtgcccatcaatggtggactggataaagacaatctggtatatatacgttgtagaatattacgcagccataaaaaaagaacaaaaatcatatcctgtgtagcagcatagatgcagctggaggccattattctaagtgaattaacacaggagcagaaaaccaaatactgcatgttctcacaagtgagagctaaacacacatatgcgtgggcataaagataggaactatagacactggggaatgactaaaggggtagagaggaagggagggaggtgtgggctgaaaaactacttacagggtactaagctcactacctggttgatggaatcatccatacctcaaaccccatcatcacacaatatacccttgtaacaaacctgcacctgtaccccctgaatctaaaataaaagttgaaactattcaaaatgatgataatagtttttaaaagttcagacagacaagaaatatgaagaaaaatgttgatttctaagacatttttgagccactaggtcttaaaattaatttcacttacaaaatcaacctttattttctaagttggaaataatttcaaagcctaggatttgtgagtttgtgtaggagatgttttggctatgaatctctgttcttgttctcaaacatcaggagagtttatttctcagtccctctctaacacattgtggctgccagtgttgagctcttgtatacagtcacatctttggtctcattggcatctttgagactgtccatcacaggttgagaagctgccatgattagtagcaattctcctagtgccacctcctgtggatgtgtaagtctttacaacgtatatgtaccacctgtttgacacttttgctgccttggggtggtaattttgtcatttaacctcattgatggtaaagatgacatgagctcagtgactcccggtgatgaaagcagcctgcagcagtgactgggattctccagcttccctgtcactcacagtgacttccagctcggaatatgcagccagcctcctagactccaccttgtgtacattacccactctctttattcacctagaatttatgcaatcctagaggctggattttattagcttgcctgccattcaacaccgtgtacttccattgggccaagttcgtactagatgatgttaggggcaactgaattccctaactgcctaggatgaccttataatttatcattcaaaccaggacacttttgagcagcaaaaagggtagtgttaataatgatgctgaaacagtagcctaggacttctctggaaaacccaagttgtattgtgcccctacttccaacctatgtgtgggtactgtgtgccatataccactccctgaaccaatcagcagtggccagtagcatgctgattgcaactgagaaggttatcagcagctgaaaatacttatggaggaagaaacatgtctgggaaattcgctatcaagggagaaacctgcacaccaaccctaagacctcccacatccaatcagttgtcaagtcttgctgattctatcttctaaagatctcaggtcatctattcatgttcctctatccccagtatcttcactttggttgctgccaccatcatccttccctctgagtattgcaatagcctcctaaatgtttccctgttccagtcttgccctcctctaatcaatgatctagatagaagacagcaatttttctgaggccaaagccatgaactctgctaggcacaggggattcagaagtgaatgtccaagtcagggtcactccaaggtacttaccttcctgcagcagagacagatgatgaacaagtaaactaataaataataattttagactttgatataagccatggagataagcaagagagagggatgataggaagagaaggtggcagggaagaagcttctctgggagtgattttgcaccaaatttgaaggatgacacaagatagtcatgttgagggtcagggaaaaggcatcccaggaaatgcgaagaaggatgtagaacaccctgagaaaggatacattcaaatgtttttgtttctttgtttgttttgttttgagatggagtttcactctggttgccctggcaaaagtgcaatggcacgatcttggctcactgcaacctctgcctcccaggtagctgggattacaggcgcccaccgccacacccagctaatttttttttatttttagtggagacgggttttcatcatgttgtccagtctggtcttgaagtcctgacctcaggtgatccacccaccttggcctcccaaagtgctgggattacaggtgtgagccactgcgctcggcctcaaatgtttttaagtagcagaatgggatacctgtgtggctggcagtcagtaatcaaggggagagtggtttgcaatcaagttgaagtgcaggcaagggccaagttacctggtgccttgtaggctaaggagtttggattttaattctaagagcaacgcaaagcctttaaatagtattaagcagaggagctaattgaaccaattatcttttttaaaaactgactttgtcttctgtgtgaaaaataggttatgggtaaaaaggacattgaatagaaggctggagttctcattcaggtgggagaggatggtggctatgggaatggagtgaaacttttttaattttatcatactgatggcatttgtgattacttagataaatgtttaaacttgcatctttaaaatctatctaacactccttttattatcatctcaactgcgcaatttgtgtcatatgttgtttatgtcattcagtgtttgtaaaagtattcttttttttttttttttttttttgagacggagtctcgctctgtcgcccaggctggagtgctgtggcgcgatctcggctcactgcaggctccgccccctgggttcacaccattgtcctgcctcagcctcccaagtagctgggactacaggcgcctgccaccatgcccggccaattttttttgtatttttagtagagacggggtttcaccatgttggccaggatggtctcgatctcctgacctcatgatccacccacctcggcctcccaaagtgctgggattacaggcgtgagccaccacacctggccaaaagtattctttgaaaaccagatttttggtcgggcactgtggttcatgcctgtaatcccagcactttgggaggccagggcaggtggatcatttgaggtcaggagtttgagaccagcctggccaccatggtgaaaccccgtctctactaaaagtacaaaagttagtcaggcggtggtggtgcatgctgtaatcccagctactcaggaggctcaggcaagagaatcacttgagcctgaaagatggaggctgcagtgagctgagattacgccactgctctccagcctgggtgacagagtgagacattgtctccaaaaaagaaaaaaaagaaaaacagatttttgatttatgttttttgtatgcatttttatgccagccaactatgaggtatttaattttagagactgtgtactgaaagtctagaaatgcctatagatgtctagaaaatggctagaaaatctatcccagtggatctcaaactcagctcctgacattgatttcaatagagggtgggaaatcctggtgagtctgctagcagtctccagtggcagtggcagtggctttctgattgccaacacaaggaagaatgtattaaattttggagtaaattattgagtgttccaaagccaaggaactatgcttttcagtatctggtgaaatgaggtgccatcatgtcagaaggatggctgtgtgtgtggaggtggatatccatctatctgtccattcatccatgcatatactcagatatacaaatcatgccatggggaagggggctattgcatgtagaggctgtgaaacaacatagagtcctgcctaccttccattatttaaaaagttaaaacctatattctttttatatttgctagttctctccaaaaagtggtgacagttaacttggttgactgaaccctagtttgaacctgtttaagaattgggcatttacttatttgcagagcagcagaaatgcttttctgaactctcttgatataccactctgtgccaggaagacacatgtaattcagatgtgtctgggcccatttcagcatactggctgtcggaagtctgcaggaggaaataccttcttgattaattctccaaggctgacattttttgctgctcagcctgctgaatgatttcacatgtggtttttgcagagtcagaattcttcagtgacgtacaggacaatttttttcttggcagcatgaagttcttttggccaccagggtggggaagttattttaatgtatgaataaggggcaattttatttagaaaaagagacttacctcttggtcatttaaaatacattttaggccaaataatcatgatatgaggaaaaaatttgcaccatcatttaatgaatttcaggtttttacaagggttcccctccaactccccatttttcttcctaatgaatggctctagaatacagttttgaatgatttacaaacctgcatacccagcagccccctagaatttttcctttttgtaagtgcattatattgacgttatctgcagatcatttccttgaactgtatttttgctagatgtggtcctggggaaaaatatagtcaaacaaagaaacaaaacacagtcctgttctagacccacccagaatgatataatactaagtatcttccatattcagcggtgatactgttttgagaactcacagccggtttgagtttagttcagttcaatgttttctttctgtttttgttcataatttcccaggggcctactacttctgtgcttagcttgaaacgtagtgttcttctagcagagaatgctatctggtatatttaaatcaattaggggcactgaatgagaagctcagttatagacaaagataacagattacatttttattaggaaatcttgagttattaagaatgtttttgtaaatcgaagacacgaaaaaatctcattcgttgtctgggcactgtattttgcctaaccgtatcatttcgcttaattctcttagaaacattgagttgcatatttttatccctgtgtcagttgttggtggctctgctacaaataaggtgaccaacccaatcaggacttacagattttcctaggacatacgattttcagtgctaaaaccaggacaagttgatagccttagaaattaccttattagtggcctaaaacaaaatgatcatttttcacaattctgcaggctggcctagtggggcttctgggggcatcacttgggacccttgtgtgactgcttggtggagtctggatggggtaagatatctgggcctcggcagagatggttgggcatctccttccattggggtcttttgttccagacttatttgcagcctggaggcctcagggttccaagagggcaaacacagaagctacaaggtcttttgaaactgctcagaagtcacacaatgtcacttccaccacatttagaggtcaagacacagaggcagcccaattcaaagcatggggaaatagaattcacctttcaatggaaggagtggagagtggacatttttaatccatcacaatccctgttatatacattagcattctgagattcagtaaatttaagtaacttttctaagaccacacagctcctaaatggcagatccaggatttgaacctaggtctctatgcctaaaaaacccatgctctgatgcttccagatgcggtataaatatattatcccagcatccgataatacagagagcaactgggcattttcttgctgttctgggatggggtagaagaaataagggtggagaaggaagaaggaaaagacagagaagtaatgatttgtgacttctggacagccccaagtcatagaaattcgtccaatatgttttcagacgataactcatacttgcccaattctgtacaatgtgtttgggctcctgctgtccccccacccttacttgagtacagctttattccccaaagtaaatgcttccaagggcctcagatttatgcacttcttggccttgatgattatttcatgctcttagacattattctcatgtttgttctactgaggcatttgcgtcccctcctacagttgagagtttgagagacagttgctctaagacagttgttttcaaagtaggcaagtccctgagagctttcagggagtccatggaatcaaaactacttttatagttctcagatattgtttgcttttttctactctcattctttgagtgtaaattggagtttttcagaaactacgtaatgtgtgatactgcaacagattgtagcagaagcaggtgagaattctactgttttctattaagacagacattaaggagatttgaagaaaatctgttttttcttgtttttagaaaatagttatttttctttaaaaatattacgtatgttagcatgtaaaagtttgtgttacaattttaaatgaattaatgcacaaatatttttaaagtttctcagttacttcctattaactgatctatctgttaataaaatgcacataaactaaagctccttggggttctcaaaaaattaaatttaagatggatgaaagcaaaaaggttgagaacgattttcatcatcattttactagctgccattttctgagctcctatatttttctgcacattctcgtttaatcctcacagcaactttatctggaaagtatcccattaatccccaacaccccagaggaatgaactggtgtgcaaaatcattagtcacacagctagcgttctgtggagctagaatttgaaggcagtccacctgactccggagttaaactgagaaataaacaatcatgcaataatataacttgcttttctggaccagaagaaagagatacacagagatctaaaggacttgcatgagtcatttgaggtaccttgggcagccagcggcgatgactttctgctggcctgtcccatgaaaagttgactagtcatagcaacttgtccttttaaagtgcagttttgtgaaaaagaaattcctgcaaattcaagtgctgctcttaacctagtagtggtttctgttcctcttataacaagcatttctactaactctttatgcaaactctgagtactcaacaaaaaagaaacatttgttcatccaattatcacattctaaactgcagaaataaacgcttattgacttaaatttcccaattactttagcgatcagcctgtgtattttgtttgtttgggtctaattggtaatagtaaagcaacatttgctaccgcctattgagcacttatgtgtcaggcactaaaagagagacttcatagactttataatcatgatctccctgcatcctcaaaagaatcacttgaggcgggcagtggtgttatcctctctaccttatagataaggagatggggcttatagaagttaagctgcttgcctgaggtcacccagctagtaagcaggtgactcaggaattgaaccaggtctgggttgttcccaggatcatgttctgaatcattattctctgccagccccgttaaaggcaatctcaatttgtctatggaaaggaggtctccaaagtagacttgaagtagcccagataaattaggaaagaaacaaatgctattttaccttcaaacattttaaggaaaaaccatgagatgcaacccactcatgtaatgagaaaacagatgcaatcatttaattttatccttaacccttcactcacacctcgcagttaaaagtatgcaggcaaaaggcataaaaattgttctcatctctatctggtacaacccagggatattttaaggtgggcaaaaatgccaactgagttttgattttaattgtatcaggcaggccttccttctgaccttccttcctttagttttaaagtgtcatgatcatgtccatggtgtcagaggtgatgggaaagctgaggatccagatgtgtcaacaacagatgcacgcactgctggaacactggaaaaagagagtcgataggatttcccttagggctatgctccaggtgcactaggaggggacgaggacaaaattctctcatgatgtgatttattttgggtgctgagctaaccaggtgctttcagcaggagttccaatggcaaattttggctataacaaccttgacaactttctgattcctgataagcattcagattgctgctactgttgtgaaagcttagagtcttggcacagaaaaggattctctctagtccagcctcttacataatttgaatagcatttataaattgtgcttgagccatgatgcaaaggaattcaatatactgttaagacatatctgaccagagcagcttgttgttgcttagggacctcatattagagacacaaaacagacaatttttgccattctaaatccatacacttaattatctccactctaaattagctccagaaacaaaaaaaaaatgaatgaatgtgtccaaatctggataatgtaagcagatgaccagaaggtggagggttgtgtgcatggacttctcctctgctgccttctgcgcgctctgatctcctgtcccaagatagcaattaatcgatcagagcatgctatgtccagtagtgctttctggccattgtttttaacacagtgacgcgtgggagtatctctttggtgctctgttgtttgagcaattttattgagccccataattctttggaacttttaggtagttaaaaccataatcaaaggcagaatttatgcagtcatctggctgctgtgctagataataagatcagaggtggattcttgtctgtgtcactttaatgcctccaccccaagtgccttgcaaatggtgaataagtaaataattttacaaatagtaacagatatgagctcttactgtgtgtcagatagtacaccaagggatttatctaactcccttaagaggtaggtattactgatatccccattttgcagactaaggcccagtacagtccaaggcccagttccccaggtagtaggccgtagaggccgtgaatttaaccattagtactacactgcttccaaatacttgctgactgaacaaacattttgtaatttttattttctccctctctctctccctcttcacccaccccaccatgagtcttagctgtcggccttccttttttttctccgaattgactggctggcttagaagagcacagggaaatcattttcttgtttacctctgaaatcctcagttactttcaggtttgtcagttgctgtagaatcattattttatgcacagcagctcattcgggttctaaagtatgtgctcatttctctaccagcacccatgtccaggtccattatacctggggacatttcagttttgtttgcttttattactttgctcttctatacctgaagtcaagatgaagtggccttgtttgttcaccttcatatatcccttctcaggtggaggaagcctgggggaagccaggctttttatttttattttttaagtttagttttgtttttgttttggagccatgaataacatttttcaaattctgtttgctaatttcaaatctacttaaattcttaagcactggcaaggcaaacatttcttggtcccatgcaatggctttggggaggagcttggggcacattcaggccagggtaataaggaagcagaggggagcaatggagagtaggtaacacagatacagaaaactctaggccgggcgcggtgggtcacgcctgtaatcccagcactttgggaggccaaggtgggcagatcacctgaactcaggagttcgtgaccagcctggccaacattgtgaaaccccctctctgcaaaagatacaaaaattagccgggtgtggtggcacttgcctgtaatcccagctacttgagccgagattgcaccactgcactccagcctgggcaacagagtgagacttcatttaaaaaaacaaacataaaaactctaaactacacaggatttcaaggaaagcctggagctgacccgttactctccttggttgccccatggcacacacgtgtgcagatactatgagcaaaattcaaggtgatcgctgactccagaaacctcatctgagaaaataagagaattcttactgacagtgacagccatatgacttgaccagtttacttaaacctctattctttcccctgtagaaaggaagcagttaagggctctacatcacagatctgttgtgggggttaaattaaataaaatgtgcaaagcacttggcatgttttctggtccacagctcacaacaaagataggaactttttctcctgctggcctgctctaccatttgacattccaagcatgagagaatcacctctgtgggtttaggcaccaccccttgtactcttctgaagagtatttttaaagtattagtgtttaagtattaatattaagtattaatgtattaatattgagtattaaagtgttcaaatatctatgggtttaggcaccaccccttgtattcttcccaagagtatttttaaagtattagtatttaagtattaatattaagtattaacatattaatattgagttttaaagtgttcagatatctgtgggttttggcaccacctcttgtactcttcccaagagtatttttaaagtattcctttaatatattatttcatattaatttatcagcattaggataggaatcactaagtctccccaggagtgaaaaataaaagagtgactatcatttattgagtatatattatattccaggcaacaagttaaacattctgtgttcaatatatcattaaatcttctcaacaaccttatgaggagctaatttaaagggctgaataacttatccgaggtcatttggtcagaagtggtagaattgagatgttaacccaggactgcctaacaccaaagccaatacccatgttacagagctctatgacccccactggtttgatgataaagaagaggtccggagaataccaaggcaggccaggcctatttcaagttccaaggtaaaggcatagggtcatctggcaggagcaagctgtaagagctccagcaatagaatagcagtgggaagcacagaagagaaagtcaagggaactgcatacaaactgcacttccttaaacacgcttgccttggctttcaagttctgtctgtactttctctgctgcctctcggcctcaactcccacaacctccacctctccctgtgcctctggcctggtccttctgtgcgctatattcctctgggtctttgcttccactgtcctatctgcaaatactttttcaaacacggaccatgtctctcttatacagaattgctccccaatgccagtcctgattcctggcaaacagtggttgaccttttcatctgaatggacaaatgactaataaatgaacaaatgaatgggacttattaggactttatcttgtgctggttctgaccagcttctgtatcaaagatctacaacttacaattgctctctttcttgtgtcttataagctcatttaaacacacctattaatatgttcctgtcctgtacgcatctgttccagtctagtcaaccggacaaaaggaagaagccgaaactgattcttttgcatcccttttccctcctagtagtgcaacttgaagaggcaacaagaaagaactaggctctctattactaagtctcctgtctcagtttccctggacaggattttctacctaaaaagaggcatgttataagtcttcaggaattagtgggatgaaatgctttggattccttgggagatggagtgctctataaacagaaagtccagatgatcctgagtcccatgcactaactgtggaaggtggctttatatcatcccaagtgcatattagatggcacaagataaatcatttagatgttttattctaacatataatttaatatagataactacaaagaaaacaataagtagagcacattctccctatccagataacttctgctacttttaaaaataatatgtgtaaggccacaaatttttcattctaattttgactaacccattttcagatctatattgtatcatacaagagcatcaatttgttaggagaaactgaaattaatttgactaattgttgttgttaatcaaaggttgagtaaagcttaggggagggagaggcagatcacttacattgatacagaactgatgtatatcatatggaccagttctggcttcctgtaaggatagcttataattggctgccaaatgtggtaatagcggttcattttcccagagttatggattatataatatctagaattagtcgagtcatatatgagttatttatgactgtatatcaatattactacaaacttagcagcttaaaacaacatacctttcttatctcaaagtttctgtggatcagggttgggaagactgcaacaagaaaagagggaaagccaatacaaggaagctttgtcaagtcagagcctaggatggacttctagtgctcaattccactggatctcctgaggagctttatgaaatgcacttctacaggaaagaagcagcatatgttcatagtctacattgccattgttcaatggtagctctgcaggcgttaactcccctacaattctgagttgtgcatgtgtgagtgcagatggctcccacagacattccatactaaagcaatagagaagccccaggcttactgggtcctctaccaggctgcaaggaaggtgttgacgaggggcagaggttttatcagaggttcaactagggaaggatccaattacaagttctcatggttattggcagaattcagttctttgtaggatgtcaataagggcctcagtttcttgctggctatcagctgaagcttcgctcagcttcctgccacatggccctccataggcagctcataacgaaagagtttgcttcttcaaagctagcaagggagagtttccttgcaagacaggcattacagcctgtaatcacatacatcctgtaacctttgccatactctactgcttagaagtaagtcacaggtcctgtccacattcagtgggcagagattacaccatggcatgaatgcaaggaggcaagggtcctggagccaccttagagtctgtttgccacagtgactaagagaaggcagaggtattaggtcaacaggaacaggataattggataacctgagctagcataaattcaattttaggcaagcatctttgagtccaagaaagcagtcaagtttttaaaaacctaatatactatcagtttatcaatccctccttaacagaaagtatttttaatctgaaagatccccatctattagttccccaatgctattagttctagcatttagattcccaagagatgaaaattaagtctcttttaagtaagcttctcttctccacataaaattgttccatagtattttccttgactcatcagtgtccagctatttagcataactttaattagacaattaacaaattatagaaatatactagttaggtcaaatcactgaaacttttttaaaatccccaaaaatcaatttcctggttttctccttttaatcagaattaggagagccactgcataaaatagttatttttaatactgtcgtttgcagaagcatgcttgttttttctttgttatgcttaatgtggtacattttacagatgttgagagaatacttcagaaagtcttgaagggacaatgagagattgtggtttaacaacaaagcgtctggcagtgtcaaggcatattggtaatagttgtattgttgaagtgtaagatccttggttagtcttcagaaggaatgtgctcttggcagggtacagctgcatatgtttctgtgcagttcagtgtcctttatggttcattttcccaaaggctcattgtgcttattgcatcatttgtttttatttgtaagagtgttttagaagcttcagaacagttgtagagtcattactgtttctagctgtaaatggttatggctgcccatggaaattatgctgaaggcaaacaaaagtaaataaaagtccctcttccgtacctttcctctttatctgcctttcctactattccacgctaggaaacccaattctgtgggattacacagggacaaggttccacacatatatcacagctcattctgatttatgactaattggtctcccaagaagggctcaatgtgctttaggatataggcaaacgacctgcatttaaaattaaagctggcatattcattttgaaggacagagttgaagtcaacgactctacaaaatttctgatgcataaacttatttttcccctccttcaaatgaggtaacaacccaactctatactcagtcctgggaagccaatgcttctgtacctaaaactgttcatataaaatgggtaacatgcagggtactggaaaagcaattcatcacaggaaatcggaaataattttaactctattagtaaatactgcaaatcactgtcctgagcccagtcagtcaagtgcctgcattattttttaacatgcttatgtttccatttacaataccaaatagaacttgaaagagagatgtcttgttattcaaaaacaatatttttcataatatacgaaaacaatccatggtatctccacaagtaccctgtgtgtagttttctgtgtgcagcacagtaaagttgttattggttgtgctactcatattttttgttgtgttgtcatttattgtcaattaaatatctgttgagtacagcaggcccttagtacccatgggttctacatccttggattcaatcaattgtggatcaaaaatattcaaaaaaaaaagtatggttgcatctgtactgaacatgtacagactttttttcttgtcattattccctaaacaatacagtataagaatgatttacattgtattaggtattataagtaatctggagattatttaaaatacacaggaggatgtgaataggttatatgcaaatactatgctgttttatatcaggaacttgagcatctatagattttggtatccaaggggggacagtcttggaaccaatcccctatggatactgagagataaccatataagatactggagcggatatcatggagaaagaattagagggatcccctttcctcaaagagcttctaatctgggtacagacatgactttgactctctcaaatctttcagtggattccattgtctgagggatggagatgcatcttctagccagagctcataagattctaggttcccagccaccacctgcctctacattagttgtttcaatgattcagaccagtgctatattcccatttggcaggtacagaaactgagacccaaaaagggataagtaagcttacaaacaattgccaggtagcagagggtgattcaaggccagagctattatcttctaactctcctaacctgtgattatatcataacgcaaccaaccaatttttgagatgaggagcagtctttcaaaaatacatatttttgaacttttatagcaggattatatagcagcctcagttgggaaaccctgggttccaaatgagaagaggtaagtcctgttcctgactttgtcaataattagctgtatgatcttagaaaggtcattttgcttcattttctttatttacaaagtgatgaaagttgactaattacttttaggcaacattttccaaatctgtttcaaataggcattgctgtaagctatgggtccatatttggagatgtgcaatgtgcgttagcatgttagaggtaccatgaggtcccacgtgaagaaacctgttagcaaagaccttttaaaacttacttatctctggaacacttagtcgtgcctcacaaagctcatgttccctagcaaataatctgggacatgatttttcaaattttcttttggatctaaaatctgatagatgacatttttgcttacgaaatgttccataccttcaacccctgtgttctctcttagttgtgactttccacacatcacacccctgccccccgcacaggaaatcaacacggtgggcaacaaataaatgtgattgactgatttatttggctcttaaggttaatgtattctaaacattgcttatttaatatgtttggcaaaatctcatctaacacagaactgttctgggatgtgaagcactgtgctctgggaactgggtgtaaacaaccaactctccccagagccagccaaagagatgccagatgacatttcagtaccatttggctatgagagtttcattcaaatgcaaaaacaataaacagattctgtccctggttagcagacttctgatctagccattctgtctgagactggtctatagaaaatcaaaccatttggtgttaagtgccactgagcagtcactctgatgtgacagccatttttctcatcctccttctaatagtttacaagataagttggctctgccagattctcccaggagaaaaccctcctattcatccttagaatgccacttggtgtgtactttagcagtaaattaccatacactacccccatggtttgaaggagctgattcacaatgaaagcaccagagtttccttggaattaatttgactatgccacatttctatgcccaagaaaacaaaataactttaatattcaatagaatacatacacaaaaatggacttttaaaaaagacagttgtttttaatacaagatcttaaaacagcatcatttttcatcttaggaaatcatgtgtgtccaagtgattttgtattataattacattgtttacaatgtaccaaaaagcataaagacacataacaccttgcccagatgtggtggttcacacccgtaatcccagcactttggtaagctgagatggctggatcacttgaggccaggaattcaagaccagcctggccaacatggtgaaaccctgtctgtactgaaaatacaaaaaaaaaaaaaaaaaaaaaaaaaaaagccagcatggtggtacatacctgtagtcctagctactcgggaggctgaggcagaggatcacttgaacctgggaggcagaggttgcagtgatttgagattgcaccactgcactctagtcttccagcctgggtgacagagtgagactccatctcacaaaaaaaaaaaaaaaaaaaaagaagacgcataacactttattcaacctgaacctattttcaaaaactgtcttttatctctgtctttaaaaacaagcaacaaataaagatcctgtgtaagctgtgtaatgagagaacactcaatactataggttcataactaaaaacaagaaaaatgtttttgtttgttccaacttttctaagtgcaagtaaaccgtcaaaaaaaaaagacctcttcttctgagcacattacatagtggtaatattcttagtatattgtggtgttaggtagttgaaatttgcagtgtagaataatgagtaagagtagagaatggactttgaggtggaaccagggtgttaatcatagctctgcctcctgctagctattagcactttttaaaaaatcattgagccttggtttccttatctgtgcatgggaggtataccttttccacaggttattttgaagattaaaaaaaggatacagcccatatcacggttatcctattcctgtcacaaaataagcaggtaatgatatggacaggagacagggaaatactgaaatactgggtagaagagaatgattacccagcaaaagacccaccctcaagcctgtaaatccatggccctaaatgggaacgggcatttttgttttcatgcccaaaaagttgcctattggcccgccactccccccaatcctgtacccatatgagccccaaacatccggctccaggaggagacaagcagaggaactgaagaacagaagagcagcagagaggagaggagagaagagaaggatcgttgagaggagttccgctggggatggtcagagaggagatcagctgctggacagcaaaactccaggggaagatcatcttcctgctccatccgctttccagctccctatccatcccactgagagccacttccaccacccagtgaaacccctgcattcaccatccttcaaatctgtttgtgatctgattcttccaggactctggacaagagttcaggatacagaaagctgtcacactggccctctgcccttgcaaaaaggcagagggtccactgagctggttaacacttaagccgtccacagatgtcaaggctaaaagagcatgctgcaacacatgcccacttgggctccagggagtcataggactctacccctggatgctgctgtggggctggagcccagcgccctgcctcctgcacctgtccatctacatgctccccgtcacataaagggtttgggcagtggtggcaaccaaacagatgagccacatccctgtcacacatcctgtgagggggtcagggaactctcccatttcagtaagaaatagttattgttttacagagactttattggttcatttgaaaggagggccagaggtagggttggcccaggaataccattccctgtgatcctcttggccccaaccctctatttttggcttcttctgagggaaatctaggcccctccttcacacacaatgataaccttctgaaaccttttgccagaggcttctagaggacttatttgacgtatcatcgatccactgtcactggccaagttgagtcacttagtcttttctgaatatatgactggaaaagaggataaaaaaaacccatcaggccaatcaggccacatctgcaactggggacagtgttccaagctatgtgagctgtgttggagagtgtggatcatgtttacaaaaatcagtattgtaccttgaaaaacatgacattaataatgattctaacagaataaaacatgaacaataaaaaagtcagtattgtgctagaaaggaggaagtatagtagggtactgctagacaccgtcaatgtccaccatactagtgctcctccaacttcagcattcatcagatcatctggggatatggttaaaatgcaaattctgattcaaaagttccaggatgaggcatgagattatacatttctaacaagtacactgtctgctgtccttatttgagtagcaagatacaaccaccaacaaatagcaccccagcaaaatacaggctgggatcaacagcttgtaactacaagaaagttggctaatattggtggctaaagaacaaaaagaatgtaactgaccaatgcagaaatcaaacacattacacattgacatctaagtaacctctaagcaggttccattttagccacctgaccaagtcagccatttccatttctaaataaattaggtgagatagtgtccaccacctcatgatcaataccatgaattctggataactcaatgaatattcagttcaacctaatgcctgtatcaggcattgtgctagaccttgaaattaaaatgatgatctaaaccaggagttcagcaaactttttttagagggtcaaatagtacatattttaatctttgcaggccaagagagaaaatcaatgatattatgcgaggacttacatatacctatataaagtgttgctattttaaggcattcttacttgcggatcatacaaaaccatatggcttggcccacaggacttactttgccaacctccagtgcatgtagctatggtctctatcctcatggagcttacagtttattcaaagtctgacatgatgggttggcatttttttcaaaccttccctcccaatcccccttgtcatttgaatgaaaccgagcctaccggtaaaatggcttgtccaagttcacctacctatggacccaaatcccttaaccattgatcaggagctatgtgccaaagaacagctattgaaacattcttctggcatttaatttaaggtcataacatgaaaacatacaagtgccaaatcaaagattcttaagagctcagtataaagggaggaaacattaaccattaaattgtcccttcaaatacttatctttaaatgataatcacagacccatggaaaaagagctaaacagcaccatgtgtgtgtaaccaaatcaccacacctacacataaatgagcttctgcatatacaaagcaaacactaacttagccacagatgtttcccaagagtctatgcaactacatgctcttaagccatattccacagcttgggaaccacaatataaacttctcccagactctcaattccggctggaaacaaagctgctccttgtcagatagagggaatggaagtgaaaggcactgtgctagcacttctcaagggcccatttaacaggtgtgctcactgagtcacaaagtgggaatttgcttcgagagcagggcttagccatatagtttccagtaattctgacttttcctgcagagaaaaagattaagccatccactgcctaactctgaccaccacattgtgtttgcttttgcaggtttatcccacaacgttcctttttttttttttttttttttttttgtggtacttgttggccttttgtgtttaaaatgtcatttgaagtctgaaaaagaatcattttgctatcattcacaatgtcaaaagatggatggcttggcagggctggtgccacaagtcagatagatttagagggtggcatccccttgtggaagtaattcataatcactaaataaaaactttttaaatatttttctgtcccaaagtatatgaacaactcttgttcattttaagctgactgattgaagtcatatcccaaagatctttcacgcttaaagagaggggggaaaaaaatagatcccagaatctcacacccattatctgcttggccttttaaaagtctctttttttcttatagtcaatagcctttaggatctatgagttcataattgtatgtaattatctcagtgagccagctagcatttgtctatttattatttgttgtatgcattagcctatgcaaactcctaacaaaggctgtagaaagcaaaataaatagatgatatgtctatcttcagttagcttttaatcattagagaaatttaaacaaaagtccaaatgatctaaacatataaaatccccaaccccctccacagtgtacccatcattaccccatcatgaaagttctattttctaaaatttctatagcctttaacaatttagattaaataataggccatttgtaattttttctaattgactttcacataaagccttgatgcattttctagaatgtgcattttctgagggtagaaaatttagatttctgaaactcttgcatttgcttgtattatgctaagcaaatggtgggcatattcatttgccttttctaaagatacacatcaagatggtggagttgtatttactggctttggaatcaaatccctgactctcaaagacactagctgtcaccttcgactgtcagttttctcatgtgtacagtgggataataatcacacctatccttgtggtaaggatcatgcatatgaatgcatgtgatatgtgtcatgcttgtcatatgccatacacaaaagtaatgcccagtacatggctggctgctgctgttttcgttcctgctgctgttcctcccaccaccaaggaaaaaacaaacaaacaaacaaaaaaccctcctaaaagctgagtaacaatctgagggtaagacaacttgagataaacaacacagtaaaacctgacattaatccttgaagcaagcctaaaaccagacagtttttcctcattttcagaacacctaaaagggaatagtcccgtgtggtcttgagaataaaaattaaggaaaattgtccattttttcaaaggaattcagcatatgatttctaaaaccggtgtgttctctgggtgcaaagtctgatttacagactactttccagggacagggtctagcttgagccaacacccatgctggtccctggattgcctttctctatccctttctcgtccctgggagggctgccatgcctatgccccaatttatgagggtagaaataggaacacaagagcaagtcactgacccatcataggtccaggcttctagttggtagtggggtactttccggtgcttcttttgtacttgccccttgggctgccaaagtagttttggacatttttctgctgtattctgtaaggtttggtcagccaagaaggaccaatctattggtggctcaataaagtgcttctcaccagtttgtgcaggtcataaacattgcctctgagtgcactaagattcctatggttgcaagagacagaaaactgaatgcaaaataagcttcagcaaaaaaggtgaattattggctcatgtaagtgaaaagtccagggttcaggaggtttccaggacttaagtaatttcaccatgtcttgcttttcttctctcccctctaccttccactgagtctgtttcattctgaggtacaccatggtgcccctggaagctgcaggcttagacctgagtcaattcttctccctaagccaatcaccaaagctagcagaaggcaattttctagtgtgataaggcctaggccaggtgtctacactagtgagtcacttgcagtgtggttaattctgttgaagtacttaaattaagaatacagaaagagttatcccccaaaaggaaaaatggtgaggttaattctaaacaccaagtaacgaagaagtatggtaaggaaaactatttgcttgcaggccataagggtctagagaatgtagaaatatctataagtttttcatgtcatcctgctcattttttgttttcttcacacttatttcctagaatttctaccagtggatagaggtatccacagactaaaattagttttgtgggtgagcctaactttggggaatgggagggaggatattagtggtcagtgtggagtagaattcttacctcaatgctcttgaagttgttctctgtaacttgagaagaaaattccaagaaagtttgttttttttcagagagagggagactggagtctgaacttgtcacaccctgtgctatctgatgaaaatacagaggcaatgactctcaaattttccataatttaacgtcctgtcccaaaccacacaaacaaaatgccacggaaccactacccagagaacaggtgcagaattgtttgctcagtcacaaaggatgatggttttgacccatgcccgtggcaaccaatgacacatgtttgcaagtgtcaccttctctgcaaagtgttttctcatcctatcaattgttttctttttttgttttcatagctgcagcagttatgttaatacagttgacatttattgagttcgtatttgtcagtctttatgccaaaagctttaccactattatatcatttaagtcctacaacaattctgtgaaataggtattatctctattttacaaaatagaaatctgaggcacaggaaagttaaaagtaactcgcccaaggtcacagaaccttacatgatagaatttggtttccaagccatgtaagtgcataaccaaaaagctgtctgccaatgcttgtctccattgtaacacataacaatagctaacagttattaaacacttaccttgtaccaagtaccatgctaacaacataactttagaggtattatctctttagtattcatggtcactctgtgatatacactctagcagcatcctcacttttcaaatgaggaaactgaggcttatagaagcagtataactcattcagagtcacacagtttgagtttaaaatctggcactcaagttcattttcttacctaaaagccagtactgcctattctctttaaatttcatctcactgtttatagttacttgtttagatgccaatttccccactagattgtgagatccttgaaggtaggaactggaccttaatcactgatcataacaggtgcttcataaatgtcttattcatttatttccccagtgtcaaatatagtgtttaacacatataaggtgttctcaatatggaacaagtaaatgaatgaaagaggatatgaatgatggctactgaggttaaaaaaaaataacctatctccatagactggaaatcatgtaattaatcatttagtaggttgaacccatgacctgagctttgcaaaagtcacttcaatccaggtaacttactctcaaaataaaaatgacttggttgtggccagtcttccacaaatattacaggacttcagtcacttttctgtcactgtaatagctcgtattaaaaaaaaatagaaactcaggtattgtataaaatcatctaatacagcaagactcaatcctcaacactgttctttctggtgtgttctttgctgggtttcatcttccctgacctttaacatttctctccacaataatttcacagatgccaccaaaaatgacattaacacaacaactaattcagccttctgagcatcaggctttaagctcccatgaggccatgtactaggcattctaactatatgtggaataaaaccaaataaacaaatatagtttttttccagtgagagagttttttccataataaaataatacaccctgaagcagacaattaaaggagtttatggtttctagccagttggaagatgaagaatgcaaatatgggagttatgtttgggaagaacctgtttgggagcccgaggtaagcccaacatggaatcaagcccctacttgcaaaactcaatggaaacaagttcgtgttcaaacaactgtggtttcttcgagctcaagagacagctgtctggaaaaatgactcaatagagaggtcaaacgtgttgtagatattgccttgagagcatttattcaaatgtgggagtaaattactcaaccttttataagagcaatagatatttacattaaatcaaatgaacaactatgtaagcaaccatccatattccaccactaccaatccatgtaacagcgagcagacttgctcagtttctacttctcggctgacctccacctctcacgttcattctttgagtatcctgggacacacatggtattgttttaaaaggtggcatcctctggcagacatgcttggttgcccagctcttagccttaggtattcttgttcttgcaatcatatccagtgtctttttagaaaacaaagctaacataagagacaactttccataagccaaaggcaacatccaaaaacccaccaagaatgcatgatctaatacaatgattggtaaaccttttcttttcttttctttctttcctttttttttgagacagagtttcactcttgttgcccaggctggagtgcaatggtgcgatcttggctcactgcaacttccgcctccctcgttcaagcgattctcctgtctcagcctcccaagtagttgggattacacgcacgcaccaccacacctgctaatttttgtatttttagtagagatggggtttcaccatgttggccagcctcatcctgaactcctgacctcaggtgatccacccaccttggcctcccaaagtgctgggattacaggtgtgagccaccacacctggttggtaaatcttttctataaagggccagatagcaaataggttcagctttgtgggccatattgtttctgttgcaaccacacaactctgccattgtagtgcaaaagcagtcatagacaatacctaaatgaatgagcatttaggtattcctgtaaaaccttatttgtaaaaataggcagaaggccagactgagtttgcaggctgtggtttgccagcactggtctagagttcccaaaggatgcatccatctactatgaaaaatcctcttatgacttgagccctgtctaactttctgactttatcttgttctactcctaatgtcacctactctggctacctttttgtttacttctaagctttcctcagccctccacttgaggacatttgcgtttcagcttctcttttcccagaatgctatcccctggcccttgttgattactgaatgaatgagatcttgtggcctattgttggcttaaggaaatgttttaaagagttttcaaatgtgtccttaatacaaaaacagttctcttctaattttacagtatactgctctctacaagatggctcattcatgactttcttcagagataaccttttcctatcaaaagcaaaatatgttatccctaaacatgtaactagatgactaatagaaacgatagtaatcattggccacttgccactctgaattcagcaagaagtttaaaaagaacggagatgtgtcttctgattagctttacctaccaaataattcccaacaccacccccgaccccccccaaaaaaaaaaaaaactaaaaaggcctgtttgtctgtttgtcaagtaatgtgctcattagggacttcctttccatgaagaatcaaagcaggtagctctggcccagatacaggtcaaggcctgagcccatatctgctcaaagttcgaattgtgttttgggaaccaggaattgtctgctttattgactaatacaaataaagaagaggggattccaagcttgtgcgaaggattcttttgctttgtaaaatatcatacgtggtggtttttcaactaggagtctgaccatagaaagaactactttactctgcttattcgtaaaccactttagaaaacccataatacagcttacagatacaattcaacacaattggagtagagaggagaggcagcaggggtaggagtatatttgtttggggctatttcctaatgtgggttattactagactttccaaagtttgggatcattttctccacactcccaagtatacaactcttcctcactcatgacaattgcatgcctggctctgggtcacttccctggcctatttcagagcaggaaatctagttaaaatacaatatctggcacttgactaaattttataagaacaaaaaaagtcctctcaaaacctttgactcttccatgaaatttttcccaaatactcgttgtaaaagcccccaatagatagaatggaaacaaaaatgtttcttaaaagggaagaatcatgcagaaggaaatgataatcacaaatccctcaccaatgcttttcttttaattgaactaaaaattattctcacctgagcgtcattctcaagtggttttaaagtctatgctctcagccttctagtgggagcagtgaatctttcttgctcagaaagcagacatctagtcaacaacgtatgtgtgcactttggtcgtttcagctggccacagctaagtcttttgtgttcacgtgacaggggttttgagccacagtggaaaacgctgcctattttggtccagccctaccttcaacagagggagcaaacaaaagtgtctacaaggtaacattaagtgagtgcagggcccaggtgggagttgcattctattacaggcagccacagctagattctgccaagtatgaccacattagaatgtaggcccaacattgccagatcttccaattgaagaaaaaaaaatatcagaaacccagattacccttcaaactttaaaatgttggagcaattttaaaaaggaggaggaggagggaggggggagggggaagaagggggaagtcaacaaagccaaatgtatctacaggccagattgagccaatgggttgtacatctgaggccattgtacgacagtcacagaagtccacacagtgaagccagtgagctgagatgtcctcagagaacatcctcaacaacttccaggcttggagctgggttctcagcatgtccaaagctgcggaggcctaggcttctaagttgctgctctctccttgaccattactaagaaggttctctggtttgctcatttttcaacctttgtggtacacagagtgagagaggagtaaatgaaagtagggctaactatctgacttgtcagcttgttttctattatggttaacaccctgtgggggtgggaaggataaaaacctgattgttatcagtggcgaattcttttcacctctatattgaaatggtagggcttccttgtctaaatttagacttcagctcaaatctcttgcttctttttttttttttttttttttttgtttagaccctggccaaacatgaggttcaaattgatgtatgttttgtttttccattgttattcctggagcactcccagaactagaggcaaaatataaaataaaaatgaagacacaagaatatctattgtttgcataccacacgctttcagttagttagaaaaatgtgtttatttcattacatttcctttaaagagctatgatttaagttaaagacaaatgagttttttaaactgagaacttatgttcaaaatgttttggcacttgtcatgaaactagagtgtgaccaagttctttgtcactaagcctcttcttccaattgctttccactggcagtgccctgtctctgtctcctctctttgttgagaatggaattccctaaagcaaggaccctcaaaaagcagcattttccatgggaggtctcactgtaggggcagcaatccctggaggcatgaaaaagacctggatgcagcacagagtcctttgtgcccatttgacctcactgccctttccccaaccactagaggtccatttgtcatgttttctggggttttttgtttgtttgtttgtttgtttttgttttctgagatggaatcttgctcagttgcccagcctggagtgcagtggcttgatctcagctcactgcaacctctgcctcccaggttcaagcaattctcccacctcagcctcctgagtagctgggattgcaggtgtgcaccaccacacctggctaatttttgtatttttagtagagacagggtttcaccatgttggccaagctggtctcgaactcctgacttcaggtgatcccacctgcctcggcctcccaaagtgctaggtttacaggtgtgagccaccacatccagcctgtcatgctttctgttttgggacagatgcaccctctccagggtacaattatttagcactgcttaaatgttgctcacagtgatgcaatgttgcttttgctatgggttttgcatccccttctagacatgtcttgagtttttaggtatttttttcattattaaaaatatggtaaactatacagtggcaagtggatttccagattttaatctgcatccagaggtagccactgtgatattttggcttatttccttgagacaagtaaacacagacattttttttcctgcttctatgacagcatctgttgtaaaacacaccattgatttaatttgtgttcttcaaacttaatgaggctggttccttcttgtcattttatattaacttaaatgtcaccacctcacataaacctccctgatcaccttttctaaagtaatcatcatctccgcccccatctgttgaactttgtcacatccccctggtctgttttattctgaggaattaatactatctgagattgttttgtgtctccacttgtttatgtttagatattaaactatccccactagaacataatcttgggagcaagaagctgtctgtcttgttcatcgctgtgtcttcagggcccttcagaacagcgttgcctctgttttcttctgaaagcctgctcaaacgataatacattttgaaaggctatcaacttgcaagggtgagaagaaggggagagaagaaaagtgtggtggagattgaaagttcgtgctagaaaacgtaaatttagtgcggatatgttcctgtttggaatctatctttccagccctacagggtcttggtaaatctgtctccccacagtctactccctaactctgatttagtaaccttttatttggatggtgccgatcctgactttggtccaaggatcatgagctcaaatctgttttcctgccagtaaagagataataaaagcttcagtttcttcctttaaccccatctattcagagataacagctttaacatttcaacaaacttctaatcttgtttccatgctttttattttttacataattaagattgcactaatctaaatagacactgaagttgctgacaagcaaataaaatagacttcatgccgtagttgcctggcaattgcctgtttgacctaccaaagagcacacttaatagaaaagtcaataatgttaaaagaaatacagaggccaaatgaaaaactggtagagaaaagtttctattcatttatagttttaatattttatatactttgtgtcttattacaaatgacactcacgtgattagaaacaggttacttcccagtagctcatctcctgctgttatacatttttcatctgaatgtattacttctcagctgcaacacacaagttagcaactgtggaaattattataatatggaaattattataatgtcattgaagactgtggctttagaggggaaataaccagcaggcataaaaccttcagccatgaagttgtggtgttcctgtaagtctcattaagaagaaaaggaggggggtagggcaacggtagactatataaaatgaacccataatttgaactggcttaagccttcttttattgaacacctttgaaactgcagactggacacctgtagggaaacagaattaggaggctcaaactatcacgcagttttgaaataaattagggatagttcagggaaatgggtccaaaagccagatgaatttctgacaacaaaactctaccaaattaaaataacatttcttttatagctttgagtctggtaattgaagatgaaataagtcacctttaaatggttatgatattgctcagtgaagagaaaaatgttaattgatatatttttagagaatggcttgggtttgaagcaatctcatgcattctcaattttctgttaataatggggcatcctgaagtgtctcagctttccacactcataatgagtggtgaggtgtcttctgcttctgggagtgatagaataagaccctacgagatgactttcccatggaaaacaaatttaatcctagacataatacaaaaagttgtaaataatggagagtacgccgagaaagcaggcttggtaaagagtagacactttggaaagggtggaagggaggctatacatgttaggttaccgtcttcacagcttacagcttgagggtaagtgcaggtggtacagtgtactcaacgcagtgggtgtgcttgtgaaacaaaacagtcttttcaagacacactgaaaagtgtgatgaaatcaccagacagaaagatctagagagagtatccccaaattctgtctacctatatctctgacaaactatgcatgcagggtacagactcaaagcagctaactttcagtctttaaatataaagacaaatatgggctgaaagacaaaggagctcaactgagattgtagctgccactcaagaaacagtttggagcttaagttcctacaataattagcagcttaaatgaaagaaacaacacttatcaaagggaggtaaaaacatccagaatttccactacttaatattcactccatataaattaatgtttagaatataatccaaaatttcccaacatacaaagaaccaagaaagtggggcatgttctcaagagataataaaatccactgggtctgaccccagaatgaaccagattttgaaactaaaagattttaacatagcaattatgctaccctaaataatgtatatgatgagtgaaaagacatgaaatctccttggagaaacagaaacaagaaagaatcaagtgaaaagtctagaactgaaaaacacaatatttgaaataagaaattcaccagagggtcttaagagttgaatggagatgtgaaagaaaagagcaagtcaaattgaagataaatcaatagaaattatccaacatgaataacagggacagagagagaaaaaaaaagaatgacttaaaaaatgaagcctcagagatccattaggtaatttcaaatagtccatatgcatgcaaataaaatcctaaaagagaagggagagaatggagcagagaaagtacttgaagaattaatgaccaataaataacaaatttgatgaaagactaaaatgtacaggtacattatgataaatgaaaaccaagcagaataaacataaagaagccctcaccacagatcatcatactcacattgttgaaatccaaagataaaaagcaaatcttgaaagcaggaagagaaaaatgacaatcctatacaatcctatacaaaatgacaagccctatacaaggaaacagtgatctgattaatggtcagtttctaagcagaaactatgaaggctgaaagagaatggagtaatagttccaaagtactgagagacaataaaaaaattgtcaaaccagaatttattacccagcaaatatatcccgcaaaatgaagactaaataatgacatttttgcatggaacaaaactaaagtgagttttcaccagcagacctgaactacaagatatgctgaaggaatttatccttctgaaaggaaatgataccagatggaaacttagatcctcagaaaatattaaagagcactgaaagtaggaaatatctggaaaaacgcaaaagactacttttaaattattttctttttctcttaatttatttacaaaccatataaatgtttaaagtgaaaattataatgttgtcttaggtttataaggtattcagatgtgatacaaataaccactgtagcataaagaaggaagagtggatatggacctacatgggtacaagtctcctatgagttacatgagtggtaaaatactaactggatatagacagtagagaattaaggatgtatattgtaatccctgggctgccacacacaaaagtaataacacaaataaatgcagcttcaaagccaataaaaatatctttctaaaaattatttaagaattcaaaagtataggaaggaaagaaaaaggaatagaaaacaagagagaagtagaaaataaaataaaatcattgattcaaccaaccataacaagaattacattaaacattaaaggactgaacaattaaaaggcagagattttcaaaatggataagtgcaacatgacaacatgctgcctgtaagagatatgctttaaatataaagacagatatgggctgaaagtaaatggatgaaagaagatgttgtactcaaactgtacacataagaaagttggagtggctgtgttattattttaatgtgtaaattttaactcaaagaatgactacaagacatcactcaagaatggcatagatttctcatgttttcctaaggttaggaaatgtttccctatcttggatttttccacccctattctattatctttaacattttacatttttttagcattatgtggtatactgtgccctttcacagaccttataataaaggtaaagcagaaattacccccattttagaaatgagaaaactatgcagagaccaatgaattaattattcccagagaaacattaggtcaaagaatctcatttgaaacccagtctgtggatatatactgccttccactttattatgctacgtctttcctcttctgcaatgaaattttcctattgataactgtatttctcaggaaggcctagttactgggagaaaattgattgtaggtagaatgacattagagacagagtctatacctacaagccatatgcttaggtggaagaatgttagagacccctaatctcatcgattatgctgaattttttattctctcaagaaaattcacaatatttaattaaggaaaagaggaaataatctataagcagggcctctctcaggaaggaggtaaagctatcaaggacctatcccaggaaagctgctttggcccacacattcaataccatctaatacccatctgtttggggtggactttgaggaattttaaaagaattttactgtaaattatcttgtatttacacaaagaataaatttgtttcttctatttcattctttgttacttcaagctggaatacacagaagaattgggggatattctatgcagcaatttggcttaacatgctgagcactcaaatattaaaagagaaatggataacagtagatatcacatctgagctggccactcactctgtttacatgactcaatgctatttggttaggcagatggaggaagatggttgcagaggggatgagtttattgtaatttcaataaattaaagtttgaatgttttcatatttttccacaactctttttttatttttattttattattattatactttaagatttagggtacatgtgcacaatgtgcaggttagttacatatgtatacatgtgccatgctggtgtgctgcagccattaacttgtcatttagcattaggtatatctcctaaagctatccctccccgctccccctaccccacaaccgtccccagagtgtgatgttccccttcctgtgtccatgtgttctcattgttcaattcccacctatgagtgagaatatgcagtgtttgcttttttgttcttgggatagtttactgagaatgatgatttccaatttcatccatgtcctacaaaggacatgaactcatcattttttatggctgcatagtattccatggtgtatatgtgccacattttcttaatccagtctatcattgttggacatttgggttggttccaagtctttggtattgtgaatagtgctgcaataaacatacgtgtgcatgtgtctatagcagcatgatttatagtcctttgggtatatacccagtaatgggatggctgggtcaaatggtatttc

SEQ ID NO: 2265 - DNA, 1780 bp, Homo sapiens
cagctcagagggttgctctaggaaatatctacacgttcttgaagcacaggtttatgtgccaggcactgtactaagtgctggggacacggcgttaagaccaggccctcacggagccctcactctctgaggaggaacaataagtcagagagcgcgcgagtgcagcccttcaggcaaaggatttcaggcccaggtcaggaaggccttgtctgaggagtctgagaagaagtcaattgacaacagctagaacatctaggtcaggcactccaggccgacacgacaaagcaggtgcaaaggccccagggcgggaaccagcgtggcttgttcacagaacaaggaggtagatcgcttgcccttgggaccaaaggaaggctctggattttattctaggggcagtggaagccgttggagggcctcaggcaggaacacaaggtgtcgtggcagaaaggaagaaggggccgggcacggtggcccacacccgtcatcccagcactttgggagggaggccaaggcaggaggatcgcttcaatccaggagttcaagatcagcctgggcaacacagcaagaccccgtctctactaaaaccctaaaacttagccaggcttggtggcatgtgcctaaggtcccaggtcctcgggagactaaggcaggaggattgcttaagcccaagagtttgaggctgcagtgaactattatcacaccactgcactcagcctgggtgacagagtgactctgtctcaaaactaaataaataaacaataattgtgttattctgtctccatttctcgcatactgaatttaaggtggactcagccagcgggttcaggcccagggtctgtcctgcagctacagtcagggttggtggctgcagctgtcatgggggagcggtgaggttgggggaacaggggggctggcctgcatcccccactttcaggtgggctcaactccgtctcgtggcctattgggggccagcatgggcttccttacagcatggaggcctccagggtcaagctgcctctgggatggcagagggctttgtgttcgtgctcccacgcccacagtggaggcaatacaccctttccagatctagcagtacaggtgcgcagcaccacacctctgtacgctctcagcctaagctgtccccagccctcctggcctctggaggaggggacgcagaaactccatcccggacagagggagagccagtgtgtgcacaggcagcttctaacactgcttcgtggtttcacacggctccctcatggagaaggggctggaggaggacagggaggtgtgcagtcatctgggtgacatatgagggtggctgggcttccagatggctgcagtggagaccgtaagaagagtgcacgaggtaaggcttccgaaacgcccagcaggttcctggcagctgcagacaactcaattcttagcacttgccaatagctggggtgtaaacactcccgccgtcgctatttcgggctatgctccttgcctccactgggtctggctcttaaaacagcaagaaagcaactcggaagctgagtcagccccgtctctccaccgtgcccacagatccttccctgttccagagctcccgttggcagccagctgggcttctcagggggcatctccagtcctgtgcagtcagagaaaaccagggaagcatcttgatctcacctagaaattaaggccatcacatccaacacctgcattttacagaaaaccactgatgatgtgcaggagaatcacagctgggaagaaacacaggaggaccttttccttcatc

SEQ ID NO: 2266 - DNA, 2257 bp, Homo sapiens
cacaaagccaaagccttaggcaggctgcactgttgacaatctttgaatgtctcttcatttcatctttctcaaggtgtgcgcagagcagagcacagagggccacccggggagcggcaatgtctctgaagccccaggcagcggtcgcaagaagcccgagaggccggcagccatctcctacgaccactcggaagaggggctgatggcgagcatcgagcgggagtactgccgctgaggacagcatgctccacccccgccaggcctcggaggcacctgctggctggggcaccctctgcttgcacagagctctagcaggagctgaaccacctccaaaacgcagtcactcccggatattcaaagctgccctttcaaatccactttcagaccgcgctgacctgggccagccactggcggtcatggttgctggtgggggcgattagctgtgtagacccacaggtgcgtgggcctgggccgccggcgcctcctccccaacgcggggagcctgcccagttcttctggagcctgaaatgcgtgcccctcttggttgcccgctctccacagtggggagggctcacgaggactaggtgacacaagcgagcccctcctggcatccgcgccacaacacttccggaaggttctgctgtggaaggtgcacccgcgctgctccctcagtctcgggcccatctctccaggggtggccgggtcagcttagtgcttctcaactttaactccctaatgagcagcctgggggtgctgttgacttgcagggcctgaggttctgtacgtctaaccagctcccagcccaggcccgagctccgaagccccaactgcactttgaggagcgagaaccccagctctgatctgccttgcagtgggaggtagagctcgtcactgcctctctgggcctcagtttccctctctggaaaatcagctctggcagctcttggaggccctccccagctctgacaatctggaactgctgccactgctggtcccctgccccaggcacagcagtgccttccctgcggggagccagcgcccaggtccaaccgggagagggtctgcctgatactggctttccagttctccctctcacaggcagcctggccagtgcctgcggggcttttaaattctcttcctgcctgggtggaaggtgggaaaccacagcagtgaggcaggaagagccttggaatgttcctggttgacagatgggaaaactgacctgcccaggacgccctgggaacagggggcggagctccggctagaggggactcctgtgtgggcgggcaggtctggagcctgggcccaggtgtggcctgctgggggacagctccgggggagagctgtggggagaacagcggtctagggaggcaggaggcaggcggcaggctcctccccagcagcctgcagggcatcaggacagagggggaaggaggagacagaagggaaagaaggagatagagggggaaggaggaaacagcgcggcttctgctgaagccagtacaagcctggttatctggcttgacccgcccacacggaggcctccccagcgttttctttttcccgagaagagctccagctcgcaggtccttagaacacagcagagcaggagcatctcaggaaccaacggccagctccttggcgctgtccccagccccacaggcctgctgcggccatccgcaaacgggcatttccttgaacttttgagagtgcctttgaccagctgttcgcagctgggaaactccaacttttgaagtcagagcttggagcggcccccgcaagggcgtggctcaaaccctccccagagctgggagccattgcttatgcaagcccgtttcttttgatgtaaagatggaagtcgttactatattttaataatgcaaatacatcttttaaaataagttaacatttcttaccaccagatggatcaggctttgaatttaaacatgtaaatgtttgtaattttatgtcattttgttaaaatgggacgctttcaattggtttccaagaaagatgatacctctgcattttctggtggaaaaggtgtaatacccttaatgagatcaaagtgttaggggaaaaaaattccaaaagtagttacaagctatatcaatgtcaaagtaaatgcacttcatcaaagctaagaagtcacaggaattgttctcaggtttttaaaaaaatttttcctgaattcaggaagtgtcttctgaatagcagctagccaaataaagcggtgtgtgtgtactgcagctgtaggtga

SEQ ID NO: 2267 - DNA, 5122 bp, Homo sapiens
atttgtaccagggacggagggagagaggagagggaggaggggacacacacacacacacacacacacacacacacacacacacacacagagagagagagagagagagagagagagagagagattgttccagctgctctcgctagagaaagggagtgacccaaggggccgcgagtgaagggacaggatggcttaggtacctctgcccacaggaccccacaacagggagaggttccagctacagctcctccgtggggtcatggcaggggctggggagtcccctcaaaagccctgagcccccctgcaccgccgctaagggacaccccagaagttagcatcagtgggactcggaagctccgatctcaacaagcatgacctgccaagcccggagctcctacatggatacagaggtgctctggggccaccgattcacaccagtcctcaccttggaaaagggcttctatgaggtggactacaacaccttccatgatacctatgagaccaacacacccagctgctgtgccaaggagctggcagaaatgaagagggaaggccggctcctccagtacctccccagccccccactgctggggggctgtgctgaggcagggctggatgcagaggctgagcagaatgaagaagatgagcccaaggggctgggtgggtccagggaggccaggggctcggtgtgaggggtgcagcctccctaagacctcctgtcactggcttcagtgaacacagacactgcagagcctgggagcaggggaggggaatagttgagtgtgctgtttgggggctcaggagccatcaaggctgtggggaggaaccataaacccagccctcacagctcccagcacagggcctccctgagccagtggcatcctgcctgggccccccatggcagtgctgcctcttgtaggtgctggctaagggccaggccaggatgagtttccccatggtgaatgttaccggatggcatctgttctctccatgccctgggtcacttccttttttgggtctcacagacccctccaggggctgacacctagagagaaccatcaccttgtccctcattccttccaccctgaggcttgctgtggactcagagaggagacttacctgatgagagctcaaacctctagtctgggatgagctcacagagccctcatgagttaagatccatccatatcacataggcaattccttttaaatcagataccaacgacccattactgagaggtacagagcgtacagcccttggtgttctctgctgttatctgccaaatgtgtgtgtttttcctctgctgtgttctgtgtgtccagtgtagcctattggagaatcggtctcattagagtgactcttagaaggtggcctgggactagacagcccctctgagcacatgcatagtggcatcagcagcttcctggcctactcccaatcacactgtgccctgcacctcccaccaagggggaaccccagcagctggggcttttcgagtgctttttggcccaagaatctcagagtgcttctaatcatcacagtagtttttgtgttttgttttgttttgttttgttttgttttgttttgttttgtttttttcacaatctcagccagcctgcggtgtgacctggggagaaagttgagtgtcaggggacatgatgagccagttggccctgaaacaggaatggggcaaagagaaaggagagccaggagcatttaaaaatcagcatctgggccaggcaagatggctcacgcctgtgatcccagcattttgggaggccgaggcgggtggatcatgaggtcaggagatcgagaccatcctggctaacacggtgaaaccccgtctctactgaaaatacaaaaaattagccaggcatggtggcaggtgcctgtagtcccagctactcgggaagctgaggcagaagaatggcatgaacctgggaggtggaggttgcagtgagccaagatcatgccactgcactccagcctgggcgacagagcgagactccatctcaaaaaaaaaaaaaacatcagcatctgccccagttgtggccaagacactctgacctcagggctcagcaccttcaccatcaagttcagcctgagccaagctcccagcccactgctgaaaagcccctgggcctccctccacaggcagagttacaaccgggagggctgggcagggagggcagggagattgcctggggaaggcaaagggaatggctgcccctcccaggctggaaacaagagggcaagcggggtcagcaggagaattcgggggcagggtgagtgttaagaaaaaaagagtagagaagagcctgaaaatcagcaacttccagggcttttctgatctggaggcccaagagcaagggtggaggggggcagattgtcaggtcccgaaatgtgtgttgacacacacgggcttcgggttagctggcctgacatggagatagagtgccaatgttcccaggccacagaattatggaggcctcacccacagtattcacagctctcaactggcctttgagaatggaagccttttcctgccctggatatggcgcttcttcctgggagaggagcagagccacagagaggtaggaagttgaggcagagcaaagggaaggcttcagagcttaggcccggttcatctcagaagtgttttctaggcctggggctgaaaggaagaggggtggggcagcctgggacgggaactgcctctgtgggctccccactcccagggaggggctccataagctttgctcctgggctggatcttgagaggtgggcagggtcttcccaccagtggcagggtgtgcagttgtggtcccaagccttggagggaatggggaatgggctggcacccggctcagggaaagcagaagcagacagtgccccagcaggggagctgcatgcccccaggagtctcagaaaggcagcccatcactaaggctggatgcctttcagcagagctacagctggagccctccggctgaggccagcactcgcctgggactccctggaccccagggttactaacagcaaaaccattccacacccccttgccagatctaagcctgtcttaggaccgtcagtgcccccaggttagagctcatgggggtcaactaagcgagggagggaaggcgaaggcaaagctggccttgcacctggacagcggcctggctcctccccacacctgccttcatttatgactctgaaacatcccccacctgaccaagggagccactctccagttctctcactccaccagggccctccgtgagccaggaccaggtcacatctctcagccaagtctagaagctctggctagaggagaggaagcgtgcagagggtcctctgccaaagctccctgcctggcccgagcccgggcatgctgggattagtgcaacaccgccccagtgtgcctcctctgccttctatcatgccagtttaaaagcaagaagactcccccttcacatcctgaggaaatccccttcctggtgaccaactgatgcaatgaaagtttgaaaagttcttcattttctagaagttcttgaataaacatggacttactaaatgcagagtctgatgatggacagagtttcaaggggtcactttcaaaacatttaattaatttatttatgtagagacagggtctcgctctgtcgcccaggctggagtgcagtggtacaacctcagctcactgcaacctctgccacctcccaggttcaagcgattctcatgcttcagcctcctgagtagctgggattacaggcatgagccaccacgcccagccattttcaaaacactgctcctgcatacaaaccactcagaggccactgcccttggttctgtgatggctctgagcccatgccatcacatctgatggaccccagagagctgagccgtggtttaagatggggtcatgcgctggtcattcccacagtcttgagtatctccaaaatcccaaagtgatatttcactttcggaccctgaaagtttggagagctggtttcttgccttaatttaagctctctgagaatgtcccctgtagggagaagcctccaggaactcagaatagaactcgttcccactcattttccttgctccaccaatctgacgcctgacagatgtcaccactgcctgaaggatcctgtccccaggccagggcagaatgggcattgcctttgactctccccttcagactcccctcccaccggcctcctgtgtagtcagagaacccactgcccatcgcctcctgctgctgctttgaggttgaggtcctggcttgagcagttaccttgctggagaagaggagcccctgccatctggggagcactgtccctgctcgtgatctgtaacagtggggcgctttttcacaccccttatctcacggcttgcttccagcccccatcaatcctgtgcctcatgtgaggtgagccccagagaaacttaaattgcttgtactgaagttgccaaaaaccaaaagttgcccgttgtcatttttaagactgtgccctgaacacacctctgcccatgcgccatggagcatgtgttaggtgcctgccgtgggtcaggcacttgattctcaaaacactgccgagaagctcttaccaacgtgacagttgaggctgagagaggttcatgagcttgctcaaggccacgggtagtaataagaggcatggccttggtgccaagtgcctcccaaacaaacagccggggccgtggtcctgcctaaactctcacatccacggcaccacgctgggcccaggcaacagagataaggagagccctggctcttgggatggggtcgcgccgattcacatgctgtgccacggagccccggcttccatccatgatgtgcccctgtggcgggataattgggaaacaacctttttctgattcccagagaactaatgagctgcaaaaagagattagacagggaagaattgctttcggggagaagccacttactcggctcgccttggtttttgctaacaacgtctccttaaactgctgtcaaatctttttctccctgtgtaggattcatcaatcttcgtatgcaaaagaacaccactgcactgcactgctaaaaattcacacaataaaatggactttaacttgcag

SEQ ID NO: 2268 - DNA, 2220 bp, Homo sapiens
ttttcccagtttcagaaagttaaactaatttattatctcaaattggatttcttgggagaatttaagatttaggaggaaaaatgccagttgtcagaggaagaattgtaaagttcttttcctaaaacatgcatcatttacaaaatggatttgcatattctcagtattgttgggacagtaacatttggaaacagtcatttccacagaagagctttgagcctgatatccagtggggggtcatttctgactctgaaaatgagtatagctcaggaggcccaggtgctggggagtgacgccatcagctccactgcaggcctgcttgttatttccagccgcatatcacacctgtgaaagggaaagattcttcccactgtttgtccttctgatagccttctctctggactttgcatttccattccttttcattgacaaactgactttttttatttctttttttccatctctgggccagcttgggatcctaggccgccctgggaagacatttgtgttttacacacataaggatctgtgtttggggtttcttcttcctcccctgacattggcattgcttagtggttgtgtggggagggagaccacgtgggctcagtgcttgcttgcacttatctgcctaggtacatcgaagtcttttgacctccatacagtgattatgcctgtcatcgctggtggtatcctggcggccttgctcctgctgatagttgtcgtgctctgtctttacttcaaaatacacaacgcgctaaaagctgcaaaggaacctgaagctgtggctgtaaaaaatcacaacccagacaaggtgtggtgggccaagaacagccaggccaaaaccattgccacggagtcttgtcctgccctgcagtgctgtgaaggatatagaatgtgtgccagttttgattccctgccaccttgctgttgcgacataaatgagggcctctgagttaggaaaggctcccttctcaaagcagagccctgaagacttcaatgatgtcaatgaggccacctgtttgtgatgtgcaggcacagaagaaaggcacagctccccatcagtttcatggaaaataactcagtgcctgctgggaaccagctgctggagatccctacagagagcttccactgggggcaacccttccaggaaggagttggggagagagaaccctcactgtggggaatgctgataaaccagtcacacagctgctctattctcacacaaatctaccccttgcgtggctggaactgacgtttccctggaggtgtccagaaagctgatgtaacacagagcctataaaagctgtcggtccttaaggctgcccagcgccttgccaaaatggagcttgtaagaaggctcatgccattgaccctcttaattctctcctgtttggcggagctgacaatggcggaggctgaaggcttgatccagatggaagctgtgaaagtgaaaacattaaagtctttgacggaacctccagcaatgggcctctgctagggcaagtctgcagtaaaaacgactatgttcctgtatttgaatcatcatccagtacattgacgtttcaaatagttactgactcagcaagaattcaaagaactgtctttgtcttctactacttcttctctcctaacatctctattccaaactgtggcggttacctggataccttggaaggatccttcaccagccccaattacccaaagccgcatcctgagctggcttattgtgtgtggcacatacaagtggagaaagattacaagataaaactaaacttcaaagagattttcctagaaatagacaaacagtgcaaatttgattttcttgccatctatgatggcccctccaccaactctggcctgattggacaagtctgtggccgtgtgactcccaccttcgaatcgtcatcaaactctctgactgtcgtgttgtctacagattatgccaattcttaccggggattttctgcttcctacacctcaatttatgcagaaaacatcaacactacatctttaacttgctcttctgacaggatgagagttattataagcaaatcctacctagaggcttttaactctaatgggaataacttgcaactaaaagacccaacttgcagaccaaaattatcaaatgttgtggaattttctgtccctcttaatggatgtggtacaatcagaaaggtaaagtgaaatactgatagctggattttgtcaaatgctgagtgc

SEQ ID NO: 2269 - DNA, 17874 bp, Homo sapiens
cttgtggaatgggtagcagccattgattggttaggtgtattaatgctggcctgttaaatgacatgcagacgtgtctttgtgctaaatggcagctgaatgggtgccagcgagagaggttattaagcacagataagaggcagcacctctattcactggcaatgtcactttctcccatttgaggagagacatttgttcaagacactttttttctcctctcactgacaatacgtaaggcagaaagttggtgtctacgttgctgcatggctgcagaatagattgtttcgagaaggtgaactctggaaaggcatagccaattcatggtgaatggaagacctgtgtgtcacttctgggctgcaatatttaattacaagtctgaactgtccagaacgatcttcctccttccaaagagatcttggaagcacatgttgcaatagagcttgtgagcttctagttcactgaatgactcattgaatagagttctttcgacaaccagaaaatgggcataagggaaaataaactttttttttctgttaaacatatgagatttgggagctttttataccacagcattacctgacctatctaagtgatagagtgagagtcaataagaatcaatattcataaatcagactcgcctataattttcatttgtcaaactatccttttctagtgtcagataacgttgcactgttttcatagaataatatacattttcatatctttggatgaattttatgatcttggaatgatgtactccttttacatctgctaaatctcaagtgtaaatttttttttttttagtttgtgggaagattttagcaaatgttcatgttgaaggctttttctaactttcctaagttctttgaagagataatgctagtatttcatataaagaagatatgtagaaaagcgatttgagaatggagataaaaagaatcaaatgtttactcatgctgagaaatggcagatccttgggctgcagaaagagaggatgggatttgttcgttgttctctgaccttaccttaggaaatttgtaagacctcacacaaatattaggttggcacgaaagtaattgcagtttttaccattacttttaatggcaaaagccacaattacttttgtgccaacctaatatttggcatctatggggtttaccactgaagcatgacatcttctaaaagattatcattctcaaagcaaagaaaaagaaaaccagatgcataggatctgaaacagtcatgctggcttgtaccttgtgtattccagtggcaatcaatgtgcgcccacactgaaggatcagggggatttcctaaagcaaattgttctaattctctgtaggattctagaaacttgacataatttagaaaaactttttgattacaatagaaatataattttccataatttctgtgggtttactatcagatacaaataaagattgatttaaataaataaaaaatgtgatatttgcacacattaatttctaattgacatacttacatttagatttttattttaacagaaataatgtaaacaaactcctgggaattgctcttcaactttgttcttgaataaatacataagtcaaattcttagaagagaggcagacatatcaggcttcacactgcttagtggcttgtagcatctcttgatatcaatatagaaataatacaaaagcctttgaaatttttagtattcaacaatgaaaagcctgagttctccaggaaaaaaaaagaatctgtcccagagcagttgttgaagaggccagatgagggagcctgtacagagagtcatttcccattgagggaaactttgatgaaatggagggaggagatgagaagcaaatggaggataaattctctcttagaacgccccctgggtgaactgtgtggagatgcaggagttcatacagcttttctcatgatgtctagcaagaccgaaaaatcagatgtgcttcttaagaagtacataactaaaatggaaataaaagtggagtggttgttaagtcaattctctcatgacaatttacgcaacttcctctattttctattttcttacatccatatgatctgctttctctcatggctctcattttagaaacacctcttggcagtgtgcaatgacatttttgcttgttttgaaacaaccaaaaactcaggttgcttaactccctatctcatctagttccttaaattattcagtcttgtagaacttggcaaaggaaaaatgagaaaatggtcctgctcagtagaaatctgttgatttctatccactgaaatccattagtctttgaagttaactctttcttaatgtgtccttatgttacagtaagtatggtgattccatttatggatagatacacattattttgtttccagaaatattttagaaaaataatgtacacttcaatctatattggcaaccaataatccatggtattttgtcgtccgctttcagagaccttgcaatatttgagatttgttttctactaaatttaatttcttactaatatagaccttctgtgttagactcctatctgatttcatatatgagtttgaaacattatcacatgactgaatcaactttgtgagcaaattattccaaaaaaacaaatatttactcatattaatcaccttctcaaaaaattttgatagtttcatatcagagaaaaatttcctataaaccaaagtaaactcagtgtccaagaccccctaacatcaggttccaactaatctttcaagacttacttcatcaaactccattagaaaaacagtctggtcttacagctttttcaaaaactagcaatttagtttaattaattcccatttatgaattttttgttgcttatattttaaggtcttggtcatgattattattattattattttttgcctagacaaatgtcccaaagagtttttctaggctttcttctagtattttagtcattttaggtcctgcatgtgtttaatccatcttgagtgaatttttgtatggtaagaaataggggatcagtttgatgtttctgcatatagcaagcaatccaatttttccgaacaccatttattgaaaagggtgtcccttccccagtgtatgagtttgtcaactttgtcaaagatcagttggcttctgtacagcaaaagaaataaccaatagtgaacagacaacctgcagcataggagaaaatatttgcaaattatgcatcctacatggattaatatttagaatttacaaggaattcacacaaagcaataaataaataaataattccattaaaaatagtcaaaggacaggaatacacatttttcagcagaagacgtacaaatgaccaagagacatatgaaaaaaaacttagtgtaacaaatcatcagacaaatgcaaattaaaagcacaatgagataccgtattataccagtcagaatagttatcacaaaaaagacagaaaataacaaatgttgatgaggatgcacagaaaagggaacatttatacactcttactgagactgtaaactagtaccacttctatggaaaataatatagaggatcctcagagaactaaaactagaactaccatttgatccagcaatcccattactgagtatctacccaaaggaaaataaatcatgatagcaaaagataccctcacttgtatgtttatggcagcactattcacaaaagaaaagatatggaatcaacctaactgtccattagcagaagatcagatgaagaaaatgtagtataggtacactatggaatactactcagatattaaaaaaatgaaatcatgtcttttgcagcaacatgagtgggactggacgtcattattttatgcgaaacaactcagaaatgggcaaataccacatgctctcacttataagttggagccaaataatgtgtacacgtaggcatagaatgtgaaatgatagataattgaaacttggaagggcggcgaggatgggagaggatgagtgatgagaaattacctaatgggtacaatgtacagtatttgagtggtgtatgcactaaaagccataacttcaccactatgcaatatattcatgttacaaaattatacttgcaccccttaaatttatacaaatgaaaaacaagaaaccctagacattttagataaacattttgtgacatttaaatacagtgaattgaagctctcttatctttttcataatatacctctttctttaaaattttactaaaagctaaactagtgttaactttcctttttaattccactcatgccaaaatatttttaaactatttaaacatgaaggaatctttacagtattattcataattataagtaactcttaaataaattatttaccagccctaaaccagagccaataggaaatgagattgtggaagaaacttaaatgaccagaaaagatagacaaaatatactgagagtaaaaaggagcaggttatcaataagtatatactgtataattctatatttgcataaagtaaattcacaaaggttatcatctgcaatttatattttcatgtaatgagaaaaatgttaatagaaacctccctaaaagaaaataattttatgtcatactaagagagaaacattataataattattagttttttggggaggggtagagggatgctgtggtccatgcctgtctctaagacattcattcattaatctgctctttgcctagttctgaatgaaaggcagaaaatatggtgatgcactatgcagatatatgtcggcctgttaataaaaactgagcaataaataattatcttttttcctaaaaataactttaatttttcatgcatgtttaataatgtttgtttctagaagtaacatgtaataaaaagatatatttaatatctttaaatggacaggcatgaaaatatcatctgttctatccttcactttccaagctagactcaatgaaaaatgttagatgaaaaataaacactcagaaatatttccatgtcaatatttttggcaaaaatattaggtcattttgcatgaatacttactggaaatatacataattctgtgggaaaaaatgatgatttttgtgtttatggttcatacctcaagaacatagttattcaattaagcttgcctactcaaacaatataacaggtttactagacattttttaataagtaaaagtatttgatgtctttattatctgctccagatatgaagatcaaatccacactcaacaacacacaatttgagctcagagtctttattgtaattggaaaatacatggcctgcttgccaaaaactaaggagtctctgactatgtgatgtaatttaatgagtgtttaatcccagattttactactgaagagcatcaaatcccttcattagtataaatttattgtgagctgcagtcttagttttcttatttttattttcccagttcttgcatactacttgtcatgtagcacttagcctatacagatttgttgatagacttctccttaagtgtttttaatgtgcacatgcatttcaactagatttggtcattattggctagatgattaatacttgcacactaatataccctccctagccaagggtactaaaaaaaaaaaagggtagctaattgttcatgaaaattagaagatacacagaaaggaaatttctaggaggttgtatgttggcgggcagggagtaaaactaagcaaagcagaaaagactgagaacaaaatgagcagctttgatgaagcaggaagataccgagtttctgagttgaagaaggggagtaaaatgaaaattagaattatgctatggactaaattgtgtctgcccaaaattcatgtgctgaatcccaatcccccattatgaccctatttaaatatagggcttttacagaagtaatctaagttaaatgaagtcataagctagggccctgattctgtagggtgagtgtcctcataagaaaagataacagaaagtgtggctcgctttctctgccatgtgaggacacagcaagaaggcagccatctgcaactctgaaagtggactctcactagaattcaactatgctgtcatcttggtctcaaatttccagcctacagaactgtgagaaaataaatttctgttgtttaagtcaccctgttatggcattttgtatggcagccttagctaagataaagtgtgaaagaaagtaaaagttatttaaagttaaatataccagattaaaaacatatatttgcctcaaattcctttcaataaaatggatgcattttcaaaagaaaaaaaaaagagagagaaaatgttacaactagatgcaggcaagcacaagtgctggctacatacgaaaggtgacaccccagggaacaatgacagaaaccagcaagacattgaaagagctgtgagaatcctggaggaggctgttttgaaaaggtgtgtgtacaagggaggagggatgtgaggggggcagaaagcagccctgccttgtggtgaaagaataaaaataggaaagaacttgttggaatttttgttcctgcctcctcccactctgcatgggaccgacaacgccagcctccacaccagcagtgacacacatttctggtgcaggttttctctagagtaaaatcacagcaacacaaaaaccatgggtagatgaggacttgagaaaaacaggttttttttttttttctttgagacaaaatctcattctgttggctggagtgcagtggcatgatcttggctcactgcaacccccgcctcctgggttcaagcagttctcgtgcctcagcctcccgagtagctaggattacaggcactcaccaccacgtccagctaatttttgtatttttagtagacggggtttcaccacgttggccaggctggtctcaaaccctgacctcaggtgatccactagcctcggcttcccaaagtgctgggatttatttacaggcgtgagccatagcactcggcagagaaaagcaggttttgaaggtttaatgtgccttggacaggtgtttccccaactcttctctatactcctctaagcctggagaacaagaggacaaagttctccctctcacttttgtatctctttttgcttagctagggatggcttcctgagctgaggagctaagacaggattaactatgattttttgctgttgttgctttctatgtttcagtgtactcattctacatcttattattcagggtacaactaggaaaggagaaagcatgttacggcaccaggaaattattataggagtgataccttgaactattttggaaagatctgggaaaagaaattaaggtctccaaggaggaactggagaatcaatgagtgactggcctggtcaccctgagcagcaaaacactgaagtgggactacaaaaaaggaagttggcacagggatatatggaaactgttgactccgaggctcctcagccacatgtttagtgatgggcccagagctgttgttgctcagcaagaccagcattttggaagaagatgtgagcacaaagctgagaagatctggggagagcaaaggcacactggaacccctggttggttacatcatggccgtctctcattgcttctcactataatggcctccagagagtgatagttgctcttttgcttctgtaaattcctcttttgaaatattctaacctagaaccataaagaccagggaggttgtggaatgtcaatttgatctaaacaaactgatgaagcacaaaccactctgctacattttgagctcattggaactgaacttgcttagggcctggtattgccctttgtgtattttctgacagagaagtagacaatcacataacaacaagtgtggggaacagtctcataaaatagctaggcattgtggcattatttcaaatgagagacaatatactgtatgactgatttgctcataggtagaattatttcattgaaggagtcaaaagtttcaaaacaagcctaataataatacaaaaagggataagaaagatacagaataaaaagaaaagtataaacataagcgaaatattaaactaaaaaatacaattgttgaatcgaagaacatgtttgttggaataaagtgtggaaaggatgtatctgaaggataaatgtgtgtattaggaggtaaatggaaatgaagccatgtaaacagcatgtttgttgcatcagcactataatatgttctaatataatggggaaagtgtagagaaatgtgtatctcagacttcatatttctttttttaattgtacattattaagggatacagagtgaaatttcattatctctatacaatgtatgatgatcaaatcagggtaattaacatatccatcacatcaaacatttctcatttctttgtgttgtgaacatttgaaatattctcttttagctttttgaaaatatacaataaattatagttaaccatattcaccctacagtgctgcagatcaccagaactcattcctcttgtattccctacactcattactctactgcttaccatcttcccctcccctacaattcccagcctttaagagccacaactctactctccacttccatgggctcaagttttttgtgtttttgtgtgtgtgtgtgtgtgtgtgtgtgtgtttaatattagctctcatatatgagtgagacattcagtatttattttttgtgcctgaactattttgcttaatatgatgtcatccagtttcacctatgttattgcaaatgacagaatttcattctttttaatgactgaatagtattccattgtgtttgcataccacaacttctagccattcacctgttgatggacgtttaggttaatgccatatcttaactattgtgaacagtgctccaataaactttggataaatatccagtagtgggattgctggatcatgtggtagttctatttttagtttattcagaaacctccacactatttttcataatggctgtactaaaaaacattcccaccaacagtatataagggctccatttttttcacatccttttcagcatctgtttttgtcttttttatgatagccattctaattggggtgacataatattttataatggttttaatttgcatttccctgatgattagtgctgttgagaattttttgtatatttattggccagttatatgtcttattttgaggaatctttattcagatctttttcctattttaacggtattattattatttgctcttgagttgttattagtcccttgttggatgaatagtttgcaagtattttcccctattctccatgttgtctcttaactctgttgattctttcactgtgcagaagcttttagtgtaatatagtcctatttgtctgttttgtttgtagtctgtcactttggagtaagatttcatatttcgtctatctcaccattacctgtgttttcacaaattattagcaaatgtgatttgtgagtctgatttagcaatcatgcagtttatatcttacaatcctttaattattcttttatttaaaaaatacacctatataggtaaacacatatgtaatataaataacacgcaaatttgtatcacgtttacatatagatatgtagtactttgatgaaccctatgcatctatcaacgacagtcaggtgctttacacatgcaacttgaaagccttgagatattactagatgagaaaagcaaattataaacccatatatttagtacataccaaattttaagaataagatatatacggatatacttaggcaggtaagtgttcctatatatttctgcactaaaaaattatggaagtggaaatattttattataatgtctagttatccatgtgtcatgggtttgggagaaataaacttttcattttaaatactttaatattatttggatttttatatctatttttatagctaaggatagttgatgtacaaacaacaaagaagaacaaaaaatatataaacctctggatttaagaatcagaagaactgggttcaggctttagctctgtgtctctcagaaacaggagtgaatttaggtgagttgctgcttctatttgaatattcattataattttttccttaaactttttgttgagggttaacatatatatgaaagtgccttgcccactgctgtgcaaataacatgttaatattccagaaatcctcatttctttaacagataagaggaggaggaggaataattcctttcttttgggtatttttgcttaaagtccttgtgggagtcagtagcattccatgaaacagattttaagtaaaagcaaattagtacagtgctaaagctataactttacttgccacccactatcaaatgttatttgtggaataccattgtataaagattagcaagggaaaatacagataggcagagcaattgattttacatacttctcaaaaatgaaaactacaggtggatctcaagctggcctaacatcatccaagatttatcttacttttgggtggatttgacttggtaaggtgcattgcctgactacagagactattccctattcttccctctctgtcagcagactatttgctagcatgtcaatcatcagttttgtcattgaacgtggtctctaccagtggtaattaggaaagtaaattcaacagtgaaaatcagcaagcaaaactcatcaatcagcagctcttaaaaagagagatcacaatcatagcagcaaaagctgggagatcatgtccctcagggcattaggagttttatataaaaatgtacgtgatgactttgcaatagggacacccactgtgcaaagcccaatgtgtggctctcattttcaattcagatatcgtcagtctgaagtcttataatatgatcacagttacaacagaaagatattcaaatcataatgactgatgagcaacaaaaccaatttattactagatctgtctccccacacactctgaagaattcctggggatgtttacatttgctcatgaaaccatttgtattgctatgctaaaaaagcagaaactcagacatcagcacttgcaaccaatgttgtaaatgctgccctctggaagcccactggtgaggctgtgtccataccacccttggtaccattagtaatatggaggtaagctttaatcttgaaccaaaatgaaaaaagtgctgtgatagcaactccagcagtctccttttgtttagtacttccacaaacagcaatgcagtttctgctaatgcacccaagcctgggtgactctacttcaccaaagagctggtaaaccttcagtattgagcctagtttgggaaactcctgagtacaggctttaagaccacaaagaggccgagttgcagcaaatgcatcttagaatttacacacagccattttcccaaaggcagagcactggtgtacaggggaaggggagataacagagaaaaagtggactgcatattgtgcccaggatctattatcacttcagatctcagtaaatttgcaatgattttcttacattcaaaatgtcagaaagaatttatcttacttcttgccagtgggtctaaaactcacatgcatgttttgaggtgtattctcataatagtgaataagtctcacgagatctgatggttttaaaaagaggagtttccctgcacaagctctcttctcttgtctgccaccatgtgagatatacctttcaccttccaccatgattgtgaggcttccccagctacgtggaactgtaagtccaataaacttctttctttggtaaattgcccagtcccaggtatgtttttatcagcagcatgaaaatggtaaattggtaccagtagagtggggtgctgctgaaaagatacctgaaaatgtggaagtgattttggaactgggtaacaggcagaggttggaacagtttggagtgcacagaaaaggacaggaaaatgtgggaaaggttggaacttcctagagacttgtttaatagctttgtccaaaatgctgatagcaatatggacaataaagtccaggcggaggtggtctcagatggagacaaggaacttgttgagaactggaggaaaaggtgactctgttatttttttagcaaagagactggtggcattttgcctctgccctagagatttgtggaactttgaacttgagagagatgatttagagtatctggcacaggaaatttctaagcagcaaagcattcaagatgtaacttgggtgctgttaaaggcatttggttttaaaagggaaacaggcataagagtttggaaaatttgcagcctgacaatgcaataaaaaagaaaatcccattttctgaggaaaaattaaagctggctgcagaaatttgcataaataaggaagagcctaatgttagtcacaaagacaatggaaaaaaatgtctccagtgcatgtcagagacctttgaggcaacccctctcatcacatgccaggaggtttaggaggaaaaaatggtttcatgagccaggcccagggtccttgggctgtgtgcagcctagggacttggtgccctatgtcctagctgctccagccagggctgaaaggggccaatgtaaagtttgggtcatggcttcagagggtgtaagccccaagacttggcagcttccacgtggtgttgagccagtgggtgcacagggtcaagaactggggtttgggaacctctgcctagatttcagaggatgtatggaaatacctggaatcccagacagaagtttgctgcaacagtggggccctcatagagaacctctgctagggcagtgcaaaagggaaatgtggggtcagagcccccatatagattccctactggggcactgcctagtgaagctgtgagaagagggccaccatcctccagaccccagaatggtagctccattaaaagcttgcactgtgcacctggaaaagccacaggcactctccagcctgtgaaagcagtcaggagaggggctataccctgcaaagccacagggacagagctgcccaagaccatgggaactcacctcttgcatcagcatgacctagatgtaagacatggagtcaaaagatatcattttggagctataagatttgattttcctgctgggttttgtacttgcatggggcctgtagctcccttgttttggccaatttctcccatttggaatggttgtatttacccaatacctgtactccaattgtatctaggaagtaactaacttgcttttgattttacaggttcataggcagaaggtacttgccttgtctcagctgagatgttggattgtggactttagagttaatgctgaaataacttaagactttggaggactgttgagaagtcataattggttttgaaatgtgaggacatgagatttgggaggagccagaggaagaatgatatggttcggcttgtctctacccaaatcttatctagaattgtaactcctccaattcccatgtcatgggagggacccagtgggagaactgagtggaaataagacatataggagaccaacaaaagggatcaagatgtcagatttgataagcaattgataaagagatttagaagtgtggctttagacctgtggctcaaatagtggtttgaaagcagaatcaaggattaatcaaagtgacttcatcatctccgtatcagagaccgtttataatactgtccaaagtgctgaatgcttgttatatggaggcagataatttgatggagctacatctaacttgacgtagagaccacagtgtgtcaccagagattctggcctcctgagctggatgcagaaactgagagaacttggagttgactcccatggggagtgggtaagtattttctgtcatggtaataatgtaatcaagatatttttgataccagaattgtgcctagctttggacagtggaccatgggtggaggaggcgagtgtcgcttctgggcaggaacaataaaaatatcctgcacaatgtttcttactgtctcttcctctcctgagacaatcctggaactctcatgttcagattgtgaaggcataagacagatagagataagattcttgaattcccacatataaggagctgtcctagagaggttactaacttgctgtggggttttcttgaatggaggatgaacctctattatgttacaccctaaaatttggggaattattttttggttttgtagctataatatttatttattgaatatatctatatatctcctatataatgccataatgcaattaaaattaaacgtacacatacaaaaatctatagctcaatggaaaacacctgaaattgggtgatttacttttctttgtaaagtgagaaattaggaaagttattcttatatgtaaatcttgctacatgagaaaaagatgtaagggaaagatctataaacatacctgggaagaatgatatataaaatgatatattagctttacatatatatgcatgtgtatttacatatatatgcaatatatatgtgtatatattttagatgttatttaaaaatatttgtgtaaaatgtttttttgcccaaatgattcattaattttaagcacaaaatatattatgtttctataattagttgcccatgtaatttatcatccaaacaatgacatttttgaatgtgaaataggacacaattaataattatgtcagaacaacgaacgtaaactaggactcttctgggcaaactaggacatatggtcaccccacctagaagttttaatttcaaagctctggaaattcttgccatttccctctcactttctcctcatgaaatacaaaacaaacgaaacatgttccttcctcaccttaaaatacatttgatgaaaatatggacgtccatttcactattggagcttaggactcattgctaaaccagatagctcatcaatttgtttaaacatcctaagagcaagcaggtcatagtgggaagactgccactagtaactagaaatggaggtggatgagcaagagtgtgtgaggatttccacaaagtaaaacaagactaataaatagtaactgaacgcacccaagatgaatcttcacttactttacatgcaaagagctggtcatgtctgaatacatagttcctaaagctaaattatcattaaccttgagagagatttcatggtgcatgctttattgttctcattttatttctaatttcaaactgagatcttctgccaagcaactttcctttctccttcaataattacctgaaatccaaacttctatatgaagttgtccatgattaagtcatttaaagaaattaaacagtcttgagcaataatcagtcagagcagttatccattttagatgagtcatctgaataataatcattaaaaaaatcctcttcaatagcagttttagcctgatttttttctataattgccttcatccctcagcacaattactaaatgtccacacacttcttttacagttttactacccaaatcatttgctcttgctcatcagctttgcaaattaatattttgttaaatgcaccagggtagcttatttgaaaagaatgctaaagtaatttttttataaatgactaataaatatacctgaaatgacatttagtaagtttaaggtttcttatagtagggtaagcttgtgtttcttggtaaattgcacactttccaggatattgaaatttattaagaccaatagcagcagcattaataatgatgataataactacccattgattttgccccaaatatggggtagatgctaggtattttatcaactcttaaaataagactgtaagctatttttatccctattttaaacttcagaccttatgaacaaatccagcatctcatggatgattatgcttttacatatttgctttcaaattttctaacttattgaaacaataaactctatgaaggcagagaagatgtctatgtctattctacttgctttgccctgtccctatcacattcaaggacaatgaaggtatcacacttcagaaaactatgaaaaaataaaaatatatataaaggaacagagctaactccaaaaatagttgtgtttgtgttaatttggtaataattattgtgtgcttcagttctttatacaatttcttgctcatatttcctcatctacaaaagcatggaattattactcaaattttcctttcattcctatatgaaaaaattacatataaaatatagcataaatttagaaatgaagttgacagttttatggcagaagcaaaaactgattgccagccattaattaacactctaatttcctgttaatagatttccaattttgttctataacatttaacccattgcagaggatgtcttcactgaatataagccagtcttggcaaatgggtttcctttgccagatctctcctttcccagtctctcgtgtcactgggggaggttctgggatatgtctctggtcagttatgtgttttgttatgtgaaaaatattcttgatacaatagtagcctccacatatacgagaaggcatgctatacaaaaggctgtggaacagaaaggctcacaaaccaaattaaagtgccccaaatcacagagattataaaaatcagagtaaaacacagtgagaagaaaggggaaataggtgggataagctaacacagaataggatgtaagcaagatagaaggaccatgttacctgaatcttgagtgcatggggtgttcacacatcttgtctttttccctgccacatcaatttttcctgttgattatgtagttatgatgaccagagctgagatttctagcaactgtgccattagacaaaaggtgttctgtgccaggaacatttgatccactggagagacacagggacacagaccaaagtataagcttggcaaacatcttgatgaacagctatgggatgtatttgtgtttctttggcagagaaaacatgggaccagaatgtgtgttatctatgtgtggccaaataagaccccgtgaatattaagtgcccaaatattttgagactcatatattgaatcacgtgtatatttggtatatcataaatatttagtacacaggtgcttcataaagattaaatatctcttggtcctttcatccatgtatatctgtgtttgacacacacctatcctacttattaactacttatcttataagtaacacatcctatgaattctgccgaagtctaacaaactctttgcttactggttacttatctataatgaaacgactttaaatagttttgcctatgtcttaaaactacaaacttaattcatcgaagagaattggatatgctcaaaaggaaatgtgcatttcaaatataaagaaaaaatgtttgaaggcatatggagaatttttttttaactcatagaaaccagacctcctgttttctgcctgctcacttccttccagcttggaatgttggtataaaaacatggctgtggagctttaagagccatcctgcttctatgatgataaaaagtaaataggaacaagttgctgcaagttgtaaaaaaaaaaaaaaaaaagtatgtgtccttgacaacatttttgaggcactgactaaaaggtagaattgtttactttagatattttgtgacataagcaaaactgccctaattatccatatcactattagattttcttttgttttcactcaaatatacttaaatgattttaagacctattaccaactctcaaagttctatatcaggggaagatataactcacagagtgttttgagctaaaaaatgaaaggtgtgagaaagacgcaaaggtattctttaagacatgtcttatcaattcattaccatacataagtgttcagaaagttctagcttattctgtccaaaaaaagtatcaaacaccctcagaggaaaataaaaaactgtctgttcttttgtttaatatataggtgtgtgtgtttgtgtacatgtatgctcatggcaatctaaaac

SEQ ID NO: 2270 - DNA, 32573 bp, Homo sapiens
aatatatataagtaatatatatattacttatacagtaatataaaaatactgacttttccatgctatttcctcttttccccttctctacttcttactcctccactccctttccctcagaaaaattttggctttgacccactaagttgatttcatgactcactggtgggccataacttgaagtttgaagcatatgagatagagagaagttttggggtagggagagtagagctttcaggaatctgaaccccatggaccactagagaacaagagtaattagctggcataggtcactcactttgtatgagatcccttgtttcaacatctcgtctccattctgtttgcctttttggaagggatcaagacccaggctgtaactctgaatgcctcctgtgcttccctattcaaatagtaatttcatcagggtgtcgtccacattgtcttattccctttctaagtatcagtttcttcaccttaagataggaacaataataatcccaactttatgtagttattgtgaagattatatgaagaaacgtaatgaaaggactaagcctatgccaacacctaataaatagccaacaaggcctaaggtgttatcagcttgcaaagattccctggatgagcccccaagatcccagagtttttcaatgtgagtttgcctgacccagtttggaaccacttagaggtaaacaacatctctggacagatcagtactggaatatctgagagaatgtgacttacacacgtgaccatagtgtacttccaaaagcagaaatccagaactgaacaaatgtgcacacccattaaaaggcagcactgagcacccgcaggcctcctgagcaggggcagagtctgcccgtgtataactgtcaggagaaggagcagaacacagggtatcccatgtggaagtcaggcaggtccccaagagagaggaaagggcgagccacatatacatggcttctgcaccctaatctatcatctatccagaccactcaaccaaactttcttcctattgataataatggtttccagcttttggcttatcctggcttttgacatgccttcctcactaagcttaatcatttctagctttcaatttaaagccagagatgtgccactcttcctttcacttgaacacttaaagggctctgtaggactattaattggcctaatttcaatactttgtgtctcagggaatagggaggccagaggagagggagagagatgtggggaaggccagtcagtggagcagtcagagcacacacagtatttattaagtttgccaacttccatggatgcagtttatggcacatcaaaacaaatacaatagtaacattaaaaatcaccaaccacaggtcgggtgtggtggctcatgcctgtaatctcagcactttgggaggccaaggcgggcagatcacgaggtcaggagttcaataccagcctggctaacatggtaaaacaccgtctctactaaaaatacaaaaattagctgggcaaggtggtaggtgcctgtagtcccagctacttggaaggctgaggcaggagaatcgcttgaacctgggagggggaggttgcagtgagccaagatcataccaccgcactccagcccgggtgacagagtgagactctatctaaacaaacaaacaaaaaacagatcaccgtaacacatataatattaacaaaaaatttctaaatattgtgagacttaccaaaatgtgaaaaggagacatgaagtgagcacatgccgttggaaaaatggtgccaaaagtcatgctccatgcagggtggtcacaaactttcaacatataaaaataaaggaaagtacattaaaggaaggtatgcctgtattcagcatttttctgaatgattacagaatcttgtttgcctgtatgtgtgcacatgcacgtgtgcacacgtgtgtgagtgtgtagcatctcaaaggactcttgcttcatgaaacagtttaaaaaaaaaccactatgatagacaattacttctcttctctgactttcactttcttttcactgaaagtcagtgaaatctgactcacattttcagatgatactagtagacccttcaagcagatgccatgttgtcatgagactttccctgctttggatctccaactgtccttgaaataatttaaagctgtttgtatttagttttaggcaagcatgttctaaggaagtatgtgaggatggtagtgtgtaagtgcagatgttatgtataaattttaaggggtggttgcttctccatgatataattggaaagaactggcagctcactcatgcatgagtagctcggcccatgaaaagcaaccattggtggtaatagctgtgactacagcacattccagttagcccctatagaaggcagtataatggacccccaaagatgtccacttcctagttccaagaacctgtgaatatgttatcttacatggaaaaatatactgtgtggatgtgattaaattaagcactttgagatggggggacgatcctggattgtacgggtggtttctggtgtgattacaaatgcaactacaaggggcctcggaagtggaagaagatgcagaatagaagagacggaaggaaatgtgactgtggaagaaagatctgagagggagggagcattgctgactttgaagttggaagggtcccagaaccaagaaatatgggcaacctctggaagctggaaaaggcaaggaaattggattcctctctaggatgttgagagaggaacacagctctcttgacaccttgactttagcctagtgagatccatgttcagcttgcaacctacagaacttcaagataataaacgtgtattattttaagccactgggattgtggtaattggttatggcagcaataagaaattaatatggcttcatagaacaagacccctggctctttctccgtgggatagcctggacatgcctttgcttctgcaccactggaacccatgaaaggaattcctgatttcttctgatcccgagtgtctcagggccccatggactactagattgccttcctgatccctcttctggaatggtgagagctgagattcctgctttctcctgggatagaggctcttccctctcctccattgagggttcaaaaaacgcaaagggcaacatgaaaaattctttaattattctacttgcatctggaaaatttcttttatttggaaagaggaaaaggaaaataatcttctactagagtataactgattctgaataattatcctcagggtttgatctatctatattgccaatctgcataaatcaacatcttccctagtctcaacttcctgcagttcaatcatcccgttagagagtatgaattagcaatataataacgtcaaatcattccttaagccccaagatttcgcagtcacaaacgtaaagtgatatgtacactctacttatatacttattaatttatttttccctgagaacacttatagtgttactcattagaagcctgaggctagattagatcaatgacttccaagtttgtgcccatcatccatagtaagatggacattttatatcacagcccagtatagacacacactcatgaaaattatgaaacattttttacccttgttaaatggaatcattctgatattttccatttcatttaaaaaatactgtttaaaaataatatctaaaaaaatactgattaggccaggcacggtggcttgtgcctgtaatcccagcactttgggaggccgaggtgggtagatcacctgaggtcaggagtttgagaccagcctggccaacatgtgaaacctcatctctactgaaaatgtaaaaattagccgggtatggtagcacacacctgtaatcgcagctacttaggaggctgaggcaggagaattgattgaacctgggagatgaaggttgcagtgagccaagattgtgccattgcactccagcctgggcaaaaagactgaaactccatttcaaaaaaaaaaataataaaataaaactgattataatccagtaaactgatcttaggacccacttatcacttgtgacctgccttttcaaaacaccatattaaatggatcttgggttctcttttttagttctaacactattgtaatcttgaataattaagaatgttaagaatacaactttgatagtctctgtccccatgcctcaacttaaagtgttgatatatttaaatacttcattagtaaagtgtcttcttattgtaagttaaggaattgccccattcttctatgtaactttgttagaaatagtaaattcagttggtgcaatgataatcacattaggatctcaaaaattatgtacttgaatgtatgattaagctcagtattttaatatcaaattacagtttttgtaactaccctgaatgtaattgtgtcttgctgtttataattattttctcagcttaatgaaattttaataaattggacatggaattgatccttcaaggaaacatttttcataattagaaatttttctcaaacttggtggattgatgttattggctttttctttgtgattgtgtttatataaatagaaacattgctctgaaacttcaaaggtcaaatgggtaggaattaaattggttcagtcctaatgtatttgaagagacagattttgaaagtttctaggaaacagcaaaataatattttcactccaactttttcttcgagctattcctatatttctgttctccatctttgtatcccatacctgaacagtccagaatatcagcattaccatgccataaagtgtttacaattctgctctgagctgacatctgttacaaacagcatgttgcttacaacaacattaaaaaaaaagctttttatgtaacacagatagcacctgtatcacaaaggcaaatagtatgcattattcctttgaatgaaagcttatctctgagccaaatgctatacactaaataataatgataataaaaatctacctactggcaatgcataccaaaatacaaatatcttgttacagtattttctattcagataataatgtagacatctcttgaataccttttcttttctgatctgcatacaaatgggagaattattggttttgtctgataaggtgcttggcgtatacaatggggccaaaccaattatcttcttggctgacttatgttagaaaatcctgcagatttgtgcattacatgagggagtgttgaactgtgacgaacaaaattctgatcaatacaatctgatcaagaggacgtctgtttttcttacaacatcattaatttgcaaaacctcacattccagctcaacttttggaagtaccattccactacaaaaagctttcttaaaaagttgttaaaatttgtgctgcctaaacccctggaaaaacaagagagccagttgggaaagaatttggtggagaggaagtagttcacagaaagtcaccactatcagtttctttcctaggatggcaacaggtgtggtgtggcagcttcttctcccagcattaacactgactgacctgatgccccagctgcacttctcagaggcagcggttagagatcacctcctccgctgcttccaaacgaggtgctccatgccctcacccttcaacctctcaatttatttaacctcatctcatcaaattcctctccctttactactgttgggttttgaaaaatgagaattctaaaccaaatgagaaaaagacacagacataagatagggtgtcacatactcaatttataattggtaaagcaggattggaggttgtggctttgacctaagatttaaccatttaaagctttctcttccgtcctctcaaggtgcaggatctatcctggtgggtgagtttgctaattggaagaggcaagagtagagaggggaaggaacatggcctttaggctcagagattctgagggaaggccaaaaagagcctggataatgacccatttccaaagctcacccatcaaaccctttttccttgagaaaaacagagtttgcctgttatttaacatttctgagaagtgttctttttcctccatttaaaataatgagatagatatgtcttttttcttattatagaaactacaacaatattctagatatgagttctttgttggctgtatttattgtaaatatctgattctcatctgtaacttgacatttcactctctcagtggtatctttttataagcagaagttcctaattttaatgcagttcagtttgtcagttttttctttttgacctgtatttgtatattcaatttaagaaatctctgtctatcctaaagtcatgaagttgttcttttatctctaatggtttacatttatctctatgaagaatccgaggttgatttttgtttatgatggatgtagggaagaggatttcttttttttcctctcatgaatatccaatttataaagcaccagttattgaaaatactatcttttttcccattccattgtggtagtactttatcataaagcaggtagccctataggaatgggtctggctggtgattttcttttctgttccattgctctcattgctgatcattgcacccctgtcttttttactgtaactttataataagttttaatactaatagtgaagccatattactctgctccccttcttcaagatggctattcttagcctttaaaattttgatataaactgtagaatccctcctaggatttttattgaaaatgtattgactctaggtcaacttgaggagaaatgatgtctttgcaaaacattttaacatgtatccctctatttatgtcttaatgtctattactaatcattggtggctttctattagggatcttgtgtctctttcctcaggtctattcttaggtatttgatgtttttgaagctactttaaataggattatttttaaatctaatttaaaaattttgagtgatttgtttctaataagcagagatacaattacctttccaaattcgtttattcattctaatagctaatatgtagaatcatttggattttctgcatacaatatcatgtcatttataaatcatagcatttttgtttctaattattataccatttatttcttcttctaacctgtttcactgtccaagatcttgagaataatgctgaaataagtggtgaaaaatggacatccttcttttgtttttgattcaaaattctcaagtatttcactattaagtatgatgtttgctataaattcaatttgttttggtaactattccttatcaggttaaagaagccttccgtctgtttctagtttgtagacagtttttactatgaacagatgtcacatactgtaagataatttttctgtattaattgagctggtcatatgtttcatctactttattcatttagtgaggagaatcacactgattgatttttcgaatgtaaactagccatgcattcctgacataagcccaagatatgctatcttttatatatgtggtcatgatatattgtcattttaatatgtcgctatatttgaagggctaagattttatttagaattttaaaatttatgttcatgaaagagttgaacctgtaattatcttgttttgtaagatgtctttgtcctgttttggtatcaagattattctggccttgtaaaataaaataaattgggaaatgttacttcttttcctattatctggaagaatttttataagatttgtcgtattttgtctttactgtttagaagaattcagtgagggtgtcatctgggcttggagatttttcatgtgggaaggttctaattatgtattcaatttcttcaggaggtataagggacacttccggtttacattttgagatttagagagctggaaaaggtaatgttccactcccttgcaatgaaaaaaatggggcaaactgccaagttcacaactggtttttttttttgttattgttgttattgttgttgttgttttagatggagtctcactctgtcacccaggctgaagtgctgtagcatgatcttggcttagtgcaacctctggctcccaggttcaagtgattcttctgcctcagcctcctgagtagctgggactacaggcatatgccaccacgcccggctaatttttgtatttttagtagagatgaggtttcaccatattggccaggctggtcttgaactcctgacctcgtgatctgccttcctcggcctcccaaagtgctaggattacaggcgtgagccaccgcacctggccaagttcacaactgtttttgaaaactttggagagatgaagccacaacaaactgtcacaaaatacacaaagaaagggctatctaccaggacagataagatgagagctctgacttacccggaatggaaacaaccagacattgactggtaaaaacagttctgctaggatgttggcaaatgggtagaggtcaagcttgccctggagagggtaacggccttagagccacagcaattggtagggtcttcctccgcttgcaggcttttgctgcacacaaacctcactgcatgctcacagcaacactagagagagttctaagaaaataaaatgcaaagagaaaaaaatagtgaacaaaacagagcagagcatacaaaagctatgagacaatataaaataatttaacacatgcataatagaaatctcagaatgaaagaaagaatgggatagaagaaatgctcaaagaaatattggctgataatattcaaaaattaatgacaaacatcaagtcacagatccaaaatggccatagagtatgaaataagattaaaaaccttcccccttaagaggaaaaaaaaacctctaaaactgaggcatattatattcaaactgctaaaagccaaagacaaaaggaaaatcttaaaggcagtcagagaaaaaagatacattatctagaaagaaataaggagagtgatcaattcagcaggcttatcactagaactataataaataagaggacaatgaaatggcattttaaagcagcaaacaaaccaacaaaaataccactgccagaaaaaattctgttcccagtgaaaacatctttcaaaaataaggagaaacaaagattttcttaaaacaacaaaagcagaggaaagttattgccagcacagctactctataaaaaagcctcaaaagattctgacactaagtgtgaacctagattcacacaaataaagaacctagaagtaaaatataagtaaaataaaatttattttttaaaaataaatagatgtacgaggagataactgaccatctaaagcaaaaatagtaacaatgaaaatgtgacatattaaaatgtgtggtatgcagctaaagcagtatttgaggaaaacttatagcattaaaatgcctatacagtagtcatcccttatctaaaggggctacattctaagactcatagtggatacctgaaagtatggatagtaatgaaccctatatgtattatggtttttcaatctgatatatgagatggctaccaagtaactaatgggagggtggtttatacagcctggaaatgctggacagaaggttgatcctgggcagaatggtgcaagatttcattctactactcggaacagtgtacaatttaacttatgaattgttgaaacttatgaactatttatttctgggattttccatttaatattttggactacagttgaccaagaataacggaaacttcagaaattgaaactgtggataaaggtggggagcaactgtattagaaaaaaagaaaggtttcaaatcagtaatccaagcttccatcttaggaaattagaaaaagaagaacaaattaaactcgaagtaaacattaggaaggaaataataaatacaagaaccaaaatctataaagttgaacatagaaaaacaagaaagatttacaaattcaaaagctacttctttgaaaaaaaacagtaagattaataaacctctaggaagactaaccagacagagagacagacagaaagagagagaagatataaattataaacagttttaaaaattttctataaatctaaaatgtgtttgaatacatggtttaaaaaaatatggagatattctgtcatcatgaaagatgactgtattgtatactccataaatgttggttgaattgagttgaattggctgacctggtaacatgtagcagagattgagagcaggaaataaatagtttggtatttgacaaatttgttgcttaaaaggtcaagtaccatttgtgaattaagggttttgtgtacagcttagtttgtgaaagtcagggtttagaatataaaatgatgtatatttttagttatttaataaaaaatattagaattacatatttgaattttgattctgttctttttaccagagaaaaatttatttgagtctaatgtggggccacttaaaaagttagctgggatttgagagtaataaatgagtttggtgtaccttttgaagcttgttggcatcagtaagctttgccaaaatatgcctttgacctgagatttgatgggtgtgtatctaggaaatggtctatttcaattctattacctggaatttatatagctatgtatctcataaattccactctttcacattacctttatacattacaattgcccacatggctgttacagtctcttgaataaaaatgctttctatattcatcattaatttacccaagaaagtaaattattccttgcaaggaattcaattcccagagtctatcaggtccttctgtactgaacaggtgtgggacagcaaaaaaccctggtcctgttcagtgtctttttgttcttgagtttcactgagggaagctcatgttattttaaccttttcctactgtgcccagccatgaagaattctttgaagctggtctgaacgtgttttgttcttccccggtggagtcccattctcccacaatttgtgttctcctatccctttgggagttgccctatgtgtgcatttttctcttcccctattcactctcaagctttatcatttcactttgactttggctttcttccttcaaaccttctgctttcatttgacaagccctccaggggtaagaacagaaagattcaggaaagtaatgactgaaaatagatgttaaattcccaggattgctctgttagattaattagtgctaaaatttttgatggtaaaaaaaaaaaaagatctgtgttttgaaacaaaattacacaagctgtatataatactattttgccttcaaaatgtttgtttctacaaccataagtggaattttccatgcagcgctttctgcttctccattggcagctggcgagttagcttcacttgtctttagttagctttaatacactctttagctagacaaagaaaaggtccgttgagccaaactggatagtactggattgatggaaatctaaagcctcatgtagattcagccttaatgtgttttgctctgttatttggatgagtaccagctttatggggagatagtgaaatgctaaagaagttgaaagacagaggggaaggaggtggtcagcagggaggtgaaagatagggtaaaatgccattccaacactttttaggatgcctgacatcacccaagaccttttagatgaatgattttcagtgttttatatcacagtttacactcagactcacaggggcacatgcaaacactcacacatatttgcaggcacaggactgaaacacaatttcataaacagttattccttttgcctgagaaatgctgatattttctattctatgtcctctgaatttgcttgtcacaaatgactaaattaattttatgacctactgatcagtggcaacctgcagttttcataaaagggctttagagatagggacaactcatttctgtggataaattcttacattttcttttattttaataaacattttcattgccttctttctctcatctcaagcagtggccaagactatttgttaaatggatcatgacttctcatgacccagttaaaggcttggagatgtaaataaagggaagattgaaaccctgaaatctcagggcttaaatatcacaaaagtaaacccacagaccagatctgttgggaacaaatggatgattatgtgacaatgaggaggaagggataaacgctgttaatcacagtcagaagctgaaggtttaatacaagcaaaacccacatctgttctgaaaaattcatgaatttcacaaaataaatattagatttaatctaataaaggtacattgtatagcaggagatacttgcaatccctccctccatgggagagaaatgaactctaataacgtaatcgaacccatccaagagacaacaggggtaggtccttttacaggttaatgtcactcctgagaggtggccccatccctaccccaatcaaaaaacgcaaggcaagtctatattacatatagggggaccactgatcattggcgctatctgaaggggcctcagcaccttaccttctgaagaaaaaactttctgccaaacttggaaaaagcatctaatagtgaagcggttctccacaatgcgctgcacatagaaccacatgtgagctttggaaaaatactgactcagatgaaccatcagggtgagtacaacttaaatgaaaggaagcaaaatgcttgcagtaccctgggggaaacacacatcaaaaaggagatctgagctgaagacccccaactgaccttcaaccttggccctccttttcatcccactcccgccccagctgttctgagaacttgagcaaagggtgtcaggactctagttgaagctctgggaagtccacacccttgctactcaaagtgtagtccacccaccagcagtggcagcatcacctggaagctagttggagagggattcggggtggagcaaatggcagcagccctggatgttgctaaggaaagagtggatgacccctatccccaggggcatgttttagaatagatagactcaaggcagagaataacacagtgccttttccttacccctgcctggctgaggggaagaggacattgtccaacattgggcttttttagataaatcccactataaataaaactgataatgaaatttctaagtcacatgacaggaaaagtcgcagggttattgcttttctatcgtacagtgtaaggtcaaggaaatttgtctgttttattcactgttgtatccctaatacccaaattcatctttatcctccctaccctcatacagacacacattcttgtccacacacacacaggcaaactctttgcatcggtttggataggagaagctatgctgcagtagcaaacctcaacaccttctcattcacatgtaagttcaatgtagttcagcagagcagctccgctaatgatagctacctaggaagccaggctgatggaggcactatctcaacatgtgctttcaaaggaaccatggcagagagaaatcaggttttaagggttcccagccagaatggcataacacttacactcaaatttccagggccaaagcaagtcacagtggtcatgccaaacttcagagggggctgggaagtgaaattgtaccatgaattcagaaggaaatgaaggggaaatatttggtgaaccacagtaattgttactactgctaaatagagctcatgaatcaagttctatgggaacacagatccgagaatagttaaccttcctaataatggtaaacaagtacacctttaaaaacacctttaaatgtggagttccaaaaacattaaagttattttttacataaactcatattaattttataatacagaaaaagtacattttagcagtaagtcatgtttctctgctcttttctcatgtatttctccatgtgtggaatgtcccccttccttcttttgtgggtgtttgacagattcttgtagtatcattatagaaatgctggattctgtaatgttagggagattcatagctggtgaatgatttgaggttgtttggacgatctctagtagtgtgccaaagttttctttctcatttgatgatttttatcatagacctagatgaactcagggaagacatacataccctattttcagataacatgatattgagagggctaaatcataagctggttgaaaaagatcagaattcaaaagatcattattcaaaataatgatgtactagagaggtcgggaaaatcacagggtgatccttactttctgatcacaaaggaaaaaaaggcaatcacataaatactttgtatatttacacatcactttgttccagtacagatgtatggcaacttctaaagacgtatgaaataaaataaggtgacttaaattaaaagtcgttgagatacaataaagaaaataaaagccagggcaaagaaagaaccaaagaaagagttaatgttacccatcaaaatgatgtacttggtatgggaaagtgcataaaaataatattgatacacacagtgttcaagataattgtggatgaaacagagttctttgcagctcaagatggcttcaagacagagatggcaagtagaggtcagcttacgtttcaatcctgagtgattggtgagtagattcttggagcagtgtgatgggagactgggcttagcaggaactaatttagccataaagcagtcattataggagatggggagaggtagcagtgtgctgagtatttgccattccaaggacaaaacccttcatttggtgctagaaaatgtacacaaccaggaaagcagatgtctaagcaagatgatggggagtaaggggcttggctaggatttagttaagtggcgggtatagcaatgagctcatttgacacccagactaatccgctcctttctagtgtgtggaacctattctgggtccctgtttataggacccacagcctcccttgtgtgtgtgaaggtagtttcatggatgctgaatggatttaagtgggttggtatgggaaaggcagacttttccatgccagtctttcactttggaattcttggcactgttggataatcttggttaggataccttctgctcccattctctatcctggagtccctagtcactcatcaatgctaacacagctactgcacaagacagagtggaggattggtctctttcaaaaattatcagagccccagctctccccatcgcattctatctgcaactgtcaccctcagaaatccagaagagggagatgtgtccagcactgtgagtcctgagtctaacttaagttctgggaaggttgtccccttcctcaaaatgtagaacttggggagagatttacatggatcagatagcatgggatgaagatgtgccaattagcttttgtggcatgtgatgtcaccaaaacctagtgtcttaaaacaacaaacatttcttattccttatgattctgtgggtttgtggccatttcttctggtcttggaatattcagctgatcttggcagttagctgctggtttaactatagccaggtggtctaggatagactcactcacatgtcttgttgtttgcttgatctcatttagatgagacttgccgtacagggttcccaagagtagctagagagggcaagtcccaatgtacaaacacttttcaagtctctgcttgtatcttgtttgctactgtccccttggccaaagcaagtcataatggctaagcccaaattcaagaggttaaggtatagctccactacttgattcaagaggggaagatactgactctatcattccaccttaggaagagctactaagtcacattgcaaagaggcaagtatctagaaatgggaggtgtttgtggccatttttgcaatctgccacagaagagaacacctagctcatctaccctgatgagccacgtcaatccttccagattgttctcctatccctgtgttttataattggaactggaatcccaaattcgcattgaaacactttcaaggatctgttatggaagatttatttctggaaactgaatagccattattgttctgctagaaattgggttctgaaccttcaacatatgaaagacctttataaatacaacccacttgtatttgagaactgcctagcttgttggctgaaatgggattgcagaaatgggctagtatttttcttttaattcattctgtactctggcagtaagaatttccttctgaggtggatacagatgataacctcctgatttgagtttgaagtttgcactatttaatttttggctggttatagtcagaaccgctcttttcattgtagagccaaatgattatttatacttctcttggatcattctttatataccattagcaatgacacgcaaagcacaagggactgaatatttacatccaaaattctgaagtgagtattctcccattggcagatacaattcctcagggctgtaagacctggtaataaagaaccatatgtcatggtggattgtatgttgctacagcaatggctttcaagcagctgaagttctgaatccccctgcttcttcctctgcctctcagtgtggctaagggctggctgagtgttgcctattaaaggactctgaaagacaatgaagaaacatgtttttgttcttcctaatgactagcttctcagagttcttgttataaatggtgtcttgctataatctacagcaaggaagtattcaagactcaatacaagaaatatttcactgtttgtcatctagggagattctgagcttgaggttgccctgataatcctggagcaaaacacatgttccctggcctcagtcagcttacatactcatcagggaatagtagaggagcataaataactattatagcagagagaatattctcagttccataaaaatgcaaagagaggaatatgaatttccaaggaagaaaggagcaatattgttcaaaaattccgtccattacacgtattgcatgacatttaataatttatttttcttttccccttgaatgcagagactgaggctctctcagttgtatcacctccagtgcctcccaaagtgcctgccacccagtagaatagatgtcaataaatgtttgcagaaagaataaatagatgactacattgatccacttagcagaaggaagaaaagctttgtggatgtggtaaaacttgaaagacacttaaaataattggcagatagtgaatttgggagagaatgcattagtggtagagggcatagaaagaacagagaagtggcaatggggaaatacaaggcatttaagagaaaaactaatccagtttggctggagtgtggagtatatgtttgggtcttggagcttccaggataaagctgaggtgtgcatcaagccacgtgagttgcctcagttctcttccactcccatccttaagggataagctttggcctgtccatcctgtcctctgatccaactggagatttgggcagggatggaattccccatcatcccagcccatggtgaattaggcatcctctttattcatggtaagtggcaaataatagaaaagtgtgccttccgctgggattttctcatgaatacgtttcctctgtccatttacaattgattgtaagctctttaaggtaaagggtgtaatcatgtacctctttgaattccggaattctgtatcttgcacagggaaggtgagcaacagcactccactgagtatgttggtgtcctttctaacattagcagtgagcttaaaatctgttccaacaaaaagaaaaaagcagattccaactagagatttgggcagagtaaggcagagcagtgacacagcgaagagcccaagccatgtccatggtgcctgagcccctagatggcgaccatcatcatcatcatcatcatgataataatggccccaaactcaatgtgctcacactaggagtcaagctctgtgctgattgcttcacacagtcatctcattttgtcctcccaacaacttgtgtaagaaatgtatcctctctgtacctcaggttccttatctgtaaaatttgaatagtaatactagatcctacctcatagtgttgttattaaggactgaatgaattgttatttgctaaaggcttaagtaccactccgtaactgttgactttgattactattacaatccccattttacaaatggggaaaccgagacacaaaaaagtttaaaaacacttgctcaacatcagacggtgggactcagcatactgacttcaggttagctgttctatcctatgaagaaaccgaccctctcctgggccactgatggtccactgtgattgcatctttcctggtctcatccttggcatagtctcattggagactgatcgagacaaacaatcctcaaggacctgcttttttctttttgttggaacagattttaacctgactcctaatgtcagaaagggcaccaatacactcagtggagagctgctgctcactttccctgtgcaagatacagaaatctggaattcaaagaggtacacgattacaccctttaccttaaagagcttataatcaattgtaaatggacagaggaaatgtattcatgagaaaatcccagcagaaggcacgtttttctactatttgctacttactgcagataaagagggtgcctaattcactgtgggctgggatgatgcggaattccctccctggggcagaggtaagtgtggcaggggttgttgtggggtgtgtgtgtctgtgtgtgtgtgtgtgtgcatgcttgtgtgaagaagcccaaagcattaaggaaagaaaacaaggcaacaaagggtagctggaggactgagtatgtacagcctgacatgagacatagagttagaattgagtctgtaggttaaagtgaaccccacaatctcatctggcacttcagagcacaaggcctttactatttccatcttgctttttcctaagtggatgtaatttctatacaggttccccaaaccaggaactctacgacatttgggacaaaagcctttgttatctccccattgttcatttccaagatgttctatcaatgttaaataaaaagcttctaacatatgtgcatttgggtcagtattcttctaaaggtgaagaataaagggactcagccctagaagaatatcctctaattactttctcactattttgatctttggctttgaagtaaatggcttcccttttggtcatttattgatttcctctttgaaagttttttgttcccatatatcatcattttgcacacatcttgccagactcctgtactcgattgctattataattttttccttcttctcatacattgttcaagccattttctgagttaaaacagataaataagaaactatttatttatttatttcttccagatgtctttgctggacctgaaactgccatttcctaaacttatcgtatttgtatagtcaaaaattatttttaactttgcttggcttgcatttaaattttctttctttctttttttttccctgggaagtgtcctagtctgcttttcttaaatgccttttccataatttaatgaaaagggacaaaagtaaaaacgagggaagacattgaaaaatggccaatggggagcataagaaaaatgccctttacatgtggtgactttgaaagattaacttttcaagtgtgaccatacgtatgaaactattactgtttttgctgctttaaaagcatagggtaagagttctctttgaaatgattattaaaactattaaataattatgtatacccttgttattatgtcagtttaaaggtttattacactgggtaagtccgaggaacatattggctggtaagctggttgttttctggtttcaggtgcaattgaaattcagctacatgttattcagaaaccctagagaacaactaaatgatgctatttaccattacatagggcttctcttagcaaccaattttgtttatgcttctaaagataatgttagtaggagcctcaatgtctggttataatgtattcaaagccagagtacttgagaagtctgtgagtaagaatgatccagttgtctttgtgttagtagcttttatccagggatgataaggaagggaaaggaattaacatgaactagggaccactaataagccaggcatttttacattttatgatctctatactccctacaaagccacattttaccttcctttctttgagttgaagactctgaggctcagagaggtcaagtcacttgctcaaggtcacgcagctagtaaacggctgagcagaggcagactttagatgtgtctgactgtaaggattgccattcttccactggaaaccattgcctccacctgaatggaagggtatcttttttggtaggaaggagatatattatagaatgggggtatgggttgggcagctggtcaacctgagaacaagacttgagagatatttaggcccagaatctctcacttctttcttcctcctcccctgcatggtgacctctaggcctgtcgtttttattttcccaagccctggtctctgggaaggattaacaacactatcagtgaatagccaagtaaagttctgtggacaaaaaaatgccaatcaaaaataattgtgatcttatcatttcaagatgacaaacgcttttttgtttttgaaggtattcagccttgacaaaaaagtcaatctgcacaacatgcattagcaaaacatcttcctgggcaaaacaaaacaaaaaaacaaatattagaacatctctatgaaacgaggcatctgtatagtcctatatagaggatgagaggacacccataactgctggagaaagtagcagaagaccaggcagggcaataaagtgaagccagacagacccagaactctgtgtacaatcgttcaatccatacagcccaggacagtgtgtggtcgtgagtggctggataagcagtgtttaggagctagactgcctgggtttgacacaagctctcccacttacgtcattgtgagtgaagataaacaattgtgcctcagttcttccgtctgtaaaatggcagtaataaaggtacctatctccatagagctattctagccaaggcacttgggacagggcttgttacatagaaagcactgtgcacaaattggctttcaagcatgctattgaactgctttctcaactaatcagtatccagtctttggaggatacaagcactcattatgatcctatttgtgacaataattaggaagaactgctcattgaaaatggatttcaaaattgcatagcaattatttcatttatctttcattattttgatgaattcttcagtggacaagataaagtgaaagttgtaactatatttgttttcagcacctaccaccgtatatggtgtaccatctgtggatttataaaatattagtgaattattgaatgagccctaatattctgacaactgtttaaatatcgatgttttaaagtactgtcattgaatacaaatacaatttagagtctttctctgctttctctctccccctctctcttttctggccataaatcattgtctattcactgggtaaacaacatctgaattccctggagctcagcagcccactgatttcactaaaaagttgtctcatccaactctgaatatggagtctggtttctgaatggctggtaagatttattttccctggtggttggagctggtatattttaccaaggcaaatccccatgtgacaaaggaataaatacacagggaagaatcatttgcataaagtaagtgaaccccatcaataaactccatttattttgttatcagagaaatagccctgtgcccttatccatcagcagacagtctctctgacctttctcacttcagttcatactggattgcactgcctcaccagcagccaatctactctgaaatcaatgtcctggtttcacacccagaggtgttgacctccataagcaacagacttgtgtggcagaggaggctgccattaaagggaccacgtcatgcagcctggtccaatcagctgctagcataagcttcttgcttacttacttgctttgtgttgtttaattcagagttggcaagaaggtttaaggaaaaataagggttggcagggaggtttaaggaaaacatagatagagcagagtttaaatcttggccttgtcaatttctggctgtgacaatgtgagcaaaagttttgactcatctgagcctcagtttatacattggtaaaatgaggataaataaaattgactgcatagcattttgtgaggattaaaaaaggcaatacaagtagtgtctaaaataatacctgccacatggcaggtgttagtcaaatgctttttaccttgtctcctccttttcttcccttttttcctcccttccttctttccctctcttccttcctcatatgtgatcttctatttgcccagggcttcttgtgtgattctaaattatagcatctagggcttgtatcaggaaagcataccttaggtcccagaattttgaacatcaacctaaaattttcccatcagccttcagcctctcttcctagccatgggaagctcctcagtagagatgaagtcattagctcaattctttagggctcatctttctctgaaacttagtgatcaatttactttacccctgagactacccttgtcatctttgggcaaaatcaccagcaagcagaaaagtttggcctcttccgtagatgctcaatacatgctagataagttggaactatcatggccatgtcccaggagctcagagagcatgatatactgattctgggaactaggtgttttaggaatcatgctaatcaaatgtaacaacatacctggcttccagaaaggcagctaaatgtcaggttaagagcttgggctctgaaatcataatggctctgctctgtatcctccaacaaatttcttaagctctccaagcccaagtctccccatctgtaaatgactaatagtaaggtggttttggagtaagttagaaatggccctcaaggctcttagcacagtctgtcaatacagtaagaggaacaaatattggccagttctcagatgatctgaaaaccacctgttaatgggctgaattatgccctcagattcatatatcgaagctctaacccttgtttcctcaaaatgtgactatatttggagataggatttaaaaagggtaatgaagtcatatgggcgggccttaatcttgtatgactggtgtttttataagaagaggagattgaaacagacacacacagggaagggcactatgaaaagacacggagaaaaagacagccatctgcaagccaaggagagaggcctcagaagaaactaaactgccgataccttgatttcacatttctagcctccagcattgtgagaagataaattttggttgcctaagccctgcagtctgtggaacttcgttatggcttcccagcagactcatgccccgccccatgctgagaccctttctcactagctgtgtgatcctgagcaggcctggcattcagataggctccattaaggagagtctcattgaatgtaaccaaccaaatgtcctgctttggccttttctcctaatttttttttttttaatttacactccccttgaacaacatcgctaagccacaggctggccatgtcataagcaagcttcctgcttcaccatgcggaagcctcttgctggcgttttttgaacaccagtatctcaattcactctccgtttgccttgatttgcttctttatttcctgaggactcaagtggcctgggctcttgactgttttctcgatgatttggccatctcttctggtttgccggaagctgggactttgtggctccatctgtcttcttggattctgaccctccgcttagctgaccgagatttgtcacataagcctgtgtgctctctgagcttccatgacttcagcattttctatgattgagagcaagtcaagagtacacactgtacacacccaaagttagtcttgggtatagttagcatagctgtattcatgctactcgtgagaaagttaaggcctggtcagagtcagtgcctgaaaagccacaattagaaatttggtttgcttctctgcagcagcaagaccttcccattcctatacatcgcccttcactttgccttcctggctctgacctctgttgtttctatgacctccagaacccaccagattattctaatagattgttctgtattacccgaacatgatttcttgctttgtgcccatacagggccctattggccagccccaatccaaggaacctctgacctattgatagctataactcgagggtggataaagaagggcagcacaagcttacaagctccaggagggagttaaaatgggatcactttggccgggcacagtggctcacgcctgtaatcccaacactttgggaggccgaggcaggtggatcacgaggtcaggagttcaagaccagcctgcccaacagggcgaaaccctgtctctactaaaaatacaaaaaattacctgggcgtggtggcgagcaccataatcccagctgaggcaggggactgtaatcccgggaggctgaggcaggagaattggttaaacccgggaggcggaggttgcagtgagccgagattgtgccattgcactccagcctgggtgacaagagtgaaactccatctcaaaaacaaaacaaaacaaaacaacaacaacaacaacaaaaaacgggatcactttgctatttcctggatattgtgagctgctcacacctgcctctcctgtgtaacaagattaccaggatgcatactaaaggtctgtaagtggcagagaggagtttttgtcctgggatctaagaattcttaggtgtccttgatcaatgatggctaagccatgtgtcctgtgtaacaatagatttcctcttggtgcagcatgctcagtactgtgtgtgaaagtggcttataagggtaagacaaggaattagaacttgggcacttgaaatacctctggaagtataaaagtagactggagccaggaaaatacctcagagtcactaggcaagtcagaatggggaatcacttgggcagttgaaagtaggaacatgtgtgacaaaagcaagtatgcaacctggacatattgttttattaactttctgagaagtcatgcatcacttcttgcctcagttaccctttttaaaaataagaatagtttggatcagccagtctctaaattctcttctatttctagaatgctaatctgttttacttattaagtaccagtgtcagagcacattagcagtcctgctaacagatacaagataccagtaacatgaagttcttgacatctgagaccaacttctcttctgagagggaaaattctctgtatggtttctgcaaaggctggagcagatcaagtctgggtgcaagtgcaggtctttgagaacacctttagaagcagaaggtgacccatgcctaatcattctatagtattgtagtaatttcagaattatcagacctcacagcagtgagtcagcagtgcctttgaaattcggggctaaatttaacttcagcaaaccctgaatcatggttctaggataattttaaaatagaagatggttatattcatggaattttctgctcatagaatggcagaggggaactgactgtatgggaaacaaaaaatcttcctgaaccagtcagatgaagtatagccacacaagaaacagtgagccattagcttgggacacagcagttaccacctaccagatcactcccacctctggtgttggctggagagatcccccttcctaaatcatccttctcaaccatctcagtggttccaaaatctaagggaggacattgcacaagacaaaagtagggaaagcatttgtcacccacacccttagtatgctcctcccagtgcttttcaattccagccatgtgttgcatcagattagatatatactatctctctcaggaccagctatgtaacttgttaggcctgatgcaaaatgaaatcatggggccccttgttcagaagttaagaatttgaagatggtgccagtacagcattaatccaagtacaggtcccttttaagcacaggactgtgggtgactctgcaggttgcacacacatggggctgaccctgatcttttcccgcagtcttctgctcctctgctttcctgctaaagatgcctgttcactcagggtactggttttagactctgagtggttcaacaaatccacccaagcaacttgcatacatcattctttctcttgtgccatcttgttatgaaccacaattttattgacgtgaggaaaaggcatcagaacaaatctgacaatgttcattggctcacattttccagagagacgcatccttggggtgctgagatcctactagatatactgagtctaaaccagaggttcttaatgaggagtgagctcaggcttacctgagatgcccagggattctaaatctgtaaacctactttatttatgctcttgaaaagtcttctcagtaaaacaatggtaaagaagcatttgaaaacaattccatttatttgttattttatatatcttatgacttcttttatcattatttgattttttgagacatacatgcgtatccgtgcatgtgtatgctcccctccccaccagcttgatgttagaatctgtttaaatggactttttttgttgttattgttcagagtgttttaaacttcagtgtggcttgcaagttctgtttggtgatgattatccactttgactccgggtgaatttatttgtggctggatctagcagaggccacaaactaattattgcaaccaaccaagaaaaataaagagaatgaggaaatgccagaagtattgacaatatttattgtagcatatggctaatgtaaaaagaggtaatagaacgatgtatctcaggggatcattcaaaaggaaaattacttacattaacttttcaggcagaccgaattatgcattacacccctcctgtaatgctatacaaagtcaatgtttgtgaagagtagaactggcggctataaatcaagcctttcagaagaactgttgtgtctgcagggattttttttcctttgcttttttgacatttagatgaatgaagaattttctcagcaaattattaattactccttcttgcctatagaattgagttcactgtagttatgtaggagtcaatggtattcaaactgcagcttttgatgaagtaatcggctgcttctggggcctctttcagctgccctgggcgtgcttcacatgtaaacgactgccaaatggattctttcgacattccagccaattaaaatacatttaaagtgcagctggtggagaggcaaaccacgcgattgtgcggcgaacttcagggcagtgagacaaaaaacaaactttgcggaacccagatccagcagcccagcaaggcattcgttcgggggcagtagagaaagtcataaaaagaggctatctttagcccccgtcagaatcaaagatgacactttgagcaccaccttacaggacacaaaagagggaagcatgtttgtcagggtgtcagttttctctccttgcctcttgaaactctgtgtgttggctggttgcccaatgtggtgccgcatacaaatgttgacagaacacagcggtgtttgttaaacccggcctggggaaaccagtgattaaaactcttgaaggaagatccgaaaaccccaggaactctcctcaatagcattagaacattgatcgaatgaaagagaaagcaatgagtgggctaaagtgaaacattcagcatccctgtctggtatgccttctcggttcatcgtgaagaataaatgagataagctacctcaagtgcctgtaccaaaatagactcacaatacatcaggctttgcagagtttagagcatattctacccaactggccccagatggaaaatactgtcttgaaattggatggctttttaagtgtagctctccacagcctgctcaaagaaaaaaaaaaatgaccctggaaacagacgggggattcttataagtcacaaaagaaaataaataacttcatccatggagggaaagagacagcttgagaaaagggactttggaaaaaggctgtctctagacagcagtcttgtggtaagtactaaatattcatttaccactctatatgttttggctttgaatgcattattctttgactgttatttcctgaacgctgtgcttttgaaacctctcttccagttacaccattagcaacatcccttgagattttgtttcatttattttttacaaactcaaaagccagcaaattattggaatgtttgtatagtgtcttaataggcaaatgtcataatctgtcaacattatatataattacattaattacaactgatgtagacttcagcctatacaaaaacactactgtatagctgatgccaaatgctaagcctacgtatagttgttccatcccccatttatcttaaccttgggggtaagttgaacaagaattcaatacaggttcaaatattgaagagcagaggaagtcttggagaccttcttaggtatgtgcattagttcagttgtctgtaaactaactttctgagagttttaatgctgatgaatattattcttaacaacctggttgggtttgctatccggtgtgaaaatctgcttagtccagtgaaacagactaattcactttagactaagtctgatggttggctattcttctgcagtctctgggccaacatgtgtgggtcaccttttctgttacgcaatgcgtgtgaacagagcaaggaatcaaatcaagcaaacttgaaatagaaagcaaactttctgaaatagagatttagcttggttccttgtgcacattttatagggatgtgctttattcacttgtatatgctcagcacctgtcctggagtctagcagagtgggggttcaatgaactatttgttggtttgatttatccgttatacctttcaaactttgcagctgtaggtcttgctctgtcacggacagattagttatttacctcttagcggctgaggctctgcctcacaaattattcatagatgtgagtttctgggacttgagaagaggattgtgttaagcatttatgtcaagttcttctctccttagtcagaatcaatgtctgtgtctatttggtctgtgcattgaccagcatacctttagaggccaactttggtgtatttcaggttctcctctccgtagatctgaccccatctcacctcctacgtcttgctaactccaggttgaacgtggtgacattggtgtgtgagtgtgtctgggtgtctgtgtgtgtgtctctgtgtgtatatgtatgtgtattcccttttcaacttctggggaaacctgggataaagagataatttctcagcctctcctttgcagaagaaaaacactttttacatatcagcatgccaatagggtctgtcttaggcctaggctaaggacagagacagccgtagggtatgatgtgagcagctcaagaaagattctcttaacccagaaatatcatcggtattggttggtccccaaagccatagatttctgcctcagatctcaagttttatgcaaataccctataaagttaaacataataagctattgtctttcaataattcatagtagcactcattaataaatggccttggatcactgccaaatgtcaaaccgatgagcagaattttgttgtgggaattggtaaaatagaagaaggcagagcccagatagctgcgaaggcagggatagggcaggacaagacagggcagggggacgtgagtaacccccaatggggatcgtaggtacttgcagatcggaaaaagggaaacagtgtcaatgctcatatttaaattttgcctaaagatagcttgaaaatgggcataagtaaaatcctgtcacattaccagtctagctgaaaaccctaaattgagcttgcattctttctggcatatggctgtaccctgaaacttgttgagggctgcaaatatgtttcttgacttgctggcatagaagaacgctgtgaaaatgagaacttgtttggcaccacctgagagacttaatcctgttaagtctccctgtgtcatgcttaggagagcttttacactagtgaaatcttttccttgtttcctagaggcagactgtgttacatctgcatgcccagattgggaaaattctgaaaaaggatgtcctttcctatcacagtgtgtaggggggtgcttaaatgcttttcaacattatagcacttaggccaagttactacaattttgcccccggttatagtattatgttctcttcttcaaataagatgctacttctgggagaatagcagctagagtattctttttgagttgattctttgggaatgggaaccattgaaagcaccttgaatgaattccaagtatcagaaagaaagctagaccagggatgagatcaaagatgcctggcctgtgagggatctgaactcaagatgttgccctcttcttcagctttatgctgaagccacacaaattactaggcaagaagcaggtagggaagattctagataagggctgctgtgaaatacaagaaaacaacaagaacaacaaacctggcattacagtacagttttcattcccaatgcatgctttttattttattttttgaatctagaatgctaaagtgaaaatcggttatctcgtctcctcactttgcagactgcttaaggcccagagaggttatctgctcttcctgagctcacacgctaggattacaccaaaagtagaacaacctgtcacttaagttctttatctttcattatatactatcccaggaacagaagatgtccttgtgggaaactgaatagaggaaagagaaacatattacgttcttaagtcttaaaattccattgcaataatcgtcatgacacatatttttgagagttagggggcccagaggtaatttccactttcagattttacaggaaaatattctcataatgtattgcaagaataaggtgctattaacttcattacactttttattttatataatcaaatcattgaagtgttgagtagaaattatagctcccttacaatggcttttacatttttagactggaggaatcacagaataaagaaactcacagtccaaaaactgaaaaaagctccaattggggaaaacaagtttgtggtccttagtcacgtggcatgggggagggtttgagtgtatgtgtgtgcacacatatacatgtccatgtgtgtgtgccctggtaacacactgaaatattcattgatggtgatttttttactttattattcacccttttaaaggagaaagtgatacgtaagtgaaactgaaatgaaaaatatgtttcattgtgggggttaaaggcccagagagaaagacaagtgactacaagtttgcctccaccagtaggagtgtgcggagtagccgtatatacgttcacggcaagtacagtctactctctgataacgataaaaatcaccccagaaatcgagtcctcttcttgacccaaaactgttcagcccttcccagggtgctttttgatcagaaaaagtcatcatttcacactgtgctcttttatttgcaagactcattcccgggctgcccatgtagctgtttgacacttgtagctgtggtagtatttagctgatgagcatgctggagcatgagttatctttcttaccagctcacatttaagtaacaaacattctctttttaatttttgggaaatacatttagcttttaagcacagatgagagtaacagtatgaatttcttcctggtaccctcttttcttctcccccacaaaaggaagaaaaaacgtttgccacactgccacactaaatcctcagttccgacagcagtatagttttataagcttgtagaggaaaaaaaggacgtgcacacatccctgaattcaaccttcagcctcttgactgtttgtatccaaatcgttatagtaatcaagacttccacaacattcataacacaatcagtcaacaagcactattgaaaaccagctatggggatgtgctggatggtttccattttccctccagatccactctttttccttctctacctggccaatcatccctggaggatgcaccacatggacttgccttttggcatctggttgggtttagccaatgggagaaagaggtcctacttgtctcctagcaggagatcagaggtcgaggtgtttgttctcccactctcaccctgcttggtcatggaccacaggaactgggcacctttgcctaaagttgcagcttttgttggacaaccctctccccagaactccagctatagttagaaccactgctctatctatgttctggcaccttttcttttcccataccttaacgattcttcatagtaatggttcttggttgttgttagcccatcttttgttggtttgacttagctctgtccacaattcagtaaacagtccctttaccaaactctcctcagttagatgctttgagtgtgccatctctttcctggaaggtctccctggctgatacagggggataggcttcctcaagtgcttctagtttatctagggaagctgtcctaataagcaggaaaaatatcatcacatggaaatgaactgtgtggcactgacagtagtagatgctgaggtcactctgggaagatgtgag

SEQ ID NO: 2271 - DNA, 1350 bp, Homo sapiens
tatcactactcttgggctttgagcctttttaagtaaattaaggatcacctgaagccaaccactcagataccaccacaattgatctggtaacacacagaactgctaagtgactaacaggtggggtggtttctacagcgtggagatgctgaacagagggggcattcacatccagagcaggacacagtgggatggcctgagatttcatcatgctacttagaatcatgcacaagttaaaacttgtgaattgcttgtttctggaatttttcatttaagatattcagactacagttgactgcaggttactgaaatctcagaaagcaaaaccagggctaaaggggactactgcatgcctcctgccttgttaatatacagctcccctcatagagtttaattctccacagtattaattacttacaccaggagaatataacaccttcatgggcaggtgcctgaattcttttcctattaccatatagaataatatttacattgtgctttgaaaaatacagttgtctagcaaaaacagtgttattacttcaacaacaattcaaaaatataaatttaatgaaagagagaatgagaagttccactcataatatttggcaacatctgaggtttaggattgaagccttcaataaggagagggtgatgatgagttatccatttttaattatttttgtgcatttttttctgaggtataaactttcaaccactgtgactagaaaagagcaagctgtaaatgtgtgaattattttctgcctcagcacatttcattcctcataatattttaaaaatctaaaatttaacttacatcaagaaaaaaattcaataaaattacacatacacaaaataactggttaattttcacatttctctctcacctgtgcagataagttttcattctaacctgaatgtttttgttctctaatacctgaagccaaccactgatataccaccacagttgatctgataacccacagggctactaagtgattaacagatgccagcatgaagtgatcatggtaaacaggactgatttcatctcctatgcacctttgtgacctgatacactcaccagtgactgcttaggttttctcatcttctcccatgtttactttgctgcaggacaggaattaattacttctttgttataaaacttttaactcaaatagtgtctgcctacttatttgtcaattcagaattttaagaatatgtgtatatctgaaatataataatgaaaaggggatttgaacctgatttgtggaaaagattgagtcaatttggagtatcatgtgcatatggattggtttaaaaattaatttttaaaacacctcacttactaaataatac

SEQ ID NO: 2272 - DNA, 12602 bp, Homo sapiens
aacctcccaaaatgctgggattacaggcatgaaccaccgctcctggctggccatttttaaataatgatctaattactgatccagaaacagccagtttagtaacatgcgtaattaacctgggacaatttcagcaggctttacaaaagtttagaactcaaagactccccacaccaggaactaaccagcaacccaaaatcaggccaggagataaagtacttgttaaaacatggaaggagggatcacctgctgaacaattacaacccaaatggaagggactattttcagtggtactggccatgccttctccagtcaaagtactgggaatagttagttggatatgtctttccagggtccagcctgcaataactgaagcccccagacctggaacctgaagatcccatcagccactaaacctgtgaacctgtagaagacctgaagtacctgtttaaaaggcagccaaaagataaagaccattatgataatgcagcagggccaccagtcagtttcagataatgatgtcaaccccggccaccaagaagtaaccttgtctccactagacagagcagggtgagagttctgtaatccccagtaggtagggactgtgccccaagtcagcatgaagtagttatggaagaaagaccatgggtccctctgcctcccagaaagatttatggggatcacatctctcaggggaaaatgaggcaggagaatagggtctggagacagggaacctaaagctgatttgtgctgagtttctaggattgaatgaaaaggaaaaccccacctctccacacccaagtaacaaaaggatcagaggctactccctttgcactgcattgcagataaaaaatggaaagtacctcagattggtcccctcccacaaccaatcagactggccatgggctactccttcgtttacatagggtgtaaccaagtaaccaatgggaaacctctagcgggtatgtaaaccccagaaaattctgtaaccagtgctcttgagctgcttgctggagcctactcccactttgtgaagtgtactttcatttcaataaatttgtgctttcattgcttcattccttcgttgctttgtgtgttttgtccaattctttgttcaaaacaccaagaacctggatgactcatagtcaagatcctctaccagtaacacttgaactttctggtttgtcctgaacatccctctttcttaaacaaccagtcgttttattctaggccaaaattttaccatacaagaatatttctcatatacaattatcttccttctaacttttcttgccagaaataccttttataactttctttacattgcttttatttaacgattacttttaccttgtttcataagttttaaatagccttgaattagataaaaaattattttcctttaaataagaacacatttctttttttagaaaaatatttttctgtaattttttttttttcttgagacagagtcttgctctgtcacccaggctggagtgcagtggcacaatcttggctcactgcaagttctgcctcccgggttcacgccatcctcctgcctcagcctccagggtagctgggactagaggtgcacaccaccacgcctggctaattttttgtatttttagtagagacggggtttcactgtgttagccaggatgatctcgatctcctgactatgatctgtctgcctcagcctcccaaagtgctgggattacaggtgtgagccactgcacctggcctaatattttaaattggaaatgacccagatgtttaatgagtacctattatttaacttaatataattttagattctaaattatataacaagtttaatcacaagcatttattccattacatttacctaattaatttttttaatagtttactcagattacttttgaaaactgagagttatcattgaaagttatttcccagttaatcatttttatagactgcgaatttcaggttttcctaagtaagaaacttaaggttagataaatggtttctttttttttttttttgccaataacttaggatttagctgttttcattaactaaacaatattaaatgccttatttatgaaattttacatagagataattttcctttgggctgcattcattgttttataaccctcatgccaaattttggcatctagcagagataaatatgaaaccactgttccaataaatttaaacaatagtgtatgttgacaattctgaagccattctaattctaattttatttcatgactactttcaaaaccagcttatttattaaagatatacttaagtcacatgaacttgaaaagacatttggcttaaaatctctattttctctgatacagtatttgatttaaagcccctttttttctttaagccaattaattagagcacttttacatgtttctagtagtgaaacatcatatacatgacacataaatacatagatgtattatacatgcagatagaagtagagcttatcatttcacaagacctctttttttcctccagttctagacttctaatttcttgatcttattaccctaggcagttgtcagctaagataaccctaaatttgcatattaaaggaactcttagatgaaaaaaatcagatagtgaaatttacatctcaaggtacagagagaaagagtctggtgctagtgtttccagaatttattccttctggtgggttcttggtctctctgacttcaagaaagaagcctcggaccttgcagtgagtgttacagctcttaaaggtggcgtgtccagggttgtttgttccttctggtgggtttgtggtctcacttcaggaatgaagctgcagaccctcatggtgagtgttacagcaattaaaggtagtgtggacccaaagagtgagcagcagcaagatttattatgaagagcgaaagaacaaagcttccacagcatggaaagggacctgagcgggttgatgctgctggctgtggtgaccagcttttattcccttattcgtccccacccacgtcctggtgattggtccattttacagagcactgattggtccatttcacagagtgctgattggtgcattttacagagtgctgattggcgcatttacaatcctttagctagacacagagtgctgattggtgcatttttacagagtgctgattggtgcatttacaatcctttagccacagagtgctgattggtgcatttacaatcctttagctagacacagagcactgattggtgcattgttatagagtgctgcttggtgcatttacaatcctttagctagacacagagcactgattggtgcattgttatagagtgctgcttggtgcatttacaatcctttagctagacacagagcgctgattggtgcgtttttacagagtgctgattggtatatttacaatcctttagctagacacagagcactgattggtgtgtttataatcctctagctagacagaaaagttccccaagtccccactcgacccaggaagtccagctggtttcacctctcactagtaggaggagattaaaaacgaatgccaaatcaaacataaaattatagaaatctatcataggattatattagaagactgactttatttatataagtagttctaaatttagtctgccttttaactggatctctgagctctgggcagagcccacactgaattccgggtctccaaaaagagaattattatgaggctaagaccatgtgatggttttatgagtgcactctccttttttttttttttttaacaaaaatgtttctctaagtgtctgaactactctcttcctaactttaaacacccaacagtaacctctgttgttactctttgactaaaataattattttagttaaaaaaaaaaaaaaaagaagaaagaaagaaaccaggtaacactatacaaaaggaagcagtgtaagatctgagacgaaattttctcttttacactctttgagttccataaggagaaacagaggttgctccccaaaagggagtctagtgccttctctgttttctttaaggaatcccagggtgttagaaactattttagattcctcatgcagcacagggtagcaagagaaagaagaggcagcagaagtaaaatgaagaaaacagaatttggttgacggagaagaaaaaaacttttgctcaaaaagttgaaggagagaaataaaaaaggccttaactacacacacacacacacacacacacacacaccttggatgttagcttttatttaagcttttagccactaagctccttaaaaaaaataccttcaaatctcattactgtattttagctagtacaaactgctgatatttcaaaagtaatgcaaataccaaaccagaaagggcttgatttaggaaccaaacttaggcagtcatgatgaaaataaggacagaatcttagtttccaaactgcagtgctgggggacaaccattgctctttcagtttggcctggttagcaaaagatggccttgttatgtaaataaagcccctaaggtagtcaaaatcaaaaaaaatttttttttccttttgctagctgtttttttcttttttctttttcagttgcaggaatttagccaattcagaggtcttgttctccataatttggaattttccttcggatttgatcaagttggatagagttggtcaaacccaatgggaaaaagatgaaaacaacaagaaacagaaacaaacagcaacaacaacaacaacaaaaacagttaagtgaaacaaacaaacaatcacacaatttatgtggtcactgagtgctctaatagtaaggagaaattaagaccagctggctgttagtcttaactctagccaagacaaaactccaattcagctacttacctagtaatgagtctcaggctgaagtctgctctctcccatcctagaagcaggaaaaaactgaaactcatcttccctgctggaaacgagctcaaactccagaaaggagttacctgccttccatcatcatggacgcaggaaaatttgccttccttgttggaagcaagtaaaactccaaaaaaggagttgcacagcaaaataaacttcagatctcaacaaatttggggagatcagggattctctgggggtggggtggctcccaggcctcagccaattgtcctattggtttcagccataaagacagctcaggctgctaccacgcactgataggagatttgtcaaagatcgaggcatcttcactcagaatccctctgtgattaccaattgtgaacacaaaatatctgatatgggtctcagtcaatttagaaagtttattttgccaaggttaaggacacatccatgacatagcctcaggaggttctgttgacgtgtgcaaggtggttggggcacagcttggttttacacattttagggagacatgagatatcaatcaatatatgttaagacatatatcaggtggtccaaaaaggtgggatgactggaaacagggagggggcttccaggtgataggtagataagagaaaaacagttgcattcttttgagtttctaataagcctttcactgaatacacaatttacaggactaatcacttaagccttagcctggctcagtgaaacaacagggcaaaggaagcaatcagctatgcatttgtctcacgtgagcagagggatgactttgagttctgtctagctatcttgtttaggaatataatgagaggcaggtttgcgtgcagtttccagattgacttttccctttggcttagtgactttgaggtcccaagatttattttcctttaacatttacaaggagaagtgaagaaataagtaaattagagagctagaaggatggaagtttacagttagagagagtgggatgttgaaggtaatactggttgcatatttcttatccaaaatgcttgggaccagaagtgtttcagatttcagatgttttcagattttggaatatttgcattatacaggttcagcacccctaatctgaaaacgtgaaatccaaaattctccaatgattgtttcctttgagcatcacaatggtgctcaaaaggttttggattttagagcatttcaaatttcagattttcagattagggataataaacctatatctcagaaacggtacatttctgaataatgacaaattgtcattatttgccatgagaattgtcattaatgtgggtggagatggggatgattgtaggtcaagagactgaagcaatagggtaggcttgggtgttagtacggcccttcatgggaatgtgttgatgtcatccagggtcacgggaggcttctgagtgggaaggaagctgagagcctatgattacggtcttcactgatgaaggcagacagtaggaggttggcagatggtgggcactgactagactggaagtgccaagaacttcagtggagcaaggttttacccaagacacagaggttgtggtctagagcagcccagggatgaaggatcacccattggagaggactgtggggaaagcagagtcctgggagatgaaccaagcatcagttgaggctggaacagttaaaatgtatacatcaaattctctccaaggacactgtacccttggctgaaaattccctccttagtctacttcccatcccaaattctacccatccacactgtggcatcctaggtctctctagcagctgaacaggcaggcctctgtaacaactgtttcagcgctgactgagtggttaagttaaatattaaaagttgaaagagccagtaaccttatacaaaggctggaatagaacaaaagcccaccacaagtttttgcctaagtctttcctgtgccttgaaccatgacaagaggaggaaggaattcttaaccagacccatttaggattaagtaagtttttattggctgggtacggtggctcacacctataatctcagcactttgggaggctgaggcaggcagatcacctgaggtcaggagtttgagaccagcctcctggccaacatggtgaaactctgtctctactaaaagtaccaaaatgagccaagcatggtggcgggagcctgtagtcccaactactcaggaggctggggcaggagaatcgcttgaacccagaaagcggaggttgcagtgacctgggatcacaccactgcacttcagcctgggcaacagagtgagactccatctcaaaaaaaaaaaaaaagaaaagaaaagtttttactgggggtctgaagacacaagttttattggaggtctaaatgaactcctcaaacctccgtgatttagcaggagatgtgataagggtaatcaccccagcacttggacccatctagattcaatacatttactgaggctccagaagaaggtcttcacaccttagttatggattagaagaagttaatcacttacgtctttagatgaatgcacacttacatgtagacatatggcttagaaggtatataaaccctggaaagctttgtaattttgagttagtctggtgatatattccaggccttctccctgtacccggttacaaaaataaacttccttccttcccagttcaactgcatcttgttattgggccgcgagaatcagcagcctgaccctcggcttggaccaggaacaacatggtctgagagagctcatcccatgttccaaagggagattaaatgacaaattaagataccccaataataaaatgccaacaataagatgccctacagtgtaatagaaacaatgtaccattatgaaattcccagtaggaaatgaaagctcaaagactaaattcacttgccatttcaagataaaaagaaaatttcaggtccaaacttttttcctgcctcaatttcatattctgatcaggctcagccagaggatgtctcagtatttagacagagtggaggttcctgcggcaccatcctggagaggtgtaacattctttgggtggaaaaggtgaactctgctctcatatgctatctacttaaagagtctggaattaatagggcaccaaagatgatcacagctctgtctccacatccaccaaatttagaaaccaaatctgataactaagtcatttatcagagactcagtggtacccaagtgaggaagggccactggagacaatcttgtttttttcaccggggctggagtgcagtggcgcgatctcggctcactgcaagccccgcctcccgggttcacgccattctcctgcctcagcctcccgagtagcccggactataggggcctgccaccatgtccagctaattttttgtatttttagtagagacgaggtttcaccgtgttagccaggatggtctcgatttcctgacttcatgatccacctgcctcggcctcccaaagtgctgggattacaggctttagctacggcgcccggccattcccctcccttttctgctaggctcactgaactattaacgagcaaaaagtaaacttcccttttctttgagttattatacatttggggtctatttgttagagcaatgcgcttgccctactatactctccctgggccttgtatgatgaaattggtaacagccacaaaaactgcatctgggacacagaaggtggtagaggggaaaataatctgactgacaaagattctgtttataggtgactttttaggattgtggagttaggcaaagctgggatcactcacacagcctgataggggattttcctacgtgggtgggctgacctggtggtcctggttacactgcccaccagccttctggtgtctctactaggagtaaggtgccttctctttctcctccaggaccccacacctccagaccctgctgagggagggccacccatttctagtcccagctcctactctaactatctgtgtgaccttaaacaaggcctttcccctctctggcctcagtatccgcctctgaataatggggctgggcctgccgaccttctggcccttttctgctctgtgagtttgtgaacttgtgatagggagacaggagtcctaggaaggaaatggaactggtgatagggagacaagagtcctaggaaggaaatggaacttgtgatagggagacaagagtcctaggaaatggaaggagagcacgtttcactctgtccagcagagggcagcagctacccacaaatcaacagctgagcaaggccagggctgtgtgggagctatgcacaggttctgcctccagaagccttcagtgcctgcctctgagccagagggttccaagcagaagaggtcccgcccccggagagggacctcagagaggtcctccaagcccctctcagctcttacttacggcatcccagatgccctattcctcttctgcagagagaaggtggttcagccactaaatggtgctgggacctcgcagtttggtgggaaggaggaagcttactcaagcaaggaatatgagacaggcaaaaacccacgcataagccaaaagcccctccaaagcgaggtgttgttccaggctgacaagtgtccagcagggtggacttcagactccctgttaggaactgaattgtgtcccccaaaaagagaaagtcaccccagggtatgacctaattcaggaaaggtcattgcagatgcatttaattaaatgaagatgagctcatgctggagtagggtggactctgaacccagtgggacaagcgtccttattaagaagagggaaatctggacacacacagagcagagaccgccgtgtgaagatggaggcagagatcggagagatgctgccacacgccacaaatgcctggggctcccagaaactacacggagcctcccccagcggcttcagcaggagcatggctcggccaacactttgatcttggtcttccagcctccagaacgaagaaatgctgaggcagtgtcacgctggtgtctgtcctccttacagaatgcctgaacagttccattgactcaaagtgaagatcaaaagaaccaaatgacagcaatagccaagtgtaatcatcagtaaccctgtgttctatccacagttaaaagaatattggcagagaaacagccttggtgttccagcaggagtgaagaggaacaggaaaacgagtggcagtagccctgaaacagccacttctggtggttgccactcacctgaggatgtgagtcttggcaggccaggcttctggggacagggggcccaaggcacagtagacggtaatttttaagattatggatggactgttgggtactggttaagaattctgggtttggccaggcacagtggctcatgcctgtaatcccagcactttgggagactgaggccggtggatcacgagctcaggaaattgagaccatcctggctaacacggtgaaaccctgtctctcctaaaaatacaaaaaaattagccaggcttggtgatgggtgcctgtagtcccagctactcgggaggctgaggcaggagaatggtgtgaacctgggaggcggagcttgcagtgagttgacattgtgccaccacactccagcctgggagacaaagcgagactccatctcagaaaaaaaaaaaaaaaggaattctgggtttgaatcctgcctctccgtctgctagggatatgatttagggcaagttgcttgagctctttgggcctctcttattacatctgcataatagaggtggtattgtttgacttccatttgtgaagtttaaatgagatttttttattgttgtttttatgttaatccctagtacatggcctgctgtaaacacccaggacacccaggatatggtcattgctctttgattttcctcatccccagtctcaaggggaagccaggacaatgagaacagccacttgccatcaagagtcactgaaagggcctcagggtgggatggtggggggataagaaccatgagagaagtcggcacaaaggagttatgggacaaagcgtccaagataggcagaaaagaaaatgtagccagttgatggggaagaaaggaagtcagagggcttagacactgagggggacagaacatctccatgtgcattctcatctctggtagtcagcaacaggtatccacggggagggccctacatcatctgctaccctgaaggatctggaggtaagaggctctggggagaggtgcagtgaccctgcaggccagccctccaacctcctcccacagtggacacggcatgcccctctgccagctgagacagcccacacacaccccagccttaatgattgttctctctacctctcccccactcctcctccacctcctcgtctctgcatgcacctcagagcccatgccaagaactagcagtagtcctggacccgaggtccataaaaatcagtcaactgaataacaccatcaaatctttggtaagagtccagtggggtccccttattccacgctgccaatcctgggctccagtttccccttggggccctgaggaaaggagctgggggcacctggtgccaaggacaaatagggaactggggcgcccaggcctcacctagagggaccccagagcatgcagtatggctcttcttttgctgccctctttgccgactctctcttctccagacacccctggagaggggtataaacacctttgttttatcaacccaaagtgccattgatttaaagacacctctatttgagaaatgttggaaatcgtatgtcttagaattgatcaaatacaccagaatgtgagctgaaaagaaagcaccggacttaaaatttaggaagtcactggtgatcttacttggagaaatccatttcagtagattggtaagtgcagcactagatggctgtgagttggacaaatgggaggtgtggcattgtatgcagcagagatgcatggatggtgtgcagaccagtattgcaaaaaaattgtggtgatgggaagatgtgataaagctcaagatgtggtacgatttaaaggaaggtaatttttgtatgaggacaacttgagcctttgtcaaggctaaggagaagaagctgatggagagactaaaggagtatatgaggcgctgtggaaatagattagtggagggggcatagatatgaaattagtcagggctggccttaagtgtaactttttaacttattagctgacgttggacatctcacctctgtgagctcaggaggctcacaatctcctgagctttggtctcctcaattgtaaaagtgagttaatcatttccctaccttatggaactgttgtttgtattaagtaatttatctacataaagttcttggaacattatggtcaggacatagtagatactcaataaatggggtctactattatgaagtagatactcaataaatgggatctactattatgagactacgagagacagcataattgattagccacgtccaggtgggaagggatgggatcaagctcacaggttgaagaattcaccctgaaaaggaagagaaatccctctgtggtggtttgaaaagatgtccacagattctttgctatcccttccttcaaaagataggatctaattcctctcttcttgagtgcaagggatgcttaatgaattacctctaaataatagaatgtggttgaaatgacaatgttcagcttttgagagtaagttgtaaaaggcatgtgacttactccatgcttcttctcttggat

SEQ ID NO: 2273 - DNA, 1705 bp, Homo sapiens
gtcagtttaaatgtttggtagaattccttaaaaaaaggtatgagccaccacgcccggcctgtattcacatttttcatttgtcatcctcttcaattcccccacttccaataactgagaaacttaaaaccttaaaataaccacaaaactgcctaacaaggagcaacctctcttactagtacattgctaatgtaaccattaaatagataaaatactattcataatatgtgaaattaagtggaaagatgttatgtgtgtctgtgacctcccagtgttctaatgcttactggtaatcagttggttctctcatcttaagtatttctcctaaatcagcttcatttgtaaggtgaatggtttaacatagatctgttgtttgtatcaacaaaatgataatgttattcagaggtaggggcaagtccaggtcttgtgggggcttaaagcttatgcaatttagaggccttctttaataaggaatacaaagtgatccatgcaaaagtaagtacaggaccttggaaggagcctatgcaagtttggaccctgaagtttaaccttactggcttcatggtcaatctgtcttttgctcaaagaccttgaactgaaacctggagtgatgactgagaagaatatagcagggctgcttggctctttggaccaaaaaagagagaccattttctataaaccttgcctggctgacggtccaggttaataaagatgtaaaaatggtagaaggtgtgagaatatatctaagaacaataacaccaacaacaaatcaagggggattatcctttctaaaccttgactatgtcatctgtgagatgtgtagggaagctgcttctgccgtgtagaggccttgaagagtaaggatactggcaggatgcctgtgcactgatgttacagagtcttagcagagggcagaacggtctccttggacaacgtggacctggctgaactacagcactggggaccacttggtgcaccactgcccagggcatggttttgtttgtttgtttgtttggcttattgtaggatggcccagagattctaaatgagaggaatttaagtgggttccaagctgtaaaagattcctgcctcagttaaaaaaaaaagggtgaattgtgtcacaactttctgggaagaatgatcacgtgtaagtgaattgtaagtgcatgtctagattaatgttagataggggccatatatagattttcttgtatcaattaaagttatctttcttccctcaaaggtaggagaaatgctaggaagagctgctactcagggctttctgtttagcaaggaagaactgggggtggtgttgtattgacgagaaatatcttacatatttgggattcgtcagtgggcaggtattggttagagcgatgtgaaacttgaggcaataacatatgaggaagcacttggttttggagtcaccgacttggttgcaaatcctgtctcagttccttcttctctctggccccaggcaagttactcaacccctctgcactttaatttcctcatgtataagttggagataatacagaatacctcataggattgcgaagactacaaaagtgtaggtgtcaagggttttatatacagcctggcatcaggagacactcagtcaatgtcagctgccttttagtttaggaaggaagattttaaaatatacatgggaagataggattggctagagcctttaattgaaactata

SEQ ID NO: 2274 - DNA, 11961 bp, Homo sapiens
ggcttaggattgacttggcgatgcaggctcttttttggttccatatgaactttaaagtagttttttccagttctgtggagaaactcattggtagcttgatggggatggcattgaatctataaattaccttggcaatttttggaattcctccctccctcccttcctcccttccttccttcctgccttccttccttctctctctctctgtcttgtcttgtcttgtctttcctcttctctttttttttcttttctcttctcttctcttctcttctcttttttcacagagtcttgctctgtcacccaggctggagtgcagtggcatgatctctgctcactgcagcctggacatcctgggctcatgcaatcatctcatctcagctctgccaagcagctgggactacaggtgtgcatcaccatgcccagctaatttttgtatttttttgtagagagggggtttcaccatgttggtcaggcttttctttttccttcttttttaactttcagagggggtataattatttgtgttcctgaatatttatgaattttcttctaaacttattgttaaaactatttattgtataacatttttggatgcttttagtaatgtcactagcataagcagatgccagcaaaatgtatcatatcagtcacacataagtaaattgctacaagactcaagaagtaaattgtgaagaaaatttccttctgagggaaatatgatctcaaatgacatgttttttagtgttcaacttttattttagatgcagggggcacatgtacaggcttgttacatgtgtatattgtacccaggtagtgagcatagtacctaatagtaattttcaagttacattttatatttgtaaatagaatatttgattttattttgtgacttctactttatagaatagttttagatttatagaaaaattgtgaagacagtagaaagaatttctatgaactccatactccatgcttgtatttttaataaacagctgtgtatggttgtcagaagagctaattaagctcttaggtgcatctgttgaaattgtttccaaaataaaagggataatagacccattctatattgttcaggacagatggagcccagggaaatgtgtcttggcattctaaaaaagaatgaatggggaaccctggacactgttcccataaggagtgcatgaagggacttgggatatttaattggataatagaagattgaagggtatgtggcaactgtcttcatatattgcagagggtgtaatgtggaagcgacagactcggaggggtcagtggatggaagataattactcagaatatggaagtctatgtattgattacatatttgaaagtgacaggcctgttgtgtaggggcagagggttccaggttaaatctcaaaaataataatagcaggggctagtagtaatacattctgaaaaaccagtgtatcagaaagagagggaatactcccctctcttagatctgctcccctgggtgctgattgtaagtagctttgtatgttttattttagaaaacacatatagaaacacaatatttttaaaaaatagaattgtattcttcttattctgcaacttgttacttgtatttaatagtgtgtcttgggcctcttccttgatcttcattatattttataatggtcttaggattttattgttgaccatcatgcgtgactgcctttcccatatcaatgaaagtttagattatatataacttttgtcataaaaaaaaccaatgttttgaggattgaacatcctggttcgtgtatcttggtacacttattctaagtatttctatagtataaaatatttgaatttggactgctgattatgaggcctgcatattttagaatttgttaaaactgagaaattataatgatgagagtgtccatttctctgcaactccaccaacatcgttatcaagcttttaattttttctgataggtaaaaacaattcattttattgtgtaaattctttgtcagtggagttttgcagcttttcatgtgtttgtttactatgtttctttttgacctttaaaagttgttttgtgggttttttttttgttgttgttgttttgttttgttttgtttttttgtctcgctgctgtgtatgcagtggcacaatctctgctcactgcaacctctgcctctggggttcaagcaattctcctgctccagcctctggagtagctgggataacaggcacccgtcatcacactcagctaatttttgtatttttagtagagacagggttttgccatgttggccaggctggtctcgaactcctgacctcaagtgatccagccacctgggcctcccaaagtgctgggattgcaggcatgagccactgtgcccagccatgtgttatgtttttgctttttccatagacgtaacattttgtctcttatgtgtattacatagtttcttccaagatgtcaacttatagttcatttatggtctctgctttgtagaacttcaaaatttctgtacaatcacagttatatattttttctgggttgatatgttgcttagaaacacttccctaaaccaaaaacatgaaaatatttttttcatattttctttcataagtttctattcacatataggttatttattactcttgcattaattttgtggtatagtgacatagaggagtctacctttccccctctaatgaggtattgtcccatcacagtattgcataaatcttttttccaaaagtcagcttttatcacttaccagttctcattgtacttgagtctgttttagattgtctcttatattgatcttttagtttataggaaagctgctttactttttttttttttttttttttttttttgcaacacgtttttatctagccacgttaccaaactttctttctggttctaatagtttttccattgatgctctggattttctaggcaggttatcatataatctacaaatagtaataactttctaatatttatacttctttactttcttgtcttgtgtattagctagaacttccagaacaactttgaattgcagtgatgatgggcttgcccttattttgtttctgactctaaagtgaagaatgcctttagtgtctcactgtttcatttgctgttattatataatagatagcctttatttcattaagaaagtttccttggccaggcgtggtggctcacacctgtaataccagcattttgggaggccaaggtgggcggatcacgaggtcaggagattgaggccatcctggctaacatggtgaaaccccgtctctactaaaaatacaaaaaattagctgggtgtcgtggtgggcacctgtagtcccagctactcggtaggctgaggcaggagaatggcgtgaacccaggaggcggaggtttcagtgagctgagatcacgccactgcactccagcctgggtgacagagtgagactctgtctcaaaaaaaaaaaaaaagaaagtttccttttggtttatataaaccaggataattttaaaaattaaattaaagatagatgttgaaagtgtataatgtgtgaattgtaactcaataaagcagtaaaaaatgaatgttaaatttttaaaaaatggctttaaaaatattttggggattattttatattttttctccttattaataactacacttgtttttaaaatttggtaagaatgcttaacatgtgatctaccctcttaatgattttttaattgtataatacagtattgtggactatatgtataacattctatagtctatctctcgaacttattcatctggcttaactgaaactttaagcctgttgactagtaactctccatttcccctcgtctcatcccctggtgacaccattccactctttcactcttttatagtcatttgacttttatagtcaaaatgactttgactattttagatacctcatgtaaatggaattttgcattatataccttgtggggttggcttattttggttagcataatgcccttcaggttcatctatgctgtctcacattgaagaatttcctactttttttttaggctgaacaatattccattgtttatgtatgccacattttcattattcatctgttgatggacatttagtcagtttccacatcttgactactatgaatagcactgcagtgaacatgagagtgctagtatcttgttgagattttgatttcaactgttttggataaatacctagaagtgggattactggattttatggtagttctacttttaattttttaaagatttttttggtgaacctccatcctatattccatagcaggtgcaccatttgaaattccacctgtgcagggatttcaatttctctacattcttgccaacacttactacctttttttttttggataatgtctatcctgacatgtacattagagttgtaatctttctgctggtagaaggtcttgcttcaatggtgatagcttctgactgatcaggtggccgtagcaatttcttaaaataagacaatgaagtttgccacattgattgacccttcctttcgtgaaaaattgctctgtagcatacaatgctgtttgatagcattttaccaacagtagaactactttcaaaattggagtcagtcctctcaaaccctgccatgctttatcaaccaaatctatgtcatcttctgaatcctttgttttcatttcaacagtgttcacagcatgttcaccaggagtagattctatctcaagaaaccactgtctttgcttatccataagaagcaactcctcatccattaaagttttatcatgagattgcagcaattcagtcacgtcttcaggctctacttctaattcaagttctcttgctgtttccaccacatctgcagtgacttcctctgctgaagtcttggacccctcagagtcacccatgagggttggaatcatttttaatattatatgagaagaaaacattctaagaaaatgacagataaagtagaaaataagttggaatcaactgcttcccatctcttattgatgtcagtattttgacctccatccatgaatcacaaatatccttaatggcatctagaatggtgaatcatttccagaagattttcaatttacccaaatccatcacaggaatcactatctatgacagctatagccttatgacatatatttcttaaataacaagacttgaaagttgaaatgactccttgatccagcctgctttcctgcaaccttaatctccttgtcaatctctatcagagctcttgggtgaccagccgcattgtcaatgagcaataatattttgaaaggaatctttttttctgggaagtaggtctcaagagtgggttttaaatattcagtaaatcatgctgtgacagatgtgctgtcatccaggctttgttgttccatttgtagagtagaggcagagtagatgtagcataattctgaaaaaaggcctcaggaatttcaaagtggtaaatgaacattggcttcaaccgaaagtcaccagctgcattagtccataacgagtccattcttttttggatttttcataaaatcagcttttggttttattccttatatttatgaaagttgttctccattttattaatctctgcttacatgtttatgtccttagtttttcttttggtgcacttttgttgtttttctgtgtctaaagttcacatcatttattatcaatcattattgtgtcctagtaaatacatttaaagttataactttttctctgaagaaaatgcacactgtatcccatgatgtgtgtagcattaccattaatgttgatttctgtgtagtctgtgatttgagttttgatcatttaatccaaaatcacttagaagaatgtcttaaaatgtctaactagttttaggccaggtgcggtggctcatgcctataatcccagcactttgggaggccaaggcgggcggatcacgaggtcaagagatcgagaccatcctggccaacatggtgaaaccccgtctccactaaaaatacacaaattagctgggcgtggtggcacgcacctgtaatcccagctactcgggaggctgaggcaggagaattgctggaacccaggagtcggaggttgcagtgagccaagattgccaccacactccagcctggcaacagtgcgaggctccgtctcaataataataataatgataatgataatttttaaaaatgtctaactagtttcttctgttgtatattttgcctttaaaattaacttgctatttattgagatggatgttcagttttagtaaatgctctgtgaggattttttaaatgttcatttcttatttaggggaagttcaaagttacatgttatatcatgttattaatagtgctattctaaatggtctcttatttttctactttttctgttttcttagaatgctatcttcacatgcaacattaaaaatgaatttttcaaaattgtctcataattttaatagtgtttgctttatatagatagtgctgttgttcattgcatgattattataggattgtacttttattataaaggatattctttgctttacttagtggttttttgctgtaaatttttctttgtgtaaaattaatattgccacctctgctttcttttttatagattttcctggtttacctgtatttatgcttttttttttaacatttttgtgacattttggtttaggtatatttctcattgttagattttttctattcaaattcctctaatactcgttttctaattggtgaatttaacccattttcatattaacggtgataactgctgtgtttgtacttctccctgccatctgattttatgttttctattcatcatgcttttcaaaaattattttcttgatacttgctgaattgttagctatatcccatttctatatttcctggtggtttctcttaaattattagcaaatatattcatcttgatattaagaattcatcagcatctaaaacctgttaccaccaacgatagtagctaacagttattatttcctgtgtgtctgacagtattttaagcttcttaccagtattaactcaataaatcttcacagtcaccttgtgagaagggagtcagttattcccattatttacagatgaggaaaccagtaagaaggtaagtaattttctgaaaggcacacagccagtgagtagtggaggcagaattcatactcaggctctgtacctagagacctgcttgcttcagcactgagctgttggaatatttctacttgtccctgcctagacaccctctccttccaggttatgctgaaatttactttctagattgttgtcttatctgttatgttttaagaagtctctaaacatttacattaaagacaccagcaatctttggacttgacttcaaattttactgatttatttttccttgacatgtagaattggcatgctttctgggtgctttcttacctgaaaaatggctttattttgccctcatatttgattgatagattggttaatagatatttgtgagtttcattcaacattttgttgacattgcttctttgtgttctagcattgagcattacagatgaaaattcctatatagtttttctctctggaaattcataaggtttggaggggtgatgtgtgtgttgttgttgttctcttattctttcactttagcctctcttttttgaatttctgttattgcttttatcatattatctatttcttttctttctgtgttctcagagaatatcatcactgagtctttaatactgtcagcttcagctgtgtgcattttgctcttcaactttcttttgaggctttaaattaggcaaatatatttttcttagaatttctgaaaactccttttcactggagcttattttaattatatggatgcattatcctcttaaacttctgtgaaaacaataattggagttttcatttgcattagctgtttcatgaaaggtcaagttttttgcttatttattttgatgtttccttttcatgatattcgtgtcttgggatttggttgtatattcacatttttaattagctacttgatttaaataaagtatcagtagttactttcagggttcttggtgattataataattactcacctaccaggcttcttccttgcatgcagctcactacaggaatctgttgtgcctagaagatttcgggacaagtggggaaaccacactccgttaactgcatacacagggaaggagctacgagggagatagaataatttggtctctactattaccttaagagaccttcccctgtcttcgatttaaaaaaaaattactgcatacaaagggtaggagctacaagggacatagaataatttggactccactactaccttaagagaccttcccctgacttctcttttaaaaaacctatgggtctctgcacccctgaacttactttctacacctatttctctcttcacccccaaaatccatattagaatgcccctgcaggctataaagcctttcataaaagtaaaatacccagtcttttcaagagaacaataaaataggcagtctcctacctcttgtcttactctaatataaactccatgaagataagtattgtctccatactgttcatgctgcacagcagttgcccttatctgcagggcgacgcatcccaagacccccagtggatgcttgaaactgcagagagtaacacacgtgattgccaccatcggaacacatttctgtgcacgtcttccacccacagatttaatgccttttccgtcttaactaagcactcatcatggactgtggccataacttttgcagttttagatgcaacagcaaaactaacattaatttttccttcttcttcacaatttcatgggtagatttgttcttaccgtagatcttagcaacctcagcatatgatgttttttcttttgagaactttcaccttttcccttaaagaaagcactttacagcttctctttgacatatctcaactgccatcatcactgctcttgaactttggggccattattaagtcagaaaagggttacttgaaaacaagcactgagataccaccagagtccatctgataactaagatggtaactacatgactaacaggctggtgacgtatacagcatggatatgctggacaaaagggtgagtcatgtcccaggtaggatgaagcagggtgacttgagatttcactattcagtgtggtgcacaatttaaaacttaggaattgtttatttcctggaacttttttcatttaatatttttggactgcagttgaccacaggtaactgaaactgtggaaagtgaggatcagaggataagcagggactgtggtattcatttcattgcacagtgcctagaatacagtaggtgtactataaatattttgtaaagggacaactttgctgaaactgaaaatatttatgttttacccaataatttttcttctggaaatttatgctacggaaatattcagagatgcttacaaagttttatgcatgagtgtccgtgttatttgtaattgtgaaaaatgaaaataactcaaaagtttaacagtggtcatctaaagtactgtatacactgtatatataggtcgaatagaaggtcatcctattcatttattaatgagaggtacaatctccagggatctgtaaaatctattttgtcttaaccaaagaacaaatttttgacatatcttgaataggatgactataaattatgactataaattatgactataaattatgactataacttttaaattgttataatttttgtactattatctgatatttttatttttatgtatgttcctaagtagtttagagatagtcacattttaaaaatctaagatcaaacaaatgaagcttatttttatgtattcatagtataaaagaccttcagtaaatagataatatttttgttttattctagaaaacagctccttgaacacagtgagctggcttttcacacattgcagttgttagcgtttactgcccttgccattttaattatgaggctaaagatgtttttgacgctgcacatgtgtgttatggcttccttgatatgctctcgacagtgatgtcaatacaaggttatgcaaacctccgtaatcaatggagcataataggagaatttaataatttgcctcaggaagaacttttacagtggatcaaatacaataccacatcagatgctgtcttcgcaggtgccatgcctacaatggcaagcgtcaagctgtctacacttcatcccattgtgaatcatccactttacgaagatgcagacttgaggttggcagctgatgagtatttcttcaagactcacttggcgactcccaattcttaggaattgggaaaatttttacacacacacagacacacacacacacacacaaactcatcctcattttcgtactggaagttaaaaaaaaatgacaataaccatccagaaatgacaatatgtacctgttgcctctggagcaagcagacctctgaaaactgaaaaatgcaaaagccagttttttccaaagtgacaaatgtgtcacatatttatgatgtgtgcgtgtattccagtaaaactactaggtagttggaagagtaggtaggatggattttactcacagccatggtttgccaacccctgctctacaccacaagccccactctgatttaagaaatgatttctagatcttactggtggccaatgactagctttttgtgacaggtagaaaaagtacatgaaagttgctattatatagtacgtgctttcatgaaaatttagagtatttttgctagtcgattatgagaactctagtttccattgatgtctaaaagttttgctttccttaaatggctggtttaaaaaattattttggttattctagtagttgtcagggtaatcatttttaaaagtggatttttggcctattgttagaggcaaatgtttaaattatttaaaagttttaggtcttctgtctaggagccagggcttggagtcagacaccttagaagtgtacctgatgctctctctgttctactgtggtgaactggcatggaaaccactgtggtgactgagcatcccatatgcttgaaattctaagcaacatccaatgcataagtgatagtttgtcaggattttgtaagaattcccactacggtcaaatcacctattgtaccatattttggtgaccatccccatttctcaagattctgtgaaggtgcttttcctacctcttctgataccgtggatgtccattgtctaagtgttctacttgatacactaaatttcaattcatttatttgtcagagcttctttagatgaaattaagcattgaaagatgtgttttcactacattcagtctctgtcagaatatattctctgaaaactgtgtgaattatgagaagaaaactgtatatcctaagctgctctctgctacccagtacaactttagactatcttatacagtaatgagcagtatatgcaaaattaaattgctgtaagttttattacattcaaaatataagtaggaatgtggaaactgccatccccaaaatagttgatgctgttttgagtcatgtatatcagtgttccatccagtgagtattgagatttcaatttgctagtaagatttttttagtctattctattatcatttattttaaaatcttttaaactattgtttaaatttaaagggctcggacaaaaatagtttattctacatatagtcgaaaatctgccaaagaagtaggagagaaattgttggagttacatgtgaattattatgttttagaagaggcatggtgtgttgtgagaactaagcctggttgcagtatgcttgaaatctgtgatgtggaagacccttccaatgcagctaaccctcccttatgtagcgtcctgctcaaagatgccaggccttacttcaccacagtatttcagaatagtgtgtacagagtattgaggg

SEQ ID NO: 2275 - DNA, 6716 bp, Homo sapiens
agagaggtcgcgctctttcgcacactccctcgccaagggttaatttctcaaatcgcacgagggggaggagatttccctgtagacgagtaaaaagggtgatggacaaacgtgcgggcactaagaccgcaaggcattcatttcctcctacggtggatgcggacgccgggaggaggagagccccagagagaggagctgggagcggaggcgcaggcaatgctcagccctggatgtagctgagaggctgggagaagagacgaccgctggagaccgagcggcgtggggaagacctaggggggtgggtgggggaagcagacaggagaacactcgaaatcaagcgctttacagattattttattttgtatagagaacacgtagcgactccgaagatcagccccaatgaacatgtcagtgttgactttacaagaatatgaattcgaaaagcagttcaacgagaatgaagccatccaatggatgcaggaaaactggaagaaatctttcctgttttctgctctgtatgctgcctttatattcggtggtcggcacctaatgaataaacgagcaaagtttgaactgaggaagccattagtgctctggtctctgacccttgcagtcttcaggtgctataacaacttgaaacagctgacattatattcggtgctcttcgaactggtgcttatatggtgtacattttgatgaccaaaggcctgaagcagtcagtttgtgaccagggtttttacaatggacctgtcagcaaattctgggcttatgcatttgtgctaagcaaagcacccgaactagggagatacaatattcattattctgaggaagcagaagctgatcttcctgcactggtatcaccacatcactgtgctcctgtactcttggtactcctacaaagacatggttgccgggggaggttggttcatgactatgaactatggcgtgcacgccgtgatgtactcttactatgccttgcgggcggcaggtttccgagtctcccggaagtttgccatgttcatcaccttgtcccagatcactcagatgctgatgggctgtgtggttaactacctggtcttctgctggatgcagcatgaccagtgtcactctcactttcagaacatcttctggtcctcactcatgtacctcagctaccttgtgctcttctgccatttcttctttgaggcctacatcggcaaaatgaggaaaacaacgaaagctgaatagtgttggaactgaggaggaagccatagctcagggtcatcaagaaaaataatagacaaaagaaaatggcacaaggaatcacacgtggtgcagctaaaacaaaacaaaacatgagcaaacacaaaacccaaggcagcttagggataattaggttgatttaacccagtaagtttatgatccttttagggtgaggactcactgagtgcacctccatctccaagcactgctgctggaagaccccattccctctttatctatcaactctaggacaagggagaacaaaagcaagccagaagcagaggagactaatcaaaggcaaacaaaggctattaacacataggaaaaaatgtatttactaagtgtcacatttctctaagatgaaagatttttactctagaaactgtgcgagcacaacacacacaatcctttctaactttatggacactaaactggagccaatagaaaagacaaaaatgaaagagacacagggtgtatatctagaacgataatgcttttgcagaaactaaagcctttttaagaaatgccagctgctgtagaccccatgagaaaagatgtcttaatcatccttatgaaaacagatgtaaacaactatatttcaactaacttcatcttcactgcatagcctcaggctagtgagtttgccaaaaccaaagggggtgaatacttccccaagattcttcctgggaggatggaaacagtgcagcccaggtcccatgggggcagctccatcccagagcatttctgatagttgaactgtaatttctactcttaagtgagatatgaagcattatccttttgttcagttgccccgggcttttgaacagaagagtaaatacagaattgaaaaagataaacactcaaccaaacaatgtgaaaacgggttctgtagtatttgtaaaaaggcccggcccaggaccactgtgagctggaaaagggagaaaggcagtgggaaaagaggtgagccgaagatcaattcgacagacagatggtgtgtatgcccctccctgtttgacttcacacacactcataactttccaaatgaaaccccacagtatagcgcatattttcgatatttttgtgaattccaaaaggaaatcacagggctgttcgaaatattgggggaacactgtgtttctgcatcatctgcatttgctccccaagcaatgtagaggtgtttaaagggccctctgctggctgagtggcaatactacaacaaacttcaaggcaagtttggctgaaaacagttgacaacaaagggcccccatacacttatccctcaaattttaagtgatatgaaatacttgtcatgtctttggccaaatcagaagatattcatcctgcttcaagtcagcttcagaaatgttttaaaagggactttagctctggaactcaaaatcaatttattaagagccatattctttaaaaaaaaaaagctggataatattctctgtaatatttcagtcctttacaagccaaatacatgtgtcaatgtttctagtatttcaaagaagcaattatgtaaagttgttcaatgtgacataatagtattataattggttaagtagcttaatgattaggcaaactagatgaaaagattaggggcttccacactgcatagattacacgcacatagccacgcatacacacacagacacacagatgtggggtacactgaacttcaaagcccaaatgaatagaaacacattttctggctagcagaaaaaaacaaaacaaaactgttgtttctctttcttgctttgagagtgtacagtaaaagggattttttcgaattatttttatattattttagctttaattgtgctgtcgttcatgaaacagagctgctctgcttttctgtcagagatggcaagggctttttcagcatctcgtttatgtgtggaatttaaaaagaataaagttttattccattctgtgtgaatggtttgagcagtgaacaaagaatccatgcaaaccaagtcatgactggaagaaatggggagtgggggacagtgcaggggaggaaagctgttacatctatgttaaatgattgtgagcagtctataatgtcttgatgttggttcataggtgagacacaactgatggaggaatgtattataaattatgcaaaatctgacatgagctgaaaagacaggtccttttataagagctaatagatgcttaggatgcaaatgttattttgagcttcgcaaatacatgataccgtgcaataagccttttttccttataacagaaaatgagaataattaaaatgaggagaaggccacataacagttgacttgaatttaattgaaggacccattggaggctcatctggttgatttaattatttaattgagtgatttattgcagatctcttaatgcaggttagaaacggaagtgagcataaaccttaaaaagactctaaatgatgcttccaaagcactttcattttggtattaggttcatgtttgtttgtctttacttgtaaaataatttggaatttttgtttacagggtgaatgtcttaatagttttaaaattagctaaatatatctaaaggcatttccaatgtttatcatgggaggaaaaaagccacattttttttaaaacaaaacaaaacaaaacaaaattttggtaatataggttcaatacactgtttttaacatctcagcttagccgctttaatcatatcaagatatgaggctggatcactggcccatgacaaatctgaaacctaccagagaattgactgctgcatagataatcctgctgccagttaacattccagaaaaacttgggcaggcaagtttttatagctgccccactatgctgcaatagagtatctttctattgaagattttccactgcatcccgatcctactatggtgaaagcattgttcttgggctaaaaaaaaatcctttatttcatacacacatgatttcatacactaggtctgagcatcaagccaagtccatgagtttgcaatgaagttctagtgagaaatgctctattcataaagcagggggtttacgtggaccttctagtgttgcttatgggaaaagagtaactaccatattacatctaacgcaaggccaaagtaccaaattaaaaccatggattgaggtggttattcgaagtcacttactcccatccttctaattatgctccactacaaaagtaaggggagaagagggaatactttacatgtacattgctagagggaaaagaaaggcttgattatatcccctcgcttctccacctctctgctcatgtaaagaaactgatgagaaaagagactaatatgtctagactgagttagaaacttcatatgagtgggttttgtagaattgatgggaaagacagtgggaacctagaagaacagaaagagacccacagaatgtctttctttttttttttttttttttttttgaggtggattcttgctgttgttgcccaggctggagtgcagtggcgcgatctagactcactgcaacctccgcctcccaggttccagcaattctcctgcctcagcctcccaaatagctgaggttacaggcgcccgccaccacacccagctaatttttgtatttttagtagagacagggtttcaccatgttggccaggctggtctcgagctcctgacctcaggggatccacccgccttggtctcccaaagtgctgggattataggcgtgagccaccgtgcctggcccagaatgtttttttaaatcagatgtagcatcttcataaggtaaagcctgtcacatcagagtaacaaagctcctggagtacagtgatgctagagtagaatgttccagaagtctggccatagccccagcttctgaattacctgggagagacaagatgctcaggttactattttttctttattctgatagtacagcctctactcagagaccacggtgtgtgtcacacaaccgaggcagctagggcatattctgagggcttttttttttttttggtttccttaatgattctttaacagagtaactggattggccaaggtctgattcaagaggctgtgaggagagtagagaacaaatagactttgcctctcagagttcagagctttaagttgtataagcatggtccatgtccacctcttgtagacacttattccttaaaagtttccatcatgaaaaataatatcatgtcaaaattttataagcacccagaatgtcccagtagtcaaatgtagtgtctttctccagtctctgttttcgataataaataccttgctctcaatttaggatgatcgtaaagcctatgttcatgctgtgagtcattgtctcccacagcttttgaaacatcgttctttgtcttttctatacaacacctgattctttgtgcctcagactcattgctatcaggaagagactttgccaagatccaccaccacatttggccagtagtgtatacacattaaagtgagagctgatgaaatcacaatgctctattttgttccgacaatcagtatgaaggggtaggtcccagtttgccaatgagcaacagcctctgtatgctggtgtccaagacttacacaaaacaagtgtcagtgcagtcacagcattttcttgaatgctgttgtgacagactccagttataaacatctgcgagccatatggcacaactcatagctaaagaggccggtacagggcacatgcacagagctttgaagaacatacacaaacctgttgaatcaagttactttcctcatcctcagagactttgacaattcagagctcacagatggcagggggaattctcaggcttcccttcctcctgattgacactttttaaaggaagtgatgtggaagttgttctagaagttagatggacagtgggagcacattcgtgagtggggcttgggagagctcaaaagtggcactttgattttaggctgggcaggcagaagtctcacagtaaaatatatttcactagacgtccaaaccaacactgcattgtagtaacctcttctgaagtaactggttaaattaataactggtcccataagtcagggtcaagccacatttataacccattcgggccggccatgaagggttctgactcgacattggtatttaaatgctgttactttcccaatgcttagtagcacttgagactttatttccatcgacaaaaactaagaaggccacagaagtagcctaacagtcctccctggtcatactcgtttcaaacaggtctgcctgtctagacatattcaggcaggaggttgcttgctgctatcttgaaaaccactggaagattcagcttcttggggacctcagagcccatattcatatggaagcccacccatataagcctcacagagcaaatcacagcaatgttgaagttgttattttcaagtgcttatttcacgacattaaaaaaaatattttttcctggtgtattaaaattaaaaataaaatcataacttttgatttaaaatcaaa

SEQ ID NO: 2276 - DNA, 1072 bp, Homo sapiens
ctttcccacaatagaggagatacaaattttggtctaggcttatttgagtgtttttactttgagttgtatatcatatgagtgtgactaataatacctctgtttaaatgaatctttaatacatcagatgacttatcatagaaatcatggaatcactctgttacacatagcatgtggttttttttatttcttgtacacatattttgatatcatacactatttttgcagagagctatttccttatttttattcgtggctctataattagactaaaataatattagaaattgtggaaatttaactagacatggtatcatgtccatgtagtcccacctattcaagagatgaagccaggagaatttcttgagcccaggagtttaagaccaagcttggcaatataacaagagcttatctctaatttcaaaaagtcgtggaagtttagaaatttaaattctgttctcaaatctgtattagagaaggtttacacagtgttttccaagccttttttatttagagtatactttaaactctttatttaattgaaaaatatgcattttgtttaaaataacctgtttgataaacagatactcttcatattcctatggtcagactttaatttcacaaggtttttgcattttaattaaaaggaatccactcagggtctttgtatctcattctaaatttcaaatttcagaggcttttgtgcttagttattgaaaaaataattgtaaagctcctgcattactacgagccacttgaaactagaaaacctatttgtatgtatcctggaatacacagaataaggtcttgcatgtaagaaacattttaatagtttttaatgtgaatcaacaaacagggaaatgggcatttttttaatggaatgttacaggtaacataatatgcataagatatctaataattaaatctattaaatgtcttgaatgttctgaatttatcttttcttctaatgttgagaatctataagttgaggtgagttatgctgagaaaatatgtcatagaataaaatgaaaattggaaaagatggaaaggaaataggaaaggtggatacagcatg

SEQ ID NO: 2277 - DNA, 3177 bp, Homo sapiens
gctgggccgccccctgggcagggcagggatcggtgaggcaaggagctgaggagcgctggcaggttggtctccgccagctggacatgtccttgctctgccaactgtacagcctctacgagtcgattcaggagtacaagggggcatgccaggcagcctccagcccagactgcacttacgctctggagaacggcttcttcgatgaagaggaggaatatttccaggagcagaactccctgcacgacaggagggaccgaggccctcctcgggacttgtcactgcctgtctcctccctctccagcagcgactggattctggagtccatctagagggtcttgggagggatgtgactgttgggaagcccttcctactggacacgctgtcatcatttgctgcttctcttgcaagaaagcacctccgttgtggacggtcctcgggcacaggggatgagcgctaccagtttcatttgtaggcagggagttctccgcggatgcatggtggcagtctgctttgatggcagcagtttctgcttaggtgacctagaggtcctcagcagtatcctccacacctatttattgaggtgcacctgctggggattcataatgagaatataacaagaggatctcggtgaaaggccttagtgggtgttttgtgtgaggtggcttgtagctagctacttccttacagatggtagagtattccaatcctctttgtgttagggttcttgcttccagtttgggatgtattaaaaccaccatttcactgcttcccttcctcaatatgctctgcagcttttcttgctgtttaaacctctcgcctcagctttatttatttgtaagctgcattactaactgcccagtgattcggtgaaagctttttactgaaaaagttaacatttctagtcatcccaatcaactggcttttttcaaccaaaattttatatcattctttgtctatcagatacgagaggaaggaagataatacgaagacatgttgaatagtgaaaaaaaaaaaaagaacacaaaaactggggcaagccaatgtgatgtatcactcactgtaagatggcaaatgttttcatttttaagattccgaatgtaaactagtgtgctagaaagcaaaccacccgccactcaaaccagtaattaccttaagccttaatatatttattaaaatactttatgagaacattacactttgtaggttaaaaatgaggataaaatgctaaactatctgtgtcatgtgttattttattctgaatttggaatcatcaactttcatgacttgaatgcattgagtccagtcaaataatgaaagaaaattagtttgtttttctgccactaaatgcatttgaaacaagattgactctgttgagcttaaggaatcgttttagcaagagtagatcaccatttacagctggttctcagtgctcttttttttctttgagacggagtctagctctgctgcctaggctggagtgcagtggcacgatcttggctccctgcaacctctgcctctctgggtttaagcaattctcccacctcagccttccgagtagctgggattacaggcgcctgccaccacgcccagctgatttttgtatttttaatggagatggggtttcactgtgttgtcctagctggtcttgaactcctgacctcgtgatccacccgcctcggcctcccaaagtgctgggattacaagtgtgagccaccatgcctggctgctcttctgtctttgaatgctgcagactccttcatctttcttttggtgtgataattgctcactagagcgtccttcaggttagggagaggaaggcacctcaatgtcatgcatcgccaagtgttaacctgtcaagtacaccctgggtcaggaactggggtgagatacagagaaggaggaatacgcctgcttatttcctctgttgaaaggagttaaaatgagaggtggcaattaattgccttcagcacataactggtcagtggggacaagaaaattaaaagcagttaagaccaacagagttaagtctggatcacttgcaggaagttcctttgaggctgttccatgcttacagtgagttgaacctttagatcagctgttcttgaacctggccactttaagaatcacctggggaatgtttagaaaaatactgatgcctagggctgggcgcggtggcccacgcctgtaattccagcactttgggaggtcaaggcaggcacatcacaaggtcaggggattgagaccatcctggccaacattgtgaaaccccgtctctactaaaaatacaaaaattagccagacatggtggtgcgtgcctgtagttccagctactcgggaggctgaggcaggagaatcacttgaacccaggaggcagaagttgcagtgagccgagatcgtgccaccgcactctagcctggtgacagagtgagactccatctcaaaaaaaagaaaaaaaagaaaaatactgatgcctgggctccagcaccctgcatgcctagtctggatttaagtaggagtgaggcgtgggcgcctctatggatcgaggaagcctcccaggtgattctaatgtgtagaaatgttgagatacagtccttcagctacatagtgttcaaagcgtggtgcgtagatcagacatggacaatctcaaagcaccccagccttgctgaatcagcccctgcctcttaagatgcctctgatgattcctttcacaaagcttgggaagcagctttctgtcggcccagtgcctagcacttggagaccacctctccatagagggctaccaggatctccttcagcactgcggaagagtgggccccagggcatgattaggagaccccagtcctttcagaatgggtcaacaatagcaagggagtgaagctcgaaggacaagttcaggcttgggggaactcatggttcagaatggctcccttccctgggttgctgcctctaggctgttctggaactgcagtgattcattgtgcttttgagttttggggctttcatctcactattgctggatagtctgtcagagttagaagtggaatgagtcgaggcaggccaggggcctctcccttgctgctgggaagggccagcacattcctcgttcctatgatgaagatgcacgtgtatacaataaccaccacatttcttggtactccacttaaaacatgtaaataaccc

SEQ ID NO: 2278 - DNA, 3538 bp, Homo sapiens
gtgtgttccgacaccgccgcacgaccgctggcttctcccctaccctctcagggctgcaggtcgtggtgtgtaatggccgtggtttagggctcggcataaatccacatttccttatcagaatcagatcttggtggcgagctgcatctgtgccaggtgccattagccttaaagccccctcctgccccaggagtgtcctttgttttggaaggaaaacttactcagagcctaatctgtaaaccaaacctatggggaatagtgggagtgtggtggggcctgagctctgagcctctccctccccatgaggaccccccacaccccaaaagagctccgagtggagacccttggggatccgtttgtcctgggttggagcctgctcagcgtcatagtcacgcccggggctgggtgcagcctccatctctaacccatgtggtcacttctgctcctcccagagctctctgcagagtttcaggttcagccttagctctggcagccactgggtagctggggctgtgttcccactgctctgggatcccttccccaccaggagcagaggccttcctgccacagaactttaatgacagccacatgaagtgtcatccccttgcccccccaaaaacacacccgcccctttatttcctgtttgctccttaagttaccttaactactttatgcagaaactggaaaggtgtgatgaggaatgcagcctgagatgctgaaaagaatgactggctttggaaatgggagagaacatgaaaggctcccggagcagcgctgactcctccaggaaacactgaggcagacgtgtcggttccattccatttccatttctgcagcttagcttgtgtcctgccctccgcccgaggcaaaacgtatcctgaggacttcttccggagagggtggggtggagcagcgggggagccttggccgaagagaaccatgcttggcaccgtctgtgtcccctcggccgctggacaccagaaagccacgtgggtccctggcgccctgcctttagccgtggggcccccacctccactctctgggtttcctaggaatgtccagcctcggagaccttcacaaagccttgggagggtgatgagtgctggtcctgacaggaggccgctggggacactgtgctgttttgtttcgtttctgtgatctcccggcacgtttggagctgggaagaccacactggtggcagaatcctaaaattaaaggaggcaggctcctagttgctgaaagttaaggaatgtgtaaaacctccacgtgactgtttggtgcatcttgacctgggaagacgcctcatgggaacgaacttggacaggtgttgggttgaggcctcttctgcaggaagtccctgagctgagacgcaagttggctgggtggtccgcaccctggctctcctgcaggtccacacaccttccaggcctgtggcctgcctccaaagatgtgcaagggcaggctggctgcacggggagagggaagtattttgccgaaatatgagaactggggcctcctgctcccagggagctccagggcccctctctcctcccacctggacttggggggaactgagaaacactttcctggagctgctggcttttgcacttttttgatggcagaagtgtgacctgagagtcccaccttctcttcaggaacgtagatgttggggtgtcttgccctggggggcttggaacctctgaaggtggggagcggaacacctggcatccttccccagcacttgcattaccgtccctgctcttcccaggtggggacagtggcccaagcaaggcctcactcgcagccacttcttcaagagctgcctgcacactgtcttggagcatctgccttgtgcctggcactctgccggtgccttgggaaggtcggaagagtggactttgtcctggccttcccttcatggcgtctatgacacttttgtggtgatggaaagcatgggacctgtcgtctcagcctgttggtttctcctcattgcctcaaaccctggggtaggtgggacggggggtctcgtgcccagatgaaaccatttggaaactcggcagcagagtttgtccaaatgacccttttcaggatgtctcaaagcttgtgccaaaggtcacttttctttcctgccttctgctgtgagccctgagatcctcctcccagctcaagggacaggtcctgggtgagggtgggagatttagacacctgaaactgggcgtggagagaagagccgttgctgtttgttttttgggaagagcttttaaagaatgcatgtttttttcctggttggaattgagtaggaactgaggctgtgcttcaggtatggtacaatcaagtgggggattttcatgctgaaccattcaagccctccccgcccgttgcacccactttggctggcgtctgctggagaggatgtctctgtccgcattcccgtgcagctccaggctcgcgcagttttctctctctccctggatgttgagtctcatcagaatatgtgggtagggggtggacgtgcacgggtgcatgattgtgcttaacttggttgtatttttcgatttgacatggaaggcctgttgctttgctcttgagaatagtttctcgtgtccccctcgcaggcctcattctttgaacatcgactctgaagtttgatacagataggggcttgatagctgtggtcccctctcccctctgactacctaaaatcaatacctaaatacagaagccttggtctaacacgggacttttagtttgcgaagggcctagatagggagagaggtaacatgaatctggacagggagggagatactatagaaaggagaacactgcctactttgcaagccagtgacctgccttttgaggggacattggacgggggccgggggcgggggttgggtttgagctacagtcatgaacttttggcgtctactgattcctccaactctccaccccacaaaataacggggaccaatatttttaactttgcctatttgtttttgggtgagtttcccccctccttattctgtcctgagaccacgggcaaagctcttcattttgagagagaagaaaaactgtttggaaccacaccaatgatatttttctttgtaatacttgaaatttatttttttattattttgatagcagatgtgctatttatttatttaatatgtataaggagcctaaacaatagaaagctgtagagattgggtttcattgttaattggtttgggagcctcctatgtgtgacttatgacttctctgtgttctgtgtatttgtctgaattaatgacctgggatataaagctatgctagctttcaaacaggagatgcctttcagaaatttgtatattttgcagttgccagaccaataaaatacctggttgaaatacatggacgaagtaaacctctggtcttttcgtgggggaaagaagagtctttaattgatgtttacggcagatgcgccacggagctgccaactcaccacttcattatcttcctttcaacaggatgttcaagtacagagtgtctagtgcctgcatttggg

SEQ ID NO: 2279 - DNA, 22956 bp, Homo sapiens
cgccgtcgaccccacgccacgcagaggtgaagatacgcaggacgtcctctaaagcaacttccgtgggtgccaggttgtgggctgggggcggtgctgaccttgagagagcggaggaggcgcaggcgcagcacaggtacgtgggcgggcggatcgtggtggctgcgcttgcgaggaccctgaggtagattgggtggtttcaacaggaacgcatccactgtctgagagtttaaacttgattttgtgaggggacgaacagcgtgacaattaaaagaagatctgggaatcgtaagtactgacagaatacctggagggaaggtgggactggagaatagtttgtgaaacagatcctgctgaggatgaatccagaacttcctgaagggttccgcttctgctgtgtagggacaaggttgtaaatagacaagccacaggcacctgcaaatggtaagtgtggtagagaggggctggaattgcctgttggtgtatctgtgggaagcagctgctatccttgaggaagaaaagatggagaaggtaagtggctatcaacctgtcagagacaacacattctgtgaagttgtactctttcatttctgacactgtggttcttaatatctgtcctaaacctggcagtcattgaggttcgcaaagtatctccttctatgtgacagtaaaactggaattactatcagaatggaatccattcctgctagagtaaaaccatgaaaagaaatcgcagttttgattatctgcttatcatttttaatagatcacagagtgcagtgttccttatttgttgtatggcaagttgatgaataactcttgattaatatcttttaatgttctgtttcacacagttctctcaattacatgtgaaaaatctgttatataagtaatgctatttaatgattaaaatggatatatgttttaaggtagtgccacccagtcttttttttttggtagaataatattattatctattggttgcctgccttgaagtacagtaatttctctgtttccattatttaaaataggtgagtgtctttgacaaagatacaaagaaaggggacagttatgaaagggaagaaaagatagatggagatgaaaagaaattcagtagtttcagcaagggaattaggagcataatctttgagaaaagtcttggttgcttaccattcgggctttgtgatgagttgaaatgtcctgaatgagaactgttctcaaatgctttcaagaccaacaaaaagtacgatacccacactgacctggaactctttaaaccattaagatatatcactttttcgcagttcagtccatattttttgcaaaatgttctgcttagtttttctgctaagaaattactgtttctgaacaaggttaagtgtcgtatgctttcattgtagttttttttcccctaacatatactgttttcctaattagactataaattcctccacagctgggaccttgttttgttttctcgccttccccataacaaatatcatttaagtgaatgttgtaaacagttacttcatttaaattgcccttaaaatgctttatgacaaagacgttatttgtagtaatacctataatggtaaaaagtttgttgcagtcttacagacgataagattgatcaattgttatatatgcttagtggaattttatctagctgttctaaagagccattagactagtctttctaatggaaaatgtttattgtctaagttaaaacagcatttgaggccaggcacagtggctcactcctgttattgcagcactatgggaggctgaggtgggaggatcactagagcacaagagttggagactagcctaggcaatatagtgagacctcttctctacaaaaaatttaaaaattagctgagtgtgatggggtgtgcccgtagttccagctactcaggagactgaggtgggaggatcacttgggtccaagaggtagatgttgcagtaaaccaagatcatgccactgcactgcagcctgggcaacagagcaagatcctgtctcaaaaaattaaaaagcattttatagactgcatgtttgtgtcccccctccctccgcaccagaattcatatattgaagccttaatctccaatgacatgatattagtaggtggggcctttggggggtgattaaataataagggtgaagccctgcatgggattagtgcctttacaacaagagaccctagacagcttgcttccactctttctttgctcttcaccatgtgaggacacagcaagaaaacagacaactacaaatcaggaagagggcctaatttgtgccaaccatgctggcactcttctctaacttcccagcctccagaactgtgagaaataaatttctgttgtttaagtcacccagtttatggtagtttggttatagttgcccatattaagacagcaggatgcaaaattgtggccagtatgattgctttgacatgaaacaaattttaagcacaaattgcaaaaagtaaccaaaatatatcaatccccactgctggcattaacactctaaaacaaactttgtatattgggggattttatttatttatttatttattttttttgctgaccatagtgactcatgcctataatcccagcactttgggaggccgagttgggcagatcacttgaggccaggaattcaagaccagcctggccaacatggcaaaaccccctctttacaaaaatataaaaattaaccaggcatggtggcacacccctgtagccccacctacttgggaggctgaggtgggaggatcgcttgggcctgtgaagcagaggttgcggagagctgtgatggcaccactgcactccagcctgtgtgacagagcgagactatctcaagaaaaaaaaaaaaggatgaggattttttttgttttcaacatgctttttaacatccactatattactctcatctttctaggctggaaaaaaaaatgttttaaatgttattctgaagtatattgcaacctttaacaattcagtagacttctgaatttttattttcatgtagcttaccacagttgtatctaggaatatatcacatagctgattaattggtgaaataacccttgcaattttacacaggttgtacagtgcacattttcaaggaccactcacatacatccatttgatattttttggtatcaagaaagtctttaaacaatcagtaccaccaatagcagtaaaaagacaaaactgtctgaaagtacctatctgtttaaaactttaattagctttatccatccattaaatagttattgaatataaaactgtatcattcactcttctacactctgaggaaatagtggtaaataaagcagatattgtccctactatcaggaaatttacattttagtagtaataagccataaattaacaaaaacagaagacagtggtaagtactaggcatgaaattcaaacatgactattttagattaggtgattaaagaaactaaaataccatttaagctgctgtgtaaatgacaagagaatccagctttgtaaaaattggtgaaccctttgcttgcagaagggacaactgcaaaatctaaggcatgatctagcctggaatatttcaggagccaaaagaaggcctgcatggttagagaatagtgacttaagacgcaaatactgtaactttggagggataggaaagggctagatcatgttacctttgaaagacaggaaagagtttagattttattctatgtgcaatggaaaaaaaaatgagagcattttaatccaaagagtaatataagataatatatttttaaaatccactttggtaatttgttaattggcataaagagtcagctttcatgtaacataattactaacatacttggatttaaatttgtcattattcttattttatttgtcccacctcttatatgttcattttgtcttcttttgcctttttgatttttttttttcttaattaggccatagcacctgatattcccaggcagactctcatccaagtgccaatcagccccagccctgcttagcttcccagatcagatgagaacaggcatattcagggtggtatggctatagaccttttagattatttttaattattccattttttctacctcataagcttgacagatgtcttttagtatctttttactgttcacctcaggtattaaaacatggaaccttggtttatcatctttaagataatttggtattatacttcttccaggacaatgtaaggacctgcgaacacatcaacttcatttactgccacacctcatgttatatacattgtatattcttaatatgtatttcctaaattctcaagacattttttatacaatatgaatttacatttcatattgtataaaacatttactttttctattgtgtttcgtggttcctggaatctgagcttccatctaagaccttatttcttcttgaaggacatactttaatatttcttcgaatatctactggtaacaattcattcagattttctgtcctgacactgtcttattttactttcattttctaagaacgtttttgctgaattagcagctattttatcattttgaagatatattttattccttctggcttccattatgtcctctaagacataatgtccattttgtttttttctcttcaaaggtaatctttttttggatggctacttttaagaggtttgtcttaagtttggtgtgcccacatgtgttttgtgtttgtttttttgtgtgtgtggtttttttctgcttcgagattgataatgtttcttgaatctggctgtgatgtccttaggctgtttgagaaaattcttagctctgtttgatcagacattgcttctgctttcactctcctttctcctcttcttttgatactccacttacatttgtatttgacaattcactttgtcccttgtattttccatttattttcttgtctgtttcatcctgaatatttcttcttaactttcagttcactattttctcttagtagtctcgaatttgttaaatctctcttgaagcatttattttagttatatttttggttatcagttcaaacatttctacttgattctgttttattgtttccagttgtttatccaatatctcaatcttttatttcctcaaacatactaatcataattactttaaaacctgtatctaataactatggtgtctgctattatctgacacttttcttgtttcttgctgttatcacattgtcttgcttttatgtcccttatttttatgttattttgtattatttattttataaacattataaatatataaaacttggcttaggttatgttttaattgaatgtcagaattgttttgattgaactgtatatgaggaaactatactttgaagtccaatatgatggtattttctaaagaaagaatttatgtctcctggcaagacctttggacactagtaatctaagatcttcttaatctggttagtgatagagacaattagaatataggcaggtctatttcctgttcatactttcacaatgtagacctctgaagtcccaactcaagcatgcagagtttaccagatcaggccctaaacttcagtttttgtctttttaattctatgggttagaaactctgttcaacttttcagccatcacctcaggaatcagaagatactccagaggaaaagctaatgtaaatgctggattcaacaactctgttttttccttctgaatatttcattgtctctaatgctgtcagatgtttgttttatattttgtccaagctgagtgtggtggctcacgtctgtaatttcagcaccttgggaggccaaggcgggaccatcccttgaggccaggaatttgagactagcctaggcaacataacaagacctttgtctcttggaaaaaaataaataaataaatattattagaagtgaaaatggggatgttgttacaaatgctgtggagattgatgagaaattatgaacaacttaataataaatgggaaaatataaatgaagtaggcagttccagaaaatgtaacttttcaaaagccatgtaatggaaaatataaatggtgggatgttgatgtaagaaatcatgatgcccagagacttttgccaaaccttcaaaggacagatcattacaattttacacaaaccattccacagtatattccacttatatactgtggaattggcccttactgcccttatcaaatttaacatcaaggttacagaagcttaatattactgccctgattttattagggcagtaatgatttgataagggcagtaagaattacagccctgtcatattcgcaaagacaaaaatcctaaataaaacagaccttagaaaatgtgtttttaagaaaagataataaaacatgatcaggttgaatttaacccaggaatgtattttagtatattaagagattagaaaaactatctggctatctgaacagatgcaggaaaagaaaactatttgaaaaaattaacagacatagataaacctttgggcaaattagaattgtgtagaacttccttgagccaataaaacctacaacaacaatattttaagatgaagtatttgaagcagtccattagaatcaggaacaagtactatgttggagatcctagccagcattataaggcaagaaaaacaaaagattaaaaattgtaaataaacataacttagtctacagataaattattgaagagctttgcaaggattctgaatatactattgatatggtttggatctgtgtccctacccaaatctcatgttgaattgtaatccccaatgttggaggtgaggcctggtgggagattggatcacgggaatgggtttctcattcgtggtttagtaccatcctcttggtactgtccttgaaatagttcttaggagatctggtaatttagaattgtgtggtacctctcccctctctcttgctcttgctccccctttgccttccaccatgattggaagcttcctgaagctgcctcagaagcagaagccactatgcttcctgtacagcttgcagaaccatgagccaattaaaccccttttctttataaattactcagtctccagtatttatagcaatgtgaaaacagataatatgactatcaatatacaaaagtgaattgcatttctttccagcagaaatgaactgttagaaaatgatttttgtaacataccatttactatattcctttaaaaatataaattaggtaacttaacaaaaggtatagaagacctctgtagaaaattacaaaactttattgacaggcatttaaaaatgtctaattttaaaattgccatgttcaatgattaaaagactcgagttaagatggcagttctccactacacaatgaaggtaattgcaatacaaatcccaaatgagtttttcaaggagcttgacaaactgattctaaagtctgtatgacaaaaagcagaattcaggatactccagaagcagatttaagatagaattgacttgtagatattcgtaacagcaaaaaaataaaaacaactcaaatatccatcaaaagataaaatgtttatccatgaaaagatactcaaaaagtgacacctttatataatgggatatatttggctgcaaaaaggaatgaactgctaatacctgctataatgtggataaaccttgaaagcctgctgaaataaagaagccagtcacaaaggaccacttatgattccatttaaacaaagtgtataaagtagaaaatgtattgagacaatagattgtggttgtttagggcttacaaagtttggggtgatgggggcccgaggtagtgacagctaaagggtgcagtttctttttgaggcaataaagttctaaaatgtatagttgcacgtttctgtagatacactaaaatcaattcagttgtgcatttaaatgagtaaattggtatgtgaattgtacctcaataaatctgttaaaaccatagtaattaggatattgtaatactggcttagagatggaaaaattgatttataaggaatcctgattgtaaggaatcttgacttatgtcagagatggcattgcataccagcagggaaagctagatcatttcaatagatgacgctgcatattcatatgggggaaaaatgaaattggtcctccctacctaacaccatacagaaaaagtagtttcagatgactttaagatgtaagtgtgaaaggaaaacatagtaaaccttcaaaagaaagattgcaaaatatttttatgatcttatggtagggaaatgtaatatgtataaaggaaaacatgtatgtccaatatgttaaagttaaaaacctctgttcaagactccataaaccctcagaatagcggttaatttcagtcatgcccaggaaacatacaagatgagcctggaataccttgtgcaagatagcaaggaagctattagagactacgagggtgtcatatcaaatggactcaggagacaactgaaaagcatccttctggccatagatgagaccatttgagtgtcaataaggacagtaaatgcaattgattggaacatatcaagtgtctttaaatctgagtacataatgattgtaaaacaaacagcatttagttggtcaacagtagaagatgctgttgcatcaattcattattttgaaaatcagttttgttttgtttttaaagtaattaggcatttgtcctgccttttgtatgtgaactgtaagtaaccacatagtagatgaggagagggttctctttgtacatgtattctagctaataaatggaggaatgatagaaaattgccattttgaaattcctaatgaacaaatggatttatttattgcatttcaacagctgctaacatgacagacaagaaaacatatgtttcttaatggaaaaacaccactactgatgttaaaatcttatcaaaaatttgaccctgatactaatcaggtctttagatccatccaatttgcagaaaatataaacaccattaaaactttaagccaatgaaacctaccacaacgtaatattttggaatggaaaatataaatgaaaaatccaattttggagaatattgggacaaattaatttcaacaaatatgttgcaggagaaaaggagacgagaaggacaagtggagaaaaccgtagattacaagagacttagttcaatatgaagcaacctgtgaacttggattagttatcttactgtataacaaatcaccctagcttaaatctaaaaatatttatacactttcttaggatccacaggtggtttagctagatgttctggcccaaggtctcatgaatttgcagtcaagatgttggctgggctgtagtctgaaagtttgactggtgttagaggatccacttcctagagggctcattcgtagagctgcctgtgttttctcacaacatggcaactggctttctctagaacaggtgatccaagagagagacagaaaccatgatcattcagagtgatgtaacattacttctactatataatgttagtcacacagacatttccctgacaatatgtgggaggagattacacaagagcatgaatactgggaagctagctgtcacaatttggccccaatgattgatagttcttgatttgcaaaatatattcatcccctccaaaagctctccaaagctctcatcctatgacaccattagttcaaggtctagaaatctaaatcagttccaattgtggatgacactcataggtgtacttaagtacagctcctcaagaagagttctttttgatctgaagactcatacactaaagacacagtctctgcttccacatgtaatagaaaatgaataggataataaatgtggacatgtatatttaaaaagagggaatattggaggtacataggttcacagaaattctgaaacccacctgggcacagattggcagttgcttggtcaagtttcaaggcctagaattctcttagctctgccttctgggatcttggatctactcactgagtcaccctttctttttcttgtttacacttctgcctgctttctgcctatagaagcttggatgtcccacaagcttctttccatttggttctctctgtgcctttcagtccaggctggccatgtttctgctaatagacttctcttaaaaactttgtggctcacttgtgaattttgagttcactccatcagacaaaagcaacaaccacacatctcgtcccacataaactctgcctcaagcttttgctgatgaaaatacccttaaactttttaaaaacctgtgatgttattcagagattttctgagacacatcgtttgtctgatgaaaatactctgaggcacaacttaagatctttctgagctattaaaggactttataactacagcctcaactttatgttttactggcagtgccctagatttgctttttgctcagagatattccccaattttagcacatttgtcatctgcacaggctgggaatcttcaaatccagcaagttttgacttgtttttgtttgtttgtttgtaatagagtctgttttttgctgtgttggccaggtgatcttggactcctggcttcaagcattcctcccacctcagcctcccaaagttctgggattttaggtataagccaccatgcccagccatggctcctttttgtttaacagtccttactttgatggtctctcttctcacacattttactatcagcaacaagaaaaaatacacatgaaatatttaacacttggccggcaatctcctttgctagatcaatgagttaattaggcattttttctactttgtacatatctgtggataacaaatttgctaaactttctgccattatgtaacaaggatctccttccctctagtttccaagaagagttttctaatctgttaagatgtcacctgcagcctcctcaaaggttatctattatgcttctataaaaaatttcttcaaagctcttcaaactttcattaacactctcctccaagttctaccttctgttcactgccagttttaaaaccacacttacattttaggtttttgctaacaccccacttctgagtaccaaaatgtatactgattttctattgctgcataataaactgccccaaaatacaacatgcaaagcaataaatattcattatctcatgtagtgtctgaaggtcaaaaatccggaagcagcatagctgagtggttctgattcattgtctcttgtgaagttatcagtcaaaccatcagctgagactgtaatcatctgatgttttaactagtaccagaggatacactttcacatgctattggcaggacactttagttcttcactagctgtttagcagaataccgcacttcctcaccacatgtacctcttcatagagcttcctggcttcctctaaaacaagtaatccaagagagaagcagaagccaccatggttttttatgccgttgttgacctagcccccaaagtgacatattattacacagatatgtagccaacctgtgggtcactgatacggtttggatgtgtgtcccctccaaatctcatgttgaaatgtgattctcagtgttggaagtggggctggtgataggtgtttggttcatgagggtagatcccttatgaatggcttggtgctgtctttgtggcaataagtgagttctcactatctgagttcacacaagagctggttgtttaaaagagcctgtcatctcttttgctccctttctcaccatgtgatatgctgctccccttctcttctgccatgaagaaaagcttcctgaggccttcaccagaagcagatgctggtgccgtgcttctacagcctgcagaactggaatgtgttccaagacccccagtggatgcctgaaactgagaatagtactggaccctgtatatactgtgttttttctttccttattgagaacttttatgttttcacttaaaggaaggactttacagcttctctttcgcatatccaaattgccagcatcaccgctcttgcactccaagccattattaagtaaagtaaagaacacaaacactgtgatactgctacacttgatctgataaccaagaagtctactaagtgactaacaggtgggtagcatatacagcatagatacactggacaaagggaggactcacatcctgggcaagatggagcagaatggcagagttcatcatgctgctcaaaatgatgtgcaatttaaaactaatgaattatttctggaatttttcagttaatatttttggacatgaggtgactgcagttaactaaaaccatggaaagcaaacccatagataaagggatactatggtatgttttcattttctataataaaaagttaaaaaggaaaaagacaccataggaaaataaaagacaagtcacaaactgggaaaagatctttgcaacacatgtgactatcgaaaggattagtattcacactgtgtaaagaaccactacaattcaatgaaaatgaagataatgctttccaccccaaacaggcaattcatacaggagaaaacctgaaaagatacccaaccacaaggaaataccatttcacacccaccagatgaacaaaaatgtaaaagtctggcaatattacaattcttatacattgctggttggagtatgaattgatataatcaatttgggaaacaatatggtattatctagtagctgaagatgcacatcttctgtgacccaggaaaaatgtatagcaggagacatgagcaagaaaattcataatggcatttataacagtaaaacgtggaagaaaatccactgtccatcaacagtagagtgattaaatacattgtatatgctcatacagcagaatatagtggtggaaaaaataaattacaagttcatggacatagataaatctctaacaaaatgttgagcaaataaaaattcacaaaagaattttacagtaggattccatttatataaagaaccaatgaaagtaaatagcctaagggtacaaacataagtaaatctataaattaaagcaaaagaatgataagcacaaattcaaggcagtgatttcctctagctacagagggaagggaatgaagtaaggaaaaggtgaacaaggagcttaaaagtatgataattatatgtgttggtttggccaaacagtcctggtttacctagcacagttctggtttgctgattgcctggtgtaatgattaatagcactgtcactccccaaattgtcattgtttggataatgaattatatgcatcctttttagagtaaaagtaacttttttctccttaaactggatggagggcatgtgggtctttatcattcttccttatacatgtatttttaaaatataatttaaaactagtcagtattttaaaatataatttaaaactttagtcagtgttagtcactgtgttagtgacaacacagtaaaaaaaaaaaatttgtaagataaataaatataaataggatccaaatgaaactcttttcatctgggtggatacagggataaataacatactatatgcctggcattgtattaagcttgttactgatattacttcatattcatagcaagacatttaggtaggcattattatctccattttacacatgaagaatctaagacacaaagactatacataatttaaccaaagtcatattatatgtgacagcgcagaatttgaacccaagcagtgtgacatcagactacatgctcttaactaccatgccagagcccataacagattttcttaaccttttttatgccacagatccctttgacagtctggtgaagcctatagagtcctttttagagtaatgtcttttgtacatcaaatataatgcacaggattataaataaaatcaattatactaaaatatggtaatcaaaatatttaacaaatgtatactatacctgtactttttattaatgcattaaataaataataaaatctagcaggtctaatgaataattttgaaataataataataattgtatcttgagatatctacaaatatagtaatgtgataggaaaatgtttgtgattttgataagtgaaaaagtcaccaaaatacttgtaataacactgtggttttttgcatatgttcacaatggaaagaaatcctaaatcttacttcgaagttagcaagaattacaatatttttcccaccccaattcatggccctctactttatggtcttatttcataggctttctgacatgttttgcttcaaagaggtcctattccccatcccatttcctatcttctggtttgggattacactcaagatgtgatatacagatagattagtttattagaaagaaaatatttttccacatggcgaactttagtggaggctaacaaatcagaatgtgctaaaatagccatgtgtacatatagacaatgggaagcttggaactgctttagcattttatacaaaagacttaaaagtaatttcagctgggcactgtggctcgggcctgtaatcccagcactttgggaggctaaagtgagaggattgcttgaggccaggagttcaagaccagcctgggcaacatagtgagaccctccccccatctgtacaaaaaaattacaaaattaaccaggcattgtggctcgcacctgtggtaccagctacttggaaggctgagacaggaggatggcttgagcctgggaggttgaggctttaatgagccatgatcatgccactgcactccagcttgggcaacagagtgagaccctgtttccaaaaacaacaaaaactggtttcaaatatattgctacattggaattctccataaaggaattaattgttgataacaatgccctcagtatactatttgtcaatacctataacaatgcaacaaacaaaaaagaaaatttaaatagctggaccacattaaaagttttattgggctaaaatcaaaaacatctgacaagtttttgacttgtctttctcatgatttaatgtcccagcagagcaactgggaacctaattctgaccaaaaaggaggaattgtttggctaattggaagtgacagaaaccttgggagaaagcaaccgcataccaaggataattataagaaggtaacatgggccctaaaggatagtgtcaagaaacctgaaacccccaaatgaggtgagacttgcaaaaaatgctaaggaaggacaaaaaacaggccttttaaaattctgttcagaaccagaagatgatcaagaaagggaaatgcccactagcagcttctactgtaaggttagagctgacagagaaagaactccttaactactatttgcttcattctctacaaaggaaactagagaagtgggttgatgtaatagaaagaacatgtgtttgtggggccaggcaaacctgggtttaattctgtttcaacactgcttaacaaaatttatgggaggctattgttttggattgggctcctgcaccaggcccctccggaccaaaccaaaatggagtcactcatactaaaactccaggtcactgaaccaaaactaagttgtttatctgaccttccaagaaatcaggagggagaaaacaaccaaatctccaaacaggccagttttaatcagcgtgataaggaagtcctctcttttttaaccctataaagaaagtaactttttgaaatgatcaatacactttgtattccttagttctgctttctttagcccctttctgcctataaagcccacttcctctgctcaacttactgaagcagtattccattttatagaatgagatgctgcccaattctggaatcactaataaaagccaattagatctttacatttgttgaaattttgtctttgacaacattactagttatattattctgggtatccttttccccatctgtaaaatggacatagcgatatccttcccatcagatttttctcattaatagaagtaatacattcaaaacactgagccaggctcacaccagtgagcaacttgttaatattactcagaagcatattatagatattgacagaaagcaatactgttcctaattaggggaagaaattctaagagagtacctaagagtttgaatttagattataacatttgctctgagtattttacattacagcctttggggggaaaagtacaaatgagatctgagaacagtggtactcatctttgaggaattatggaaaacgtaatagaacactaaacatgggaaaacatcggccttcaggttgaaaagtggaaatctcaatccctgaattttttttttttttttactaagtaacttttttgcccattggtgtcatttaaccaaaagaagaagaaattccaaaaaaaaaaaaaatcaactgaaacaaaagaatagactgaatttgccaaaagagtgcttaaatggagacctaagtcttcaaagctaaggtgatgagaaaagaacaggtcttaaatttcttcagagcttcaagaggcaaagcttgaaagaagaaaaaattttattcttaggtaagatgtaggggtagaatggtggcccctgcaaaaggtaagccttcctcctaatcctagaatcgtggatggtaccttatttggataaaaaggtctttgcagatgtaattaagaaccttgagatgaggagatcatcctggattatctggtggactgtaaagtcaatgacatgtattcatatatgacagaagagaagacatggagaagaggagggagtagttgtgaccgtggaggcagagaatggagtaatgtgatcataaatcaaggaatgctgacagccactaaagctggagaaggccaaggacagatattcaatcctcccgtagaagtacagccctgctaatgcattgattttggacttctggcctcagaactgtaagagaataaatttctattgttttaagccttcagtttgtggtagtttgttacagaaaccctgtaaagttaatacacagagttcaaagagaatccggtaatatctctaaaagactcgtgtattagtcaggattctccagagaagcaaagccaatagaatgatacatgttgttaaagcaaattaaaatggagaccatgcctgaagaatctctgtgcagagaaacccagttaggcctcataagttaaccttacttgatttgcaaacataatctaaaagttaactggagctatttccggtaaatgaatataacacaacttaagctcaatcagtcagaagcagctttataattatgtagctagggactttccaagaggatgaccaaagaaggaaatgatataactataaccaaataaatattttctttgctttcctgttcctcctataaaagcctccccactgctgagctgtgctcagcagagctccgaaacaacttctggtttagagttgcccgatttgtgaatcactgtttgctcaaataaactctttaaaattttattgtatctcaggttatcttttttagatagatagatgatatatgatagatagatagatagatagatagatagatagatagatagataatagatagatagatagattatttattatgggaattggctcaatcacagagacccaagatctgccgtctgcaaactggagaaccaggaaagccagtggtgtaatcaagttcaaagggctgagaaccaggagaatcaataacttaatacccaatgtaataaggcctgagaatgtggggtagggatgctagtataagtcctagagtctgactactgcagaaccaggagttctgatgtccaagggtaggagaagatggaggtcctaaatcaagaataaagcaaattcaccttttctttgccctttttgttctatttgggcaggcctccagtgaattggatgatgcccacccacactggtagagcagatctttagtcagtcttgattcaaatgctaatttcttcacagaggcacacagaaatactgttttatcatctatctggatagcccttaacacagccaagttgacacataaaattaaccatcacaattaggttttcctgggttggaaggaatgggagataatgaaacgggtgctggagggtagaggaggtctgagggacttcttggcgggactatgtgaaccagaatggaatgagcaaattacagaccccacagtctctgctctgacagagattgccagagtttgaaatagacctgatagggttactacaggttaccagaaccgggaagtcatgtggcagccaagctaatatccaaagatcacccaaagagtatttcatgtgatcaggaagagtctctgtttaattgacaactgcttcccacttcccatccccttcacgtgtagcaggagtcacagctgtctgtatgcaggtactttactcgaccctatccaaactattaataggaaaaagtactttctcagtagtctaagtagtcacaaaccctaagaaatacagaaaagattatggacatctacgggagtgccagtgatataaaatgataatccatatcacatggaaaccctcccacataaataatctttatttgactaggactttattcattcaactgagattctccaacacccctgataaccagccaggaccgtgctgatcctaggcaacaatctaaaaggaataattaaaggatgctctgggagcatctataagagaaagcagtaatcaatcgaatacagcacgggtttatctataataatttcagtctaatttaattttctttctgatagtgttactaggctagtcaaccaataaaatgcagtaggtaatatttttctgggcccatgaggtattactgacttttttttttttatcatatccttgtgagtaagttggaggggttggggaggctagatggtagtactgtcagggaaggacttagcatccaaagggtactgactcctagatggcagtcagcctctccagaggtttttagtatagaattacagtcctcggtcttctgtgtttcattgacttaaaagaaaacatagaatccatatttatcaaatttttacctgattcaaaatcaggaaggatagtattttttccaaactttggaacagcttgatgttgactctgggctaaattctgtatgggcataattagaatcaataaaattttgagagtctataacaatataggcagagtccaacaaactagtaggatttttaagtttattcactcatttagatgtcacaaatttctggaatatcaactctgtgtaaatgtctatgttaggctttagaatatgaataaggtatgttagactgcaggagtttaaaatctggtgaataaaacaaacttgtaaacacaaaatacaacaaatattaattgtaaggcattatttagcattatatttagtaaaaaaaactacagttaattgtatgatatgcacagggactggcatgtgtgaaacacctttagacatttaataagctggaaaaaataatatttaccataaacatatactactggtgcaaacataaaatagtaattttgtggaaagtaattatgtacaagccatactatttaatgcagcaatttccttctaagaatctactttaaaaataatctaaaatatattcatgttatatatatataaggaagttcataatcaaattatttataatggcaaaaaagtttaacatgaatgattaaaaagatagtatagccatatgatagtgtcataatcataaacagttatgtctctaaaaaacaggtgtctgaaatattatgtcacattctagaatagcatgttatagtcaactagaagtctgggaaaaaatgatttttttactgtaaaacctcttgaaagttttgaattttgtgccatgttgcgtgtaacacattcaaaaaataaacacaattttaaaataaaggattcaacttaaaattttaaaaatacacttacagatagtttttaatgatataaagaaatactcatgatatactaagtgaaaggcaaggacattacattatttcttgcagcagttatgaataattggaaaatgtattacctggctgtattactaggaatattttcttcagtattttgcaccctaagaaatctaggactggtttacataaaagcaagcagaatgatgaagaaactcaccttaagaacggttgaatgaaaatgtaaatgtttagcctggaatatatatatatatatgagatcatgatgactgtcttcaagcatctgacatcctgccatgtgaaaaagtgatcacgcttccactggaaggtctcagaggatggaactagacccattggcaggagctatagcaagccatttcaactcgatgtcaaaatacttgcagacttagtcacttgcttatatgtcatttcagttcaatgtcaggaaacacatccaaaaagaacagggcaaaaaatgagtggtttcccagtcacttgaaagattcaagcataaattatcacttccttgataggacattatggaagagattcaagcatcagaagtgtggtttttgggtgtgattccagctgtacgagaagccatttaatccccctggaacttagttctccataaaatggggacgtttgactaaagtacctctatctctttttgagtttgaaactcttttgattctgctttggagtaacaacatttttctctcttccagatttatatatcagctttttatcagttgaaataaaccaccctgggccgggtgcagtggctcacacctgtaatcccagcactttgggaggccgaggcaggtagatcatttgaggtcaggagttcaaggccagcctgaccaacatggtgaaaccgcatctctactaaaaaatacaaaaattagcccggtgttgtggcaggcgcttgcaatcccagctactcaggaggctgaggcacaagaattccttgaacctgggaggtggaggttgcagtgagtcgaaaccaagccactgccctccagtctgggcaacagattgagagtctgtctcgaaaaaaataaatacataaaataaataagccacactgtacttgtgaagattaactgagatgtttaaaacattatttgcaaaaatgcaagacatgatgtaagtgtaaagcattattatatatcaacataattgaccattagaaaaatgcaaattaacacctcaatgagatatatcaccagacacctgttagaatggttaaaataaaaagtactgatgatattaagtgctgataaaatgcagagtaactcgatctctcatacattgctgatgctaatgtaaaatgatatcaccactctagaaaacagtttggcagtttcttataaagttaaacatgcacttactatacaacccagtaatacacctactggatattcattctagggagatcaaaatttacacccaaaaacatgtacataaatgttcatatcagctttatttacaatagcccaaaaggaaacaatcagatgtcctccaattgataactggtataaccctatcacagaatcctactgagcaataaaaaggaaagcactgttgatacatacaacaacttgagtgcatttcaaggctgttatgctgactgaaataaaagctaatctcaaaaggttatgtattatgtgattctgtttatataacattctcaaattgcaaaatcacagcaatgaagaactgatcagtagtgccaggggttagggttgtggggagggtgtgatgatgaatgggcagcgtaagagaatttctttggagtgatggaatagttttatatcttgattatagtgatcattatattaaacaattgcatgtgataaaattctataggactgtatgccaaaaataacttaatatgtttatttttaaggtctggaaagcatggaaatttgtatcttcattcacttttgttttcatggactcttttcatgtttgaacttttcatggtatgagctgttttataatctataatatggaatgtttctcatacgaatgtttttcttattgaagaatgccatagaaataagggtgtgaggtatacttacttgacaggagaattttactccttttattttatttacttatttatttttaagacggagtcctgctgtgttgtccaggctggtcttgaacccctggactcaaacgatctttctccttggcctcccaaagttctgggattacaggtatgagctacagtgccctgagagtcctttttaaagtagtgaatgctcaaacatggaattaaatttaggcaaagctcacttttatttatacataaaacaacttcagccatgtacctcataacgatattttggccaatgtctgaccttatatacaatggttgtcctgtacgattataatgaagctgaaaattttctattgcctagtaacattgtagtaattgtaatgtagcacaacctatcacacgtgtttgtagtgatgctggtgtaaacaaaccgactgcattgccagtctagtataaaagtctagcacacacaattatccacagtatataatagttgataatgataataaacaactgtcactggcttatatatttgctatactatactttttatcattattttagagtatatttagagtatattaagcagccttaggcaggtctttcaggaggcattccagaagaaggcattgttatcataggaggtgacagctccctgtgtgttgttgcccctgaagaacttccagtgggacaagatatggtggtgaaagacagtgatattgatgatcttgaccctgtgtaggcttaggctcatgtgtttgtgtcttcattctttttttttttttgagatggggtctcgcactgttgcccaggctggagtgcagtggcgcgaccttggctcactgcaagctccgcctcctgggttgatgccattctcctgcctcagcctcccaagtagctgggactacaggtgcccaccactacgcctgactaattttttgtacttttagtagagacggggtttcaccatgttagccaggatggtcttgatctcctgacctcgtgatccgcccgcctcggcctccc

SEQ ID NO: 2280 - DNA, 892 bp, Homo sapiens
gagcaagtcgaggcaggaaagggccgccacggactgcccggcccgccgatcgtttttattatcgagattattattaaaagggggcggggaccccaggacgcgggggaggggctggatacgcaggtatttttattaaacagattattcctgaaataataatacgcgcaagatggctgaaggtggctgtgatgagagtgttggggttgggatttttttcttcctgttttttcttttttgatctgaggataaagctctgaggcgacagcggctgcggagaccctgcccgaagcgccctcccctcccttgagaagccgcgggcagacagacggacctcggaccgagcaacggggaggaggaaggcagaggcgggctggtgtctctggccggggactggaatttcatctgaatgactgcccctgcgcgcacgcagcgccccggagtcggcccgcccgcgccccgcagcccgcgcccggccagccagccgggggacgcctgcaccgtggcccggggaccgccggcctgcccctcccgccccgtccggatctagcagccctcggcgcggccgccctcgcctcctggccccgcagaccccgggctccggcccctgcgagggaggtgcggcgccgacgagccaggcaggagccgccgctgccgccgccgccggaagaagtgtgctgctcccaagctccgtctgccgcggggcgcgccccaatgtcagccgcggggacgagcgcaggccgcgggccgccactgccctagccgcgccgacggggaggcggcctcttatatggaatttggaccccggcgctcccctccaaggctggagtcccggccgcggccctggcgcagtccgccgcctcccgctaggcgctcgggaggaggaggagacgca

SEQ ID NO: 2281 - DNA, 1708 bp, Homo sapiens
ctcatccttatttaacatttactgaccacttattatgttccagacacttgagtgaaagaagtgttgtagaaaaaagcaaaaaccaggttcttgtcacatgaccaggaagagttaggcatgcagacactttgaagggtgaggaaaaatggaaattagtgggcaaaaagtaaaaggaaaaataattctccacaaagcaagagagagtcctgttagcagatttcctgcctcacagattgaatcccaggttcccacctaggaacaggagagcccaggctcctccccgctgcaatgggctagaacttcctgtggctccaccccatcctcccagtgcgcatgcttgtcggagattctcaggcgaccttccctcttatcttcctcttgcatttatcagaagtgctgaacccttgacgtgccttatcttatttgctcctcacaacaaatcttatgagatgcatcactaccagaagttgtccagaaagaactgtgaccgtatgttttaattaaataatttttcatccagtttttttctttgcatataaagaaacagaatcctgacatctgattgaattattggctctcctgatggttgcacgatggctgcagcagttccagatgtcccatcgagacacaaaaagatcccagatggaagatgccatctcctcctatgtgcctctttttaagagttacacaggagtgaggaggaccaccaaaccaaactaagactcggaggaaaaaaaaaaaagaaaaagaagaaaatgtctgctaggtagatgtggttttaaaatctgcccacaaattctctgatattcctcccacttcaaaaagttgaacaatgtcccctctgcccccaggtgccatgccactcaaacagccaatggaaaggcccacgtggcgagagctaaggcttcctgccaacaggcaagtgaggaagcccagtcagctgcctgcagtcctgacccatgaagagcctgactgaaagtgaatgagcaaccctgagctaggacaacccagcaaggcccatcctgaattcctgcccacaaaaactctgagacagtaaatgttcgttgttttaaaccacaaagttttgaagtaatagattaattaggtaaccaattgggactgcagtattccttcagggaacttgaatagtcattctgtatatggaaattgtacacatcttaaaattgctggactaaagtgagaagagactgtcttgagtcaactggataaagtggaaaaaaaattaatttggaaatcaatagaattctggccttggctttgtcactaagaaacacttataagtaatttcacttctcttgaaattatgatcattatctataacataaaggaactgagctaaatgttatctgatgcctctttaggctctcaaactccatagatttatgacatgcttgaaattcactttgtttcaccctaattcagagctttgtttcactagctctagaattagatgccttgggtttaaattgcaattcagtcacttatttaaataattgtacttggatgagtgatgttgccattttaagcctcagtttccccatagattcattgagaagatcaaataagatgatgcagataaagctcttagtttgtggggacacttagtaagtgcttaataaatacaggcagttgtgttatctatgttgtagcagcacattttgtaaaataaaacaaagttgaaatcaca

SEQ ID NO: 2282 - DNA, 3759 bp, Homo sapiens
gtagattctaagtgattttcatgttttaaattctcagacctcactaaaattggtaccattattttcatctgtattttacccttgagaaaaatatggctcaaagacatcacttacccagagtcacagagccagcaggcactgggactgagattccaacccaggtcgtccatgtctggggcctgggtggacacccatgacactatctgactctccagttgtggaaaacatatctgacgctggaagtagaaacagaagttagacaatggctaggctacactgaaactacactgaaatttaaattggacccgttaaagctcattgaccttactcatcttatttttctttcctgggcagagtgtggcggacgattgaaagcagaatcaaaaccaagagatctgtactcacatgctcagtttggtgataacaactacccaggacaggttgactgtgaatggctattagtatcagaacggggctctcgacttgaattatccttccagacatttgaagtggaggaagaagcagactgtggctatgactatgtggagctctttgatggtcttgattcaacagctgtggggcttggtcgattctgtggatccgggccaccagaagagatttattcaattggagattcagttttaattcatttccacactgatgacacaatcaacaagaagggatttcatataagatacaaaagcataagatatccagataccacacataccaaaaaataacaccaaaacctctgtcagaacacaaaggaatgtgcataatggagagaagacatattttttttaaaactgaagatattggcacaaatgttttatacaaagagtttgaacaaaaaatccctgtaagaccagaattatctttgtactaaaagagaagtttccagcaaaaccctcatcagcattacaaggatatttgaactccatgcttgatggtattaataaagctggtgaaagggcatcatatacttcaaggaagactctacaagcttttgttcacagcttgaaatagatgcctcacaattcagacagtttaattcaggaactgtgaccctgcagtgttctttttgacaatttgtcaagatttagggacataaaatgatcttgcaggtcgtaaactggaaaacagtattttggttgtcttaggataattgctgactttgtatcttggatacagtgtaaaccagatccatataaggtgaatgtgaaatgggagtcttctgagggtgatttgtactttccatgtgtatgtgtgtgtctggtgtttggaaactgggatatttcagcttcattatttccacttgcaggccagcttaacctctgaaacacaaatgatcttgagaccactttagtgtacttacatttagatgagtttgaaatctcaatggtgtctaattattgcagttaaattctagacatcagttctttaagtctcagaaaacgcccagtgaattggtaaacttagttcttttttttggaagtgctgccttttcacaccaaatccaagaagcctgtgatgtcttatgaaccttatgagaaaactccgaagaggtgtgagcaggattcttctgaatgactgtctggatggttcattactcaagttactgctgctgctattgtctttcctttgttgtcgatctgttattgttgtattattattgttgatgttgtcatggttaatctattttttaaaattgaaatgaagcagaagtaggccttgtgagaactgaaaggtctctttcatttttctcttcctgggattcattttttcaaaacacaatgctggaaaaaaaagatttgtttctgaaagacttcttatggtgctattccataaactttttttcaaacaagtttttgacctttgagccaacccacccgtagactacgaatgtctccctatggctggtagcatttgaagactaaagacttgtcaaatatatcaagagtatatcattgcaagggcagcacttgtcctgtggaacaactacttataatgccttagaattcctgcacatgatcaaacagatcctcctaaaacacaccttttgaaatgttgaacataatagtgtatgttaattaacagctctatgaagaaaatccatttccatgactgaagcattggatataaatatggtgtcctgctttttttgtagaaaatgtaatttgaggatgaattttctgctttaaaggcatgtgtgtttttaaaattaatgaatgtagatgtgtgattgtctgagtgagtgaaactacaagaggtaaaaaataatgggtggttgaaaagttaaaatgtatgtgccaagttctactagaattccatttgaaatagcaccttccttaggtttcatggacaaataatgggaacttctaattttgatcaatcccattaaaaaaaggctctttcctttagagaaactctattttgatgtcaatatagattactgtatgaagtagctttgtgtctgttacctgtccatgagcatacaacattgaatacaattgggtgtattctttcagttttacacaattaaagtatacacacagatgtagcttatctgtttttttcttaaattgttgccctgaaaaaatttcttgcatatgaattgtaaaatgtaaatacatttttataaccaatgttttgatcttattgaatgttactttgaaaatgtataactattgcctgcaatgtagatgagccttttagtagagctgatttattccagtaacttcttccatattttctcactaatctcccgttagccaaaatatgccagaaatgggaaagagaggagaaaaagtcattaacattaacacctatactgttctatactactcctacccgtgtgctaggaatgtgcactagctctttttaaattccatgctacactttgaggactgtcatcatgttctcgttttgtagttcagaaagtgaggctcaaagaatttatgtaaccttcccagagtcacagtgtaaagttagatgttgaaacccagtttatcttatacaaatgagcctctgcttgttctacaaaggtagtagaatcaatctcgacctatataaatagtagattttttatggtgaaactttcccacataaagtaaattttaggggtgaattagagtaaaacttacaggataagcattttgctctttttaagaacagcatgaaatttagaataccaatgatagctatctttaagaatcagaattagtactagaaatttaaaaaaccctatagtttggagttagtatgagccttttgtgaaaataaatatattaaattattttgcctgatgtggtaggggaaatgtattgctctatattaagaaatattctggatattctgattgacatcttattaggccatagtgagctatgctctgcacaactgagaaattaggtatttagaaggcatatagagatgttgtcataactaggtcttcaacgtgaaaattaatttttattgtatcatgtcaagtatcagtttaccacatattatttttatattaattcaacatttgccttaagtgtgttgttaaatgaaagtacagacagcttcattgttgtattgttaataattgttacttactgctccaggcattttattaaattaattttttaaattattttccaccctacatcagtatattggttgtgctttatatttgccaaagtcctaactgactatacatagaaaaaaaaaaaaacactgttctcacttgattttattaaattatttttaaaagtc

SEQ ID NO: 2283 - DNA, 11373 bp, Homo sapiens
cctggccgccgccgccgccgcctccggttcccgccttgctccacggcccgcgcttcggctcctgcttcccgggctgctgcgcggaggcagaatcctctcgtgctcatacaaaggtgccggggctcccgcgaggctggtacgcggagtctcgggaatccaagcccgggccgcggtcctggcaccgaagctaacccggaatccaggggcgagtctgagccgcggctggaggagccggtccagctgtgccggggggcggcggggtcgactgctcactgcaaagctacctccgtgcgaccctccccttcccgcctcttcccctccccccaccagcccgatctgggttcttgggcgcttattgttttaatgaaatttttggttgttgttgttttggtccttaaatgtgattttagctgcgagtaacgtgtcctcgctcctctcgcgctctctcggagggttttcagagaggtctcagtgcatccattttctcagatcctctcctttcggggcaaggatctggggccctgaatgagccttggagctcgaagaccgcggctcgggctctcggagggctctgcgcggtggccgaggaagctccggggtgacggcggtggttctcctgggctggacgacgtgaggggagcaagcggattttcccagcaagatctccatgtacagctacatctttagggccgctcgggttaatatatgtcgtcagaggctcctcacgccaatcccggggcggcaggggcggcgcctcgagctctcggcaataaaactttttgatgttcacgttgctaattgccgaggtcctcttccaggattggctacctcctcataaccataagataattaaaacgggggggggcagggttaaaaaaactttttttatcagtcagaggataatgcaagtgtttaacagatgcttcactattaaaatattttcccccaatattgaagaatctctaaccagggacaccagtccctacgaagaccttgggcgattttgaagtgcgggcacctcgattccccgaatctgtagtgtggctggtatcggtgttcccctggtttaactagcctgtttggtaagtaactgaatattttttacggcgtgttcagagcttattttccagtttttatgaacaaacatataaatatatctctgcattcctgcctccctcataaaagcgggcatctgtggaaagcaggtttagttatcggaggggaaccattaaacgccagtttaagaggcaggccgggaggacggctcgtggatgttgagactgctggccttggtgatcttgaacgcattataacggaaaatggatctccacttgtaagtcaccgggccgcggggcacccgggccgcagcgcccgtgtggcatgagcttcttgagaaggctcacgtgcggcgagggcgggtggtaaatggcaggagctgaaatcaccccaggcttggccccaagccgagaggggaggctgatgtgtatatgcagattccacccgaaggagttcggtgtggaaaacggtgtcaacaggagcccgcgggctgtaaattagagggaggcgagggcctgcggcgccagcgcgggacagggcggcctggggctcgccgctggtcaggccaggttagcccaagggagaccaaagactccaccttgagcatcgccctttggaggcgggcagagtccggccgcaggccacaaagcgatccccacccgaaggactccacaaggacagtcctttccttgctcaccgccgacaaagtggttggggcaggaaggcgaggtcagtgcgaatggagggcgcccaacttcggtgttgcagttgactctgtgctcgggctctgccctccactagccctagagtcttgggcagcaggattgagaaatatatatatttcaggtttgccgcggctgggcggtaggagacagggacttaaaagcccaggattagagtcggtgcagggcccattctttttctaggaaaggggttaacatccttgaacgtccccagacaagcgtcttaaagcattgaacctagaatagggattaactgaaactaggctcgttggtaagcgccaggggcttgcagttgagctcggaacaaaatagtgacctactgctctaaacccccaacttgcgtgggtctgcaattttttagcacaaggagagccttttaaagacctggttcttcaaggaaagaatgcaggtagtgtggttgggggttctgtttacattttcacccggaggcaaaccccgaatgtgtaaatactggtagttcaattctctgacatttgatacgtttttgaaaagtctgtttataaaaacacatttaggccttgggagcaggtagacaaagtaagattgcactggggctgggaacatataaaaattcagggaaattagttggttggctgctttaagacccaaagggagttttgggaattgaagggaggaagaagagtccagaggagggctgagttagggattgagatgctctgtccaccagagaccagcggtgagtggcctcacttttgaaagcttcagaacttgccacatttagcttttctcatgcttttaattgaaacaaacaaacaaacaaaaatgaatgaattacctcgtggctccagatagcattgcaagtggtaaaggaaatggacaacatggtacagaaaaaagaaatcataaaagatgctaatctgaacatcagttctcactcacagtgtcattatcagttaactgctgtggtccaagggcctaagacttgatgtggctcagaaacccaaatccagaggtcactgccttagaaagctggcttgatgagaggggacaaatggatgaaccctagtggtgtccccaactgtagtaactgactcagggaggccaggctggccctgactggttgagctctaccctaaatgcacaaacgcatccacttttctcttgcagtgtcctttggcctgttttgttccaggttttccaggatactgggttagcctgctcctttgggaagttgtgaagcaaggatgccatctcaagtttgccctcaatttaggtgtcctgggcatcctggtggtagtgatggaggtgttggcagtggtggcaatgaaggagagggtggtgttggtgatgagagggaaagtgggagaagaaagggagaaaggcacagtccctgacatcgatgtcagcatggggaccccactcctgggctgcactagtgtagctgctgatgcacatgttgtaagtactcaaaggcccagggaactggcttgctgggggctcctctgggtgcctgtggaggaatcttagctaggagtgcttctctgcctctcctcagaggctgagggctgagccaaaaccggccttactcgtgtccagaaactgcttcacaaggaggcagcccaggtttgggtgagtgtttgggattctgtacctttgttgtagctgatggtgtacctactgtactgcacatgtcaactgccttcagccaaatagacagaatctggttcaagcatttattttgctcctcatgtctcttgtctctttgccgtcactgctacttctttctctggaaaaagacggaaagagcagcagagaggctgaacatggccatgcaaacattttggtcttgtgagatattattatacttgaaaaaatcaatctggtttaaactaattttaaaaaaatctttagttaggttttagggaaaatacagattgtctcagggtgtttattatttcaaaggcaagggcagtttatatcctctgttttgctcataagaacccaaaataaactggacccaaaaagaatcaggccagagggtcataaatgcacattttatgttcatgggaattatggctcaattctcatcatcgtctttcaaatcttgtttcaccttgtttttctaaccaacatagtggaagtgactctgaccgttcccttaagaatctttaatgctcttacatgagatgagcctcagaacaagctaagaaccatcgaaagaacatcaagcctggaaggtgacagaaggagcaatgtgttcttgaagatgtcacctcagcccacctgctccaaggacagtgcttcttgcgacactctgatagctctgcattcttttctgtaccagggtagggtggagtcattttacatgctatccacttagtcccaggatgtttaggatgctcagaacaaggcatattgtctgagtggtggcaagggtctccctctaactggggttgtgtagtccttcctgtttgtgtagttcttcttgtatagtcttttcttgttggcctttgagaagtagttgtctacagacataccaagtgaaagtggctccagaagtgtcgtgctgctcaaagtacacatctgcaaagcagaatcaaattttgttggatttgagtgtctatttcaaaaaaggaagaataagaaaagctgcccttgtgtcttgtgaggtttttttttttcttcttcttcttttaagcaagttttttcctcttcttttaagcaagtttttggttaagggggtggcatatttaggggttggatcctcttcctttctcttccctacatggagagatggagggggaggggctagttcagctgaatgatgacagtggaggggctgattgcttatgaatccttcagtccagctctaattagaaaacagttaagttggtggagaaaatcagggcttgcttagtgcctgcacattccctcctcctctttctcctctccctctttcccttctttcttccttccacccccctccctccctctctctcttcttctctccagttctcccttgtaatttgccgtctagcagcatttgggattacaaggttttttttcttttcttttctttttttccctatcactgaatctgcaactggcatggaagaatgagatactgattcatgctgaagtcttttaagaaaaatcttaatatccacagtcagtagaattttcctttctttctaaataatcaatgactagatcctcatgttaactggtagatatgttgctgcactggagggttttcattgataaggaagaactaaatatttttccaggtgtctaagtgtgtctgtaaatctaaaatcctcattcagactaaagggaccataagataaccccgtgaaggcctcaaagaagcagcatgatgtagatacatgggacgtattattaacgttattatactagtcctaagaggtacagtaaatctgatctttgttaatctttgctactttgtagtaaaatatagagtttagagcaaaaccggtctgagaacctacatcccataggatttatgttaaatactcattcaaattattgcttcaagcaaattacatacacactagcgacattttctttcaagccgggaggaaatcactcaacattcagatgaggaagtgtgatttttcatacgtgttctacggaaatagtaaataatggacttcacctagtctgcagtgtattatggggttcagaataaaatatgagttcaactggcaatttcaaatgcggctttggagagaaaacatttatttgactgaaagatttgcttctgacttgaggcccaggaacattcccagttttaactgtagtgttgcattcctgggaagttctgttccatagcttcctttgcaaattcatgtagatggatttctttagctctgacagtttcctccaaacctttcctacattcttccagggcctttgcttatagacaggggagttacaccaggatggttaggtttcaggttaacaaaaagaaacacttttattgtcaatattaatggcaaacctcgatttttacaaggcttgggtttagcagtgtgagcagatcaaaagcagcttggtttgatttctcaatattctctggagcttagacaattaactgcaattttgctcctaacaaaacaacacaaaaaagttagttacagaaatgttataggtaatcttttggcagagatttttacctgagtacaacatatcagaatctagaaaatttatctactgaacttgagttgagttttgcaggaaaaccccttaagaaaatcttgtgtgaactacgtcctcggttgcaatgccatgagcctgtttcagtgtgtgcattccaggcttgcctttctagctgggtaaggatccggcagactgaggtctccttggtaatttgggtacaccaagtctccagttaatgatagataatcagcctttgggtcattcggtcattctcttattacaaacccctcctgctctctctgatctcctttcaaactaaatttcacacaaacaaataaagcaagacagggacaagttcttaaaaaaagagagagaaatattagaaacgcctgatacagaactctaaacaaggaaaggcaagctaaaagaggataggaaagaacatcttatcaaaatgaacatgttgtgtacaaaacattaaaagaaaaggctctggtttttgttaaagtgacagaaaattaaaataaaaataattgcaggcaccaaagttataaacagggaaggcaggatgctagctggaaatgcgcagcactagggagctaatttgttgttacagattatatatctgcaccctgcttggagaagtgctactttgttccattttccagaagagaatggtttttcttcttaatacttgtgtgaatgcccacttaagttaacacaggccacaactttgaggaatgagaaatggaattgcattctgcttgcgaagcatccaacttcaaacgaagaaattggttgtgtacaaaaaaaaaagtagaatttcattcagaatacgtttggagacttcactaaattggtgtgactgatgcttttttgttttgctgacagaaggcacagatcattcatggggatgtataaccgaaaccagtcctctccaccgcctggggatcttcactttcgcagtctacgactgcctgtgactccagaaagacaaactgcagattggccaagctgcctgaagacccagcccgacagcgatgcctgtcagcccgcgtcgcccaccagggcagctgctctcccaactcgcatggggggcaccaccccgcctcggtgccctagagctgagcgcagccgcggctccacggggatcgccagggcctcagccctcgcggccggcggcgcgggagtgttgcggggcagggaccagagcgcgatcagagcggccacccccgatttaggtcgccagctttccagtcactgcgatggccactggggcgccccttccatcctggttaaattctcattgtgatccccagccctcttctcggttccccacacccaggaggccggttctccgccgctcaggctgggagaggtcaccgctccgggcagggtggacccccagctccgtctcggaggacctttcgccggaggcgagcaggaaggggttaaccatgagcctcccaccctcacctcccagaccctggtgccgggctaaggcctccgcttccctcctgaggtctcattaggaaaccctcaccgctattttcaacatttcctcaatcaagtgcctttaaatagagctgcacaaacagattggcggcaaaagcgtagatcttgtcacgattgagaccaatccagtatttcagccttgtttgctttgcaattacgggttggcttgtggctacggtgccaccggggcaaatctgcagccgctcgctttctcctctgcgctccgggcgggtggaggaagcgacccgcggagtcactgcagggaggagagggggacgcgcgcggggggaggcggcggagggcggaggagactcgcttgcaccccagggccgcgggcacgcagagctgtgttgaaggacatacttttcaggttcctgacagtcactgagctatacgcaataataaagtgcgtgattcgcgtgtggaaaccagtgtcgtgtccttaccagcttccttttctgtccaccttccctctctcttctacctccgtttcgcttttcttcagtgcatgttagcggtttgctggatttcccttctccctcgctgttcaactgctagcatgatttgttacattttccacagctgtttattcttgtttgactttttgtacaaagtcactttaaatctgctgcagaaagaataaagcacctagccctttggatggactcctgcaggcgtgtggctgtccctggcccacttttaattctttggagatggctcttctgtgtaaatcagctgctgggtgcgttcggtcacctcgtaggccagcctagtttgtatcagcagaacagtagtggactcgactcaggtcgtaagccttatatttcacagacaattaaatcttggctgctgttgaacaaaactgtaatatttactttgttctataccgagaagcacttttaaagtaaaaaagaaaaaaaaaccaaatactacacttcaaaaagaaaatatgacaatgaatctctttttatggattctctctgcataagtggaaacaatatgatttaaatccccaacaccccatcccccttttcagacacagctgaagtgatacagatactgtcttctaacacataatctccctctctcgggagaggcacctgcctgtgctacattcgatttagtttgtaaggtttcaggcccctccccgacccatgtaatatgtaacaaggattatcaaataataaggtcttggatgtgaagtctgctttacacaagaattcaagaaagataggcaggacttgagtaattatgttacaacttcatattactttccaaatgaatacccattttcttctcatgtcaacttctagagatgggatgctgaggcagagaaatatttttatgagactctggagtacatactaaaatgtgcttccttattatttaagaatgtgtaaggtatggacctacatttgtttgctggtggtcataaaataaattcatagccattgtggccaataagcaatctccttcacgctttaaaagtttttggtttataatcccacctggattgtattttcactattctgtatcaccctcctattgcaatattttggttctcaatcttatgtaaagcaaacctcagaaatgatcgtttccataaaattgtgcaatggcaaagccacagaataatattttgagtccatatagccgtgcatgctcatctatatagctcttatacagttttctagctgattgctttggtatttcaagaaataggaagcagtagctacctattttaatgaaagggtaccatttcataagaattctattttcactgaaaaaattggtctggcacattattcaatgcaaaagattataatattactttcacgtgtgttaatctgtttagtataaaactgctagggtgtcttaaccattaacgcgttttgccacactactttcaaatggtgatctgagataattacgaagattttgatgttaatcccacgttaaatgaacaactatgaaaataatcttaaagcattattactcccatatacatgccagcaaacccaattgtggagagaacatgattactttttatctgacattatcctataaggatatggctacatttatttcttttaaaattggagcagttttcaattactttttaacagaattgttttcaacacagcattttgcagtgcccataaaccatagcaactttgtcctgatcgatacatatttttctgcattattattcattagcctctttgcaaactcactaaaatagaatagtattaaagtatgaatatatagagaacaattattaggttctacatatttatttaggtaaaccaatgttattaaaattaaaaacatgtgcctggcatataagtgcttcttcaggaattcttttttggatgcatagttattattttttaaacaaactcagattttcaaacactgattttcttctctgaacgggcattgcattgttttaaacagtagctcctggaataatgccacctttagtattttagactttcaaacaacaattggaattggataaatgctttcagctgggagcactttcctaatacctttgtaggtaatgggattctctatttgtgctgggtgacaaacggacagtgccctggacagactgcctaccctctgcagaatctaccaaaaagtagagttttcccatgagactgcttgtggtccatctaaaaatgaaaaaataatcagagaaaatgcgcaaagccttttctaactacagttatgaaatgatggcttaaagaggtatttagaaaataagagtggagtaatacagaaacaaaatctgaagaagaaagtttgcttaggagctgatgctctttgtctacaaacaagagggtaaggagctggatccaattgaattgaattgtttttgtttgcttgtttgttttcttccattcagtgcctttcaaactgttttttactggatgaagaaactcaaccaagaaaatatatgtcgattcttgtatatgggacaatattagctgctgtgatttttaatactagcataaaatataagaatctttttattactgtgatattgttttttcctaaatgaatgcatagtgtaacaattggtgtcaaaaagcattgaatttttttcagatggattaagctggaataataaagtatatctatgagatgatttctgtaaactctgacttgctgagaaaaaagtgaaaaagctttttctggaagaaacatggcaacttaaccgttattaatctggactaaataaaacaggaaactgcttctttacatttctagtaattttttctgcttttccaaacattgttaagttctatgcaacttgtgctattcaagtaaagatgatgtcagtaataaaattacagaatctaatcaagtgactatttttgctttattacaaaatttatgtatttaattgggatgtttaattgcttagtttttagaacactgaatttttctttttccagacaacagagtgatatttaatgaagtgcttataaagataaatacgatggttcatcaaagataaaatagtcataataacaagatggcatttgagtcaatgtggagtggactctgctttgtaaattatactgctttttaaaagcatgacctaggtatttacaatggggacatctgagaagagaaactcaagagtcctcaacttacacagccaagaatacacaatcatgtaggagaacttgccctcagaagcatttctctattgacattgccatttcttttcctccatctagtacttccatttgctctatttcactaaaaagtcacagaattaagagtggctgctgcaactcactgggctttctctgcttaaaaaaccttaatatcacatggtattaatacagctacattaataattgaaagattcactcagctgacc

SEQ ID NO: 2284 - DNA, 19996 bp, Homo sapiens
tgtgtttgtgtctgtgtgtgtgtgcacatgtgtgtacaggttcactctctaccactgctttcccctttgctgacctggactggcctgctggatttcccaccaggagctctctaatgcagtgtcgactgctattctcaatgaggcccagcactgtcctggtgaaactggaaagagaaagtacgacaggtgctgtgttttttgtatgggggttgtaggatcagagaagtttagagttggtgggacactcaaggatggatagaaaacttctgtttgggtctctgcagtgatggagcaatgtggattttaacaaccagagtagcagctctcatctcatgagcacctgtatcgtgtcagtctctgagttaggttctttaaaagacagagttttgttaatcctcacaattttgtggtattgttaaatcagagtacagatgataaatggaagctcagagtggttaagcgctttacctggtgtcacacagctagcaagcggtggagcgaggatcttgactaatactgcagcttttcccacttccatggcacgctgcctccttctagcattcagtgaggaaagctctcaccgctgggagttgttcactctagactgagcgcctttcttagagaagggatttcttggagaaagattgcagagtcttctctaatgattacaagaaggacagagtcctggtggacacagttggagggtcttgtctggaggcagtggaatgagccaggtggcctcttggagctttttcaggagggaaatctgtaagggagaggagatgggactctaccttcgatcacttggaaggcggttggctgaggccagagagtatctttccataccttcccaggagccaccccaaactcctcaggcctttgtttctgaggttctctcagaaccactccaggcagagcccacaacacatcctgatgttatgggatgaatggggacatggggcagggcagcagcctggaagcaagtgaggttaaagaccgccttagcgagttttcccttccaccagacttcccctggctccccctggctttgttcatcttgaactcccttcacctcttctactgtttcatccctttccttcagtccaccctggatctcatcctttaaagccgaatcctctttcctgaagaggaaagaaggaaatcctgactccttagatcactatcgtgtgagatgaaagttgctcttctaatttgtcccattttcttcaactcttcttcccctctgtccctgctccacactcaccactggcaaccactgagtctgagaccctcccgcacactttctctgcgtgtcttcggatgctgtatttacttaagctgaatacagggtctaaagggtggcagtgtcacattagggcccatcgagggagcagagggcctttgtcagagtctgcaggttgtggggatggtgactggcctggagtcggggtgaagcaatgggaactgtagaagaaaggggaaggagagcagggcagcgtggatgctggacctgtctcctcttcagccttttggactctgtgttccctctcctgggaagccatacagccttggccgcttcaagatggtgcctccttgggcagcacctactctggagtcggtctgcatagttaaatggttggaaaaaagactggagagccaatcagggatgctcacttgcagttcgtgtgaatcctgcctgacccacgtttagagacaccatagaattgtatagaaccttaggtatcaaactgggtttttcagatcccactttcctggtgagaatattcttctgttgatgtgctaggaaatgtttaatccaggtgagaaacaccagactggtagtgtttgcgatttctgtggtgtagatactcccaccatggctaattccaagctgctggtgtggtcactgaaggcggagttgagaaaaggtgtacacagtggtgcaagccagctccagggcaccgtggcttctgaacgcaagtgtggaagcgctaggagtcctagttgctaggctctagagtggaagttgaatccttggtggggctgccagtaaggtggggaggtcattttctcaccaaatcaaaacacaaaaccctggctgtgtcgtctttcttattctcatgcctggttcttgattgtggctagcaccatggctatttcaggatcccactcatactgctgccattggttgaatgcttacatccattatctcatttagtcatgacagtaatcccatgacatagggactggtattatctccattttgcaggtgaggaaactgaggcacagagtgggtcagtaatttgcacagggttctacagcctttgagtggtagaactggaatttgaaatcatgactgtctgatcccagatcccaaatccttgcccagtatattatactcgcagttttgtagcttttcacagacatttccaaattctgagtctactctcaatgcagggtcttctagcataacctttgttcctgttggcaacacttcattttggactgtcaagatgcatttcctgagatgtgagatgtcatgaccctgtgtttggtaagtttggctgcaaggtactggctgtcctctaagacacttcctgagtcccaagtccacagattttactgaggactgaaatggctgcattcttcatagacactgagtttgcctgttccaaaaatggtgatttctatagcaaccatttattctagcagatgtgtgcctggtatggttggcagagagggtgggaccaaaaatggaaacggccttttattcttcacttcctgaatgcacgccctgtatgtgaggcatataggaggaaaaacatggcatccttagaatctgtaatagatctatggctcaggaaagaaatacgtgttgcttcagactgctttttatctggagcttgagttgggctgtgtttggtttgtggcgtgttctttggcagatgtacctgttggtttcaattcaatggatgtttgtcatttggtctctgcagaatatgcacatttactgtgggggtaggtggctaataaacagagagaagacactggcttggctcttaaagatcacgacgtctatgtaaatgtgtattacatagggctttttttggtggaaagtaaaataaccaatttatgccagcctaagttaaacaagaggatttaatatcataataaaggaaggttttatggagcccagggacaggagcatggccccatctttgaaaggcaagtgagcggaactaagaatgaactgttagaaacttaggtggaattctctctctctttctcatgcttgtttagtctttgcacgtatttccattttcacctctctgcagaccacagagtcgaaaaatgaccaccccaggactcccaggcttacatgtgaccaggcttgattcagctttccctgtgtgtatcccaaattctagaaagagacacagtctgtctgatgcagcttggatagttatccactcttggccaatcactcaccgaaggctttgtggtgagtgttatttatctaagtctgctcaggctgtcataacaagatactacagactgggtggctcaaacaacagaaatttatttctcacagttctggaggctggaaaatccaagattaaagtggtagcagatttggtgtctggggagggctctttttctagcttgttgatggcctccttctcgccgagtcctcccagggtggagaaagagacagtgagctggtgtctcttcttacaaggacactattctgtcagatcagagacccacccttaggaccgcatttaaccttaattacttccttacgggttctgtctccaaataacagtcacattcgagatcagcgcttcaacatattaattgtagaggggcacaattcagtccatagtagtcatgtaggataacatggctgctgggatccactcttgggccttgggaatagaatggatctcattggctcccccagaaggagaccagtgcagatgaaaaggctgaataccctgccaagacaatgtcctgtgccagattagaatctaaacctcattgtcgaactcaaacacattgcacttggggtgaatagtcctgctgtgcgtgtgtgtatccatatgtctgtctgtgtgtatgtaattagagaggactttctggaaaaggaatgtttgagggtggccttgggttcctgttggctgtgaacacactcctaatgagctgccctgtgtctcagtttacacatggtatttgaaattgagtctaaattcccatttcttgtactttctgaggagcagtcaagaaagagccagatttacagtttgccagtctcttagctctatgttccaaaggaattaagtcactcttcttgacagtggccttaaaatagggttttaataaaatgaaaagaggagcagtggagccacccacccctgtcacctgtggctaaatggatatacgggcgccaggctgctacgggagccttttgtggtgtcacctccagtgccagtgggatacgtgccgcaacagagaccagatgatgaatatatttttaaacttggaacccatgaaccacttattatttctgaattaggaatcaaaacatatgaataatttcaacagggtttcagcagatgtattctgcttttaaggtcactctgctttgcggagatggtcgggggtaatggggagtgaagtccagcctgattctctttgtgactcttaggacatctgtgtcatgtttgctcaatttagcagtcaccgtaagtgtgatgcgaggccctcattgcggggtcagggtaacttatggaagcaaacagccttctttattttttaatacatcactgtcacctgcgcttatgccaggggttattagaagaagaggggctctgggtggccatgtgttcatggctatgatgactgaaaaggccacagcatgcaacagagtcctcagatttacccccaaatgcttctcccaccctctattctctcttagcatctctccctgaacctctttcgccaaccccctaccaaacaaggtccagaattgaggtgttctggaattccagccttgctaagctctgggattaaggccagtcatttggaaaggggatgggggaagaggcaaaaacaaaacaaaaaaaaaaaccaaaaaaaaaaaaaaacaaaaacaaaacaaaaaaaaccaactgaacattaaccctttgggtccatagcactgagaagacctcaccatttcggccactggcaaatcagcatctcttggccatatccctgaaacctgagcttcatgtaccagaaggagacagttaagccaagtcaggctgatgaaaatctctccgttctaatgactgtgcagggtacacctgttccagcctctcacttgctctcattgtcagttggacgcaggtattgaatgaccactgagtgtggagtgcagcacgagggtgctgtggaggaggagagttcatgagcaagaagagaagcagtctcttgacctcaggaagcttgcactgtgtttggggaggcatggtcatgctcactctcttgctctcccagcacaaagggagtgggctaaagggtgggagggaggcagatagttactgggcctgaccctcttctcggggtcagccacagatcccagatcctttaccttcctcatctgcctgttttcctttatagttctattggagttaaaaaaaaaatgacagcagtgtcagtaacacacactcattttaacaagagaggcagtacaaagatatctataaagaattaacagtattccttatttgctctccatttcagctctcctctagggaaatgaatgtgctttatttttatgaaataatttcaagcttacagaaaagtttcaagaataatacagagagcacccatatcaccttacccatttggagtttactgatttttaatagtttgccccactggtttccttcctgatctatgtaaccgtagagcagccttttgaggtaggagacaggtggtattatctttttgtgtgttagaggtgagaaagctgtggcccatggagttgaggagtgtgcccaaggttatctaactatccgacaacaggtttcccacacaaattccacatgatgtcattcttgttttcatttttgtctttccttgtaggacttttttttttttcatcgagcctgcagaaggggcctgtcttgccttcacaaggaggagatggttgcaggaaagtaggaggtgaaaggtgtcctccaagtctcctcccccagatcagtcggacctcctggcctcctttggttttccctctagggcagaagcggtgctggctggagggggtccaggtgctgtttgttgcaggagcgccatcttgctttagacctttttcgtttcagacagctagaggaggtcttttacggtcctacttgacccccataaaggaagttcactccacaatacgcatctcttttcacatgaagaggcaacagagggaacaaaaggagcaaagcagccttctcctgaagaggtgaaaatatcactgccttttggagccagatctgggtttgcacactccaactcttggagtgatgtgtccttatttgtaaaaggagagttctggagtacattgggaagcaagtcatcagtcatatccacagcctcctgctcctgttaaatgtgtcctcctagatggaaaggttggaacaagctgtgccccataggttctgccatttttaggatctttctggcactgagacttttgcttctgtgatctctcattggaatccatttcttttgcccaggcgtggataatgcttttgtctaatgccagctctgccccatctggtcttaaaacgaggtgaatctgctgctctgtattgaaatatgtgatctagaaggagccataaaataggaaccttaataactctttctctctgtttcattatccatgcagttttcctggcagctgtccattccggcctcattcccacctctgggacatgtcaagttattgaggtggtactggctgtgggtgactatagatctgggccagcctgttcaactgggtcttctggggttggtcctgggtagagctgggtggatgtagtctaaaacagagaaggtagtgaggcccttcacatccattttaaggaagctgagtattgttgttgagagtggccctggcattgtcttcatcaagaatggggttagggatccggctgcagtgacactggtgaggtgagaggttgaagggatggtcagacattactgtctcttgagcgaggttctgaaagtctattccttggagactttcacaaactggagggagaccctgtgtgtccttggctgaaactagaggcccaggtcacatgaccttgggagagaagccactcatggcctgaggacccagtgagctccttgacctacgaggggccatcctgatttctccacttcccagtcaactctagaatggagtctctgcctgacgaaattgtggttattttgaaatcagcttgtcatgttccttgattgttttgggtgtaatagtctcttctccgcagcaggttgtaagcatcttgaaggccaggaccttgtcctttcttctttcattggagcagaggttagggaatgctggcttctggacccagccttggaccccagggttagcactccctggctcttgcagttcccccttgccccccaactccactattcccctggatcacagagcttggtgacagcagtgtagccccttcatctcagcgtgatggtgggagggggtcgtatgcattttcaaagcctttcctgtgtgatgtgccctcctggtgcagcttctctcatgagaatccccagcctagacgtctcttctcttccattgcagatcaagggttctcaaagtgacctgctgagccacgtgcattggactcccatggtgtgcgtgtgaaaattcctcagcccacacggatgggccagaatcagaattcctggagtgggagcagaactctgtattaaataagccccctcagataattccaatgtacactaaagttagagaaccactgtaatggtctgatgtccctcacactccccaccccagtacacacacacacatgcatgcatacacacatacacactctgttaaatggctgcttctgctgttgctaagaatactttgcttttcaggtgcttgtggatgggtaggaggcagtgcctgattttgagctcttgactaggaattgcgtcaatagttagaggagggaaggatcagaaaggggacctcagaatggggttatttaggggctggggagtcagaagaactcagaaaggggcctactgcattgctggtgaagcctgaatcttccatccactgttagcacatggctatgcagactctgattcccatctgatgccatatgtgcttcctccacagtccgggagaggagctttgggtcatgtgattagccttttgccctggacagcgcacctaagctcagcacatgtcttgggatggagctgcagaatcttggtgccgtctcccccttggaaggctagagtcttggcactgagaggaagtccttcctccatccccagcctcctgactccattgctagcgactcccagcaagttaagaaagattcagtgggaagggtatagggctgggagttgtctggatctaagcctttcttgctcagtttgatagactttggaaaatctctgtctctctgggaactcagtctcgtctggtccctggctttagcacagtgtgtccaccattgcagccatgggcgagaagccactagagctatgtctcttccttaggagagcctgggggggatcccaaggtgttggtggtttggaagggcagtgaccctgcatgaccaggatccatttgcccaggcacctgctctctgccagcctgaacacccgggagcacctcccggatacgacagccacccactacttctgcatggccgtggccacatgggcacagtggggtgaagtgaagatctcagactctggagtcagacagtctggggtttgaatccgagctccaacacttctagctgtaggatcttaggcaaattgcttaaacatctgacctttagtttttttcacctgcgaaatggcgggtaaaaactgcgactagctcctagggtgtgttatgggatgcagtgaggtgaagccaataaaacccttattagcacctggcacacagtaagcacttcatgagggttagctgtgcttgttgttcctgggtgtgtttggaggagacttgtaatcttgtaaagtgaagttcaggtcctcagagacaagtggtgtctggctgtgggttctggccattgaaggcctgggtggtttagaagggttttaagttagtgccttccctagaggtgggcacacgtctgtcacctgcccctgatgtgctatttatcctgccaagccctggggcactgaagcagcccagaggcggctactgcaaacaccagggagagatagagtctccaagaccccaaatagagtttgcaggacctcttgagctctggagcaagaaggaaagggacagagacaggccccagtgtcagtggcgggttgggagggagcagagcacagctccccatgtgcgttcaggtgcccagaatctgtttggccactttcatctgggtctgcgtgggtgggggcgtgtggtagcccagaacccacttggcaccaggtacaattttgtcttcagctccagtggctacttttctctcctttgcttcactttgaaaatagtcagcaaaatccttatttccataagcatttttctggctgtaaaaagctgaatcccaaacctgttattatagctgttcatgctattttaatctgctctgtttagaggtgagagggtagcagtgactctgcaattactgagtacatttgatccgtggcgcagccaccggagccggcagagaacccttggagtaggatggtgtcgtgtgtggcaaatcactttcaaatttactaaaacgatgcccctttgcagccatgcagatatcataattttcctccccaaggcttgttgaaatgcccatttgcttcctgccttacgcaggctcccagcacgcgccccttggcccacctgcctattccctttcattctttgtcttggccagattctgtctggtctctcttgccctccgcccctttttcttcttcctccctcttcatttcctgctcagaaatattttatattctactgactggcatgcttgtgaaaccattttccatttgccatggtcagaagaaaaatagttagcattttaaatctaccaactatttcacatttaaacaagctggcaagccgcaatgacgctgcgcctcctacatacagtaattgttgcatccctaggctcccttttctatctctgttcctatttcattcatttttctatttgcagccagcacagaatatgggcttctcccccctccttctctcctgcggcccgctttctatccagtgaccttggcttctctgagtgccgcaccgtaaatgaaatgtggcattgccacatgtatcttgataaaatatatcagtggatgaattgattttcatattgatttccttggacgagcaaggtgtgtgtggaaatcaagtgtctcttaatgatagtcctagagagagacaggatgcccagggaggagcaggctttgtttttctttcacttacgaaaagtttctgcttgttagcttgggagggaggcctgtttgctttgaaggcacactctctttctgggggtaaacagcaaatgtcccaagggtgtgtcctgatccctgagaagactgcatcatccaggtgaccgcctagagccttagggaatgtatccctctggactccgccagctgcattgtctttggagagagctgaaaaactctcaaggcatgttggaggcccttgtgcaccctgcagggtggagggtcttggctggagagtggccttctccctggccacttccactttcatatttcaggttagttgagacgtggcacttgtgaatctaggactgatgctgtgccccaagggcatgactgtgtataattcataagtgtcagcatcgatggctggctgtgtatgggcatgtgtgcttgcgagcacacgcatctacaaatatgtatgagctttgtatatgggttggctatgaatgtgggtaggcagcagtccctaggcttgcagtggcttttattagcgagctctggacaaccaaaaagacagcatccagtgaggtgatcaaaacttcatttcatctcctctgcagttgctttcccaattcactctcccaactgctcctaaataaaatagatgctttcagctgagagttgaatttctttatgaggctaagtaagcgtggcttaaggtgatactgtgcatgtgtgtgtatgcgcatgtaaagaaaatgaaacagttaactggaatattcaggatagagcgatgataattcattacattttctggctaactgaggcttaactggaaaatccttttagttcaagcactgctgaaatgctttgcaaaacagactaggatattttcctgcttttgtaagtagaaggtagtgaggtaattgcatcctttgatgtttcatgatcttgcagcacacgagggccggtattttggttatcatttgtgattgcacagtggcatacaggagatggagaactagcttggattcatgtttaccctttgatggtggttctcaatgggggacaatttcgtcctccagggcacatttggcagtgcctgagacatgtttgcttgtcacaacctaagaggttgtttactgatgtgtagtgggtagaggctggggctgtttctgaatttcctatcgtgaacaggacagtctccttctcctgctcccccaccccactacaaagaattatttggtccaaaatgccaatagtgctgaggctgagaaaccctttcaaaatttttgtcccaaaatttttactaaattcttgcacataaaatcttttgttttctctgtttttttctttttaagggtcaggtgctggaaacgttctgaataattgaaacttcgaattcattgacgtttattgttccacagaacaaatagggaagcctgccagtttgcagataggcaggcctgtccccagatggccctccagtgaatgcccaaattcattcagttatttagggccattaaaaaccatgagggccacactagctttaagttgagctaggcagaataaacaatccgagaggggggacatagctccccccctttttttcattgcagttcaaactaaaatgctcagagacttccggtagcactttctaatgatgcagggtttattctgcttaccgcgggtcagagacaatctgacgatgacagacttagaactgctttcagaatgtgtaaacatgttcattggtttgaatggctctaagtgagtcttcggcagaatctgtctggttttggtatgatatatgtatcttggggaaaatggggagattttgcatgctctgtatctttgactttctttgagaaaatacttgggagtcaatgagttcacataccaaaaaagccttatgcagaatctaactgggtgtgtgtgaaagggggagcggcggaagttaggaagactgaaggacctcctttatgacagtaaaaaaaaaatcttttaaacttaatttcaaatgaaactttaatgtcaaatgttctggaactgtcacacatcattttgttaacctatacctattaggtataggtataggtctagaatgctgtacaagacgggttaaatgaagtctgtgtgtgtctggtgaatgcatatgagtagttagagatacaccattcaatacttgatttatttgtgcaggttacctatcatggtaacctctggcaggggctcattatttcatataaactaaaaaggaaaaaactatgcctgcaagactgattgattttctgaatcactcacaaagggcagccatgcagcccaaacacacttcatctctcaagttttattttagccttttgccttacaatgtctgtcagtagggacaatggtagcaccagaggcctgggggtagagtcggagggatgaagttccgctgccctctagctgtgtgaccttagacaagttgcttaccctccctgagcctccatcctgccccctcgcaagcttgttttcaggataaagggatgggaaagccctgtgtaaattgccaagagctgagtaaatataaagtgctctggatattgttccattgttaagcaacggcaataccatttataaaccaggttttgagtccatctcgagcattgttcatgagaggggccggagcctcccggcaggcactcctttaagagctgttatcacggattactccatctgctgcttgctagccgaaatgctaaatggagttgtgggtgtacctggggtctttcttgttacagtatagactctgagggggtctagatgtgtctcccctcctttctctgagatagaagtgtatttatagcctggtgtaagtacaatcagaaggttcctataaaactctgttattactgcagtacaaagttagaaatgcttgaggtttcggcttcttggctcttccatgcggcaatgaatattttatgggaaaggaaatacttagtgtctgactctttttatagtgcagctactcacagtgctggtaaccttccaaatctcgccaaaatcaaaattgctgcctgtccatctctctactcccttcttcacaaaattgactggtgtcctgcctcgctgaggtgtccagactctcttggtggacgggtccatttacaaaatgtggggggtgcagttttcaatcctagtgaatgccctaaaccagaggcgttggctcctccccagccctgccccacccctggcaccttgtggtgctggtcagccccagcagggcctgctggcagagtgcccactggatcttccattgaaggtctccatctgccttttctgccatgcccctttcctgcatgcccactagccgctgagtggaggtggcccaacctctccaaagttcactctgatcttggaattcaaaaagcaacaggtgagtttgaggtccaacaggcccctgaggggcttttaaattttaaggcttgagcttcggctgaagccctggcacagagcagtcatcgggctggtaagatttccctctcaggtcctcttcctgtggtccctttagtgaccccacgcataaggcaggaaaattgggcctcagtggtcttggccctggtttactagatcagggactttaagtagaggaaatgggtctcctggcaggtcagcatccatggaaattgctcccctggtggcccaagggcattgtggcacaggtgttccactgggttggccccatggtcctcagagacctattacgactatagcaggaccgcagactaggctgatggccagattacagtgtcaaagaacacctttctcaggcagctatccctcatggatctccttagaggcccccacaggctagtgaaatgttgacatctcccatggaggtgggctcagtggcctcgtctttttaccagtacccaaaaagcccagagtggagagcttggcaggtgtgaagtgtggctcctgagatgcacgggagcacagctggttgtgtctcaacactggatcgtgacagtttttcttagcatgggcagggctgtgaaaaatgcttaacataatctgaatgtgggctccacacttaatttagtaggactctgcgagctcaccagcatcattgcatttgccttctgctctgcccctggtgtttgtcttggcgccaaagtaggtaaagggaaaaaatgatttgcaaacctctggcagctttggtttgatctcccaactctggttgcattgctgccaaacagagctgtattttcacatgacagcttcgtactgggccttttctttctttctttcttttttcttttgtactttttggtatccaaacttggtggtagcagaaggcaaggtggggaatagagagcttttggtatcacaggcttagaagctcatttgtctcttaagatgtgagggtaaggaaagggctagttattatttttgataaatgggaatggggtcagccaatggcttactggagaaactagatatagccctttatacttaggactgaccacacagttgaaattaattagcacagttgaagtaattagcacagttaaaatttagggttcctatgaccatgaagttgatgggtgggagataggtaaggctcgaagaactgaaaatcctcaaatgtgctaaaagcttcattattggtccttattcatattttaactcaccctcctcatctgtgaagtcattttttttaaacaatgaaaatggataaaagaaatggaaccagagagagaagcaagagagaaaaactttaattaagtgcctattgtatgatagacactgctgtgttcttttaaataaatacctttcagattaattccaaagctaagatttagcaattccctggttctgggattatttggccctaggatcagataagccaccagtattcactgagtcattcagactccagagttgcgccagatcccatggaagatgcaagaatgcatataggctgtagttccttctcttgggggttgagatcacacagctgtatacccatgtgtgcacacacagagacagatacagctagtggatcatgccggggggaactatacattccagtgctccagaaattcctggcatactgtgcctggggtattaggaaggtgacttgtgagtccctccgtgggacactccacctccttatggcagcttgtggctgccatgatgaaatgaaacacccactcctgaagatgtacaatttgtgagtgtggtagacaaaatagtgactccctaaagatgtcatcctagtctctgtaacccatgagtatgttagattacatggcaaaggaatgacttaaggctatttaccagctgagtttaagatagagaaattatgctgggttatccacctgggtccattgtaaccaacataacctcaacggtctttaaatgtggaagagggaggcagaagagtcagtgtcagtgtcagagtcagaggaggagtgagccatgggcccaggaatgagagcagcctctagacactgaacaaggtagggggacagtctctccttgaccctccagaagccacaaagccctgccagcaccttgattttagcctagcgagacccattttgaactccttccctacagaactataagatacatttgtgccattttaagccactcagtttatcgtaatttgttatggcaacaaaagggaactaatatagtgaggcagaagaaatctgagtggctcatccttgggcaaatgggagccagtgctgatccttttactgttctcgggtgctcttgcaacaggaagtgacttgcagaagtccttttttatctgaaatgccagggaggatggactcttattcagcctagcttctattcagctcaaaggaaagaacatctgcctttttcccacatcttctctgtacccctcacttccttcttgtgggggagattccttttcttcggtgagttccctttgcggtgtggaatctcgtggcaagggctctgagtaaaggaggagggttgcatggaatgccattgaattcattaggcttggactctagcaggaatgttgcctggggtgctgatgtccttctcaaccttcctttgctggagtccttcttgtaacttgtcttccttttgtgaacaacctgggtgtagtttttaaaataagcgaattctcctagaagtgttaaaaatgagccttcaagtactatctcggcattttgcaaaggttaaagcccccactgtttgggggctgagggtgctctatggggggccacccaaaagcaactgtggaaacagagtctggcttcagtctctccagatgttgtgcacataagggagggactcttgagctcatagatcacagatctgtccacaggctgtcagtaggaaagagcatcttattttacagatggggaaactgaggcctagagagcataagtggttcatgcaagatcttacagagagtttgtgagagtctgagagctgttccccctactattgcaacatttggaatgttctgaggttcttaccttctattatcagtttgagggctgtagatgagttgtggtagctacagagatgagctttccagtgtgcccccaccaagagatgaatgaaagtcatcatcgggcagatcactgcctactaaaaggggtgggtttttttggggggaggttttactcttcgtcacagaacttgagaatatttctactgaggatgactttgtctttggggcttccattttatttttaagattcaagtgtagttttaactgcagggcattagctcccttgtaggtcacctcgtgctgtctctggggtttatgactgagctctcattccttagtcacatgtcctatactcacacttcctatcccattttcctgcctcaccaagatcaccacaatgatcccaggttctatatagcatttcttttctggaggtctttaaaaatattctgggagatctgtctggaatgcttgagtacattcatttattcctgtatgcatagagggcccagggacctcccaggctctctgagccctctgattcttagagggttaaactattatggaaacagacattgcatctgtgtcttctcttgtttcctgcatgcagcagtgacctttggagtacattgttcaggagaccgacccttttctaccatttgaagtctgctattctcatctctctaccaaaagagaaactaaacttcattgtcgtgattaaggtcacagccaacagcagttaaagaagccgttggtcttcccactcataccgctgccctctccctagctctcaggaggaagagctctccaaaatggaagtgtcttgggaaagaaatggaagtggaaagagaaagatgaaaaggccaccaatggcacttcccgtgtctcagcctcaccagagaaggaacttggccacacactggttgggtataccaaagtgacacaatgtggatgttccagtggcaattaagtatttatatgactagacttgaggagttccaggccatgacacttccaaatccttccagcccgcttgtggagagaggcccggaggcttccagcgagacaattagagtgtgaattagattgtgtcttctggaagggagatgaagttacctgcctactctattacagtttatttcattaaggttgaccatgcccttttttttgggcagagggaataggatggattctctggagaaaacagtgtagcaaggcaatggagaaatgtccacactggagtaaggggctttctgggacctggatggagtctccttcctcccctagggaataggacagaggtgggaaaggtgctgcctgactgctctgtgcacatctgcatgttggtgatgagtgtggccagccccatgctgtgcatcggtgagaggaccgctcaggcaggtgttgctgtgctggcagcttcttaggaaggcaaggagcaaggcgtgggctgtggggcccttggggcagagcctgtcatggagtgggatgaaagggtgcacgggacctgttggcagccccagcggccaggctctgttcccaagctggagagagaggcaagtggtgagggagggcaggaggaccagtcatgggtttaatgcaaaatgacagttacgggggttgccattttagagtaaaacaggccatgtgactgaggagcaggtagcattcatattattcatatttcgagcttggtagatgtagaattttgcagtggaggccaggagaggatgtgagagctgcaggacagaggcataggtttttggaggtggttgtggtgttccccgatggcaatcaacttcacggagagaagaggttattttctacttaggttgcctggagcctacattccaaacttttagtcctcttcatctagcactaagttttgcatctcccttattcctgtcatacattattagtgtgcactgttttaaagtcttttacatacatatgtcttgcattccctacttaattgtaagctccttgaaggcattgcctgtgtattatgtttctttgaatctctctgtggtggctaatgctctgccctgcatttagtaggcaataagtttgtgttgagttttgagtcaactaccactcttttctcccttcctcttttttaatttttttttaaattattttttattttttatttgacacagagtcttgctcggttgcccaggctggagtgcagtggtgcgatctcggatcactgcaacctctgtctcccgagttcaagagattttcctgcctcagcctcctgagtagctgggattacaggcatgcaccaccatgcccagctaatttttgtatttttagtagagatggggtttcaccatgttggccaggctggtctcgaactcctgacctcaagtgatccacccgcttctgcctcccaaagcgctgggattacaggcgtgagccactgtgcctggcctactcccttcctcttacaaggctccttactcatttcctgcgtctcacctgctctctcagcccagttttctaaaaaaagaggtaagagatggatgccagtctctttctcctccagagtgattttgtgaggatttgtacaatgcaagtcttgagatgcaaatggacatctaggaacagaggaattgctggagcatggagaccacacttctgaagatggaaggagacccttctccaggctgtcgcttttgatttgcggttttcccattgccaattgctcacactgatccccagtcctgaaggggatgggggctgccgctaattccctggcatctcatgacttcctgttttcctccagttattatttttattgtacttccttcctgcttcttcactctccggcttcgccagtttgttccgtgtgatcatttcagc

SEQ ID NO: 2285 - DNA, 2228 bp, Homo sapiens
tttttttttacccttgagtcaattctcattgattatgaagagctggtatagcaagatgggaaagagagaggaccctggagctaggttggtgagatctaggctctttagaacttggattcggtcctcacagtagctctgggaggctgatcatgctattcccaacacacagatgtggaaatgggtgcagaaacacatgtgtgttcacatagccagcaagtggtttatctaagtgtcactgcaatgatctgtaggactccaaagcccatgcttccagctggaaaggcaggcaggggccttgcatgctgtgccagggttgggacttagtcctgtaggcagagagggtcaggcctgtattctagaaaggtagctcggtggctgtctggagttttgaagtgaagcaagtagaaattaggtgtagagaaactagttcattaaagtaatgtcttgagagatgagggcctgaacagaagacattaagacagtggcagtggttgcggagaagagggggcttgttggaatccatagagcttagtgcctttggatactagaattgcatcatcccttcccatttcaggtctgatgccccagggatgggtgttggagatgctgactatgtgcaggctaaaagcaatctctgcagaaaccaaaagtgcctcctttggtctctgctaacagctagagaaaggtggctgagcacagtccgaaagggccttcccttccctgtgccaccccagccttatcattcctaactttccaggagcatcgcagagaatgaagttggattcctcagactgcattttgggaaatgctagtcaaggttagaagtgtggaagggaagacgccttcctggggtattgtctgcacacccctcttccctggtggcacaggggacccaccagggtttggtcctcagttttggctattccataagagttgatctgccctagatggggttaacttgtggtcaccaaacttgcaggggttgactgggaagcaggagtggcagtgaacataatggccagccccaagaggagtcgaggccagcctcctctgacgggtgcagtctctgcggggcgccaagccatgctcagggaagcgggcatcagagcccaaggagatgattggctggggtctgcatgtcctgtcatcggtaggacgcactgttgccatgtcaggaatatactggttttgtgccctttcccctagtcagtgccagacgtggtcataaacttgcttttgggcttccgtttttccaaattgtgcaacatccctgcccttctgagagtttgtgctggctctggtcaggccggaggtcaggtggtcagattctggctttatttgggctgtgttctcgctgcgaggaggaagccaggttacctctgttggacctgcctgctcccagcatctccagcaacaagctgtctctgccggaggttccagccttggcaagaggagtgtggcccttcctggaatccctctggacacaccctcctagcatcctctaggaaagatgcggcagctcaaagggaagcccaagaaggagacctccaaggacaagaaggagcggaagcaagccatgcaggaggcccggcagcagatcactacagtggtgctgcccacgctggccgtggtcgtgctcttgatcgtggtgtttgtgtacgtggccacgcgccccaccatcaccgagtgagccccgcagccggctgcggaccccatcggcagggagaggaggcgcgggagggggacgcaaacaaaaaatggctttcatattcagagatgttcatgttgctgagctgtaagcaggagcaccctgtcttctctggtctttgacttgattaaagtatctccgctttcttgggagggaataggggatgttttatcagtgaatgtgccatacaccttatggtccacttcatgtgcctttcagacttcaaagcgcgcgcgcatgtgtgtgtgtgtgtgtgtgtgtgtgtgtgtgtgtgtgtgcttctttttctctcctaaaaatcgataagtagctccacctgaagagggatggaacctctgggtcaggaaacagctggaatccacactcacctcattcccattgtttggatcatgcttctttccaacacgtgttcacaatctccaaagggactgtatttcttctctgtgcttaatgtgatttgaaatatgttgaatcaaagtgaaatatttattttttgaataaaggagataatagccttaaa

SEQ ID NO: 2286 - DNA, 2894 bp, Homo sapiens
gtgaatatagatataaagatatagcagaaagatgcctacaaaggcaaaagcgcttggggcccataagagccataatcaggccctgaaagccactggcacattgtgggagcccaggcttcactgctgagcacctcctctgggccaggcactattctcagtggtagaatagaggtgtgcatccgcccagcctctgcctgcaaagaaccatcagggtagacatccttaaaaacaggcaactacagcactgtgagctaaaaggagtatgagatgtagaatcaccggctttccttctgccctcctgctgtgggcgtcaagtgctctctgtccaggaatttttttcttccgtcttacatctttcatcaaaggccatgtctaggttatatcaagtcctgcttctccacgtatgccaccaaatctccatttaagaatcctgcccattctctggtcccttttagccattttgccaacggggtgagtatgtctggggtgtttgtggctaaaagtgcactggtggtagggacagtgtccctgcaaatgcttccattattgtccctctgcctccagggccctcagtggacctacagttttttgcctcatcttttctggctggactcatcttgtttattgcccaccatgacggggagtggaatagatggggcctggtggagagccagggtgggatctgaatgggccacgggggcattgcctgatagatctgttgtgggatgtgtttttttttccagaaccccagagatgaaaggcctcctcccactggcttggttcctggcttgtagtgtgcctgctgtgcaaggaggcttgctggacctaaaatcaatgatcgagaaggtgacagggaagaacgccctgacaaactacggcttctacggctgttactgcggctggggcggccgaggaacccccaaggatggcaccgattggtgagctgatcgctataactgccctttaggctccaggctctgcacccatgttttcttattcaattccatatcagttctggaagatgagtattaaagtaccattttacaaataagaaaactaagcctcaaagaaattagctggcaatcccaagatctcagtggcctaaggtgtcagttggtcaactgtggcgtaacaagtggtcctcaatgtagtagcttatacagcactggtcatttactttgcttatgaatctgccatttgggtagggcttgtggggatggcttgtcgcagcttcagcttggacaactgaggctggacaatccaccttccagatggctcactcctatggctggcaagtggtcagcatctcctggcctaggagcgggtcagaggcctcaattcctgtcacttaggcctctccaaggatgttcgggattcctcccagcatggtgactcttgggttgcaagagtgagtgaccccaaactgcaagaccaaaggatatggtgttttatggtcagcctcagaaatcccattgtgtcacttacactgtactcttggtcaaagcagtcacaaaggctttaagagggagggcatctagattccacctcttgatcgggaagtgctaaagttctagaagaacatgtgaaatgggagattttgctccttggaaagcatacccaactgggttaacaattctgatactgctagacatatataaaggaaagggatgattaagcaaatgaaggacagatggttggggccaagtttctcactgttggagtgggataagccagggcaggaagccagaatgatccatgtgcaaaaggactaaagttggagacatcagtatggactcctgtttagcttattgtagatacagatgtttacatgtggaagtatgcataggtagcagtatgcatagatatcatggatatattagtatcatactaatataagatgtaagtaataggagaaaatggtgtttcctctgtaagatcttctcagtttttctgtaaaccaagaatactttttatgtgcaatctgctacacctaacatacagtcatccctcggactggttccaggacccctgtgaataccaaaatctgcagatgctctagtccctgatataaaatggcacagtattttcatataacctgtgtgatcatatactttttttttttgagacggagtcttgctctgtcgcccaggctggagtgcagtggcgcaatctcggctcactgcaagctccgcctcctgggttcatgccgttctcctgcctcagtctcccaagtagcatatacgttttttttttatacacatgggcaaatagaaacattcttttgctatcagtggagagggtctaaaagaaatgacatctcagtagcaacaagcacacttaatgcctagatctagtttccaatgtcattcttcaatagaaggccccttccaagtcatatatatatatacagggttccttgaagaaatggtcaattctaggaccaaggcaggaaatatacgagatgagcctggaacttcttttagtgccaaaaagtaaggaagtgcttaaataaacgcaaacaaaacggaagcccacattgatggggatgtgacaagtggcacctgtgctgactgaaagagcccccagtggccaaccctggaacaatttagcaacaaaataaatggccccaaactccagtcttatcatgagaaaaaagaaaatcagacaaatcccaatcgtggggcatcttataaaatgtctaaccagtaccccctcaaaacagtcaagaacaaggaaagcatgaggaactgccacacccaagaggagcctaaagagacaagaccatgggccgggcgcggtggctcacgcctgtaatcccagcactttgggaggccaagacaggtggatgacctgaggtcgggagtttgagaccagcctgaccaatgtggaaaaac

SEQ ID NO: 2287 - DNA, 1763 bp, Homo sapiens
gcttctaatagcactttagatggagtttagggtttccttcatataagatcatgtcatctgcaaacagagacaatttaccttcttcctttccaatttagatgaatgttatatctttttcttgccgaattgctctgactaggactcatagtactatgttgattgggagtggtaagactgggcacctgataaggttaggctttatgtccccacccaaatctcatcttcagttgtaaccctcatcatccccataatccccaaatgtcaaaggaaaccagatgaaggtaattgaatcatggaggccagtttccccgatgcttttcttgtgatagtgagtgagttctcatgagctctgatagttttataaggggctcttcccccttcgcttggcacttcttcttcctgctgccttgtgaggaaggtaccttgcttccccttggccttctgccacggttgtaagcttcctgaggtctccccagccgtgctgaactgtgattcaattaaaactttttcctttataaatcacccagtttcgggcagttctttatagccttgtgaaaacgactaatacagcacccttatcttattcctaatctcagaaaagctttcaacttttcactattcagtatgacatcagctgtagacttgtcatatatgtcctttattatgttcagatacattccaggacccccagagtatgtctgaaactgcagattgtactgacacctacatatagtatgctttttattctatgtatatacctatgaaaaagtttaatttatgttaggcacagcaagagattaacaacaatagagcaattataacaatttactataataagagttatgtgaatgttgtctctctcactccccctcaaaatatcttattgtattatactcatctttctccttgtgatgatgtgagatgataaaaggccaccatgattagatgaaatatggtgaacgacataggcattgtaacataaagttaggttattattgattttctgatgatgcatcagaaggaagaccatctgctttgagcgacccttgattattgagctatgacaatgttgatggttggatgccaggtgcatatgatatcaatgtccaacaggtcggttgtgatacagtttggataccctagaaaaaggaatggttcatctcctgggtgggaggaaacaggacagtgtaagatttaatcctgctactcaaaatgcacaattcaaaacttatgaattgtttttctgaaattttccacttaatattttcagaccatgattgagtacaggtaactgaaaccatggaaagtgaaacaaagcataagtgagaatactatatcacatttatcgactcatgtatgttgaattatccatttattccaaggataaatccctcttaatcatggtgaatgttccttttgatatgccgttgaatttgatttgctagtatttttttgaggatttttatatctgtgttcttcagagatattggcctgtaattttctttatttgtagtgtccttatctgggttagcattgtataatagttacctcatataatgagattggaagtgttccctccaagtgtctggtcttgaacttttctttattgggagatttttttttctgatttattctccttactcattatcaggtactcattacccaaatttgttcagattttctatttcttcatcattcagtcttggtcgattctatgtgtctagcctttatcaacttcttgtaggttattgtatttattggtg

SEQ ID NO: 2288 - DNA, 15759 bp, Homo sapiens
cagtggcggcagctgctggcccggcactgccccgtgccagctcgctaagcacttggtcccagctggagagacttgataggactttgccgttctgcctgccacagctgttcacttctcaggaagggagtccagaagctatgtggctgcctgtgtggtcagacgtgggtgagaagatgaggatggatgcttgctcctctcatggaaacagataacttccgtacctgccaaaccaatggcagaggagctgggaagctcacaggcattgctgaggcctttgaagatgttagctgagaaaggcagaccagccagcatggagctgccctccctcccactcagcgcctttcctaggccaaggaccaggtgaagccgccttgaccctgatccagccgcctgggttgctgctgccggggaaggcaggcctggtgtggacggaccccctgacttttcaagacacactggaggtcactgagccatgttttgagtcagttctgcatctcatcaagacacaggtaatcagaagaggggtttggaaactcaagagcacataagtgaacaaaacatcaagcttgctcttaaaagtttttcaatcttacgcatgttgaaatggcctcactccagtcttgctcgaagtctgctgggtaaactgcaagttctaacagactaagaggaagtgcttcagtcacctaaggtcgtattttattttgtgcttttccaagcagtgggattatgtaatcacctcgcattgtagcagtcttgctgttcataatcttgctattcatgcagtggggtatagagaggcattaatttaggtcttcatggatctcctgaatccgcaatgatcatttgaaagaagaattccgagcagcttagtggtagagataagacccaacattactttgctgatggaatggtggaggtgtccttttctgctggtccccagataagtaaggagaccccaggggtgaaaaaaccacaggaacacagctcatccccaggaaactggtggacaaatgagcaaagatatatgtgctagggggtttaacataatgctgtggaataaacagggaattggttgaataaattattatacacccatacccatacaatgaaaaactttgcagtcattaaaattgatgtttttctataattaataatattgagcgttactgataatataccattaagtgtaacagaagaggttaagaataattatgtagactagattttcattataaatacatatgtatgttttttatctagggaaaatgttagatgactatatgccaatattttagaagtggttatctctaagtggtgagatttttgaatattgaaaaaacgctttttttctaagtgcttagctgtgttctctaacttttctataataaaataattgtattgcttattaaaattggacagttagaaaatgaatgaagttggtggatgagaggtaaaaggtatgagaggaatttagaaagtaagccaagctgagtaggataagcaaactatgcaactaacttttttggggaaggtgttccctacctgagaaataagcacgtaaaagctggatgagaatgggtttctggggaatgacccaaatctgttagacccccggggttgggtacatcagggaacaataattgttcctccatacttcttcctctcaattttccattgtaatatcacatttttctgggtacatgactacctggaatattggtcacatttttagcctttctggtgattaagtccaggccagtgtgggagtaagcaacctttaggaagcatccgtccggagttttcttttcctctcctccatcttgctatgtggaatgcagacatgatccctagagctctagctgccatcttgaatactgaggacgagggccacacctaatagggaaggggcctgggtttcagagcttccacacccatcctggattacttcacatccagacttttggtggagagctaaataaacttccaccttgctgaatgaactgtgaggctttttttttattatttatgaaaaacagaaaagagaaaaggaaagaaagggagaatgagaagataaagaagaaaagatctaagcccctttagatttgcataatgataatatcaatagctaacctttactgagtgcttctttcttgtgccagattctttgctaagtgctctaattctctttgctaagcactctctaattctcacaacaatctttgaggtgtgtattatttcaaatgtcaatttttagattaaaaaactggggatcagaaaatgatatggtttggctgtgtccccacccaaatctcaacttgaattcccacgtgtttgggaagggcctggtgggaggtaattgaatcatgggggcaaatctttcctgtgctgttctcatgattgtgaataaaagtctcatgagatctgatgggtgtatcaagggtttccgcttttgtttcttcctcattttctctggctgctgccatgtaagaattgcctttcacctcctgccatgattctgaggcctccccatccatgtggaactgtaagtccaattaaacctccttttcttcccaggctcaggcatgtctttatcagtaacatgaaaatggactaatacaataaattggtacaagtagagtggggtgttgctgaaaagatacctgaaaatatggaagcagctttggaactgggtaacaggcagaggttggaaaaatttggagggctcagaagaagacagcaaaatgtgggaaagtttggaacttcctagagacttgttgaatgacattgacaaaaatgctgatagtgatatgaacaataaggtccaggctgaggtggtctcagatggagatgagaaacttgttgggaactggagcaaaggtgactcttgttatgtttcagcaaagagactggcagcattttgcacctgccctagagatttgtagaacttcgaagttgagagagttgatttagcgtatctggtggaagaaatttctaagcagcaaagcattcaagaggtgacttgggtgctgttaaaggcattcagttttataagggaaactaagcataaaagttgggaaaatttgcagtctgacaatgtgatagaaaagaaaatcccattttctgaggagaaattgaagcccgctgcaggctgcagatatttgcataagtaataagctgagtgttaatccccaagacgacaggggggtggtgggaacatgtctccagggcatgtcagaggtcttcatggcagcccctcccatcacaggcctggaggcctaggaggaaaaagtggtttcatgggccgggcccagggtccccgtgctgtgttcagcctagggacttggtgccctgtgtctcagctgctacagctgtggctgaaaggagccaatatagagtttgggccatgacttcaaagggtgcaagcctcaagccttggcagcttccacttggtgttgagcctgcaagtacacagaagtcaagaattgaggtttgggaacctctgcctagatttcagaagatgtatggaaacacctggatgtccaggcagaattttgctgcagtggcagggctgtcatggagaacctctgctagggcaatgcagaaggaaaatgtgaggtcagagcccccccacagagtccctactagggcactgcctagtggagctgtgagaagacggccaccatcctccagaccacagaatggtagatccactgacagctttcactgtgtgctggaaaagctgcagacactcaacatcagcctgtgtaaagcagctgggaggaaggctgtacccaagctgcccaagaccatgggaacctacctcttgcattagcgtgatctggatgtgagacatagagtcaaaggagataattttggaagctttaagatttgactgccccacttgattttggacttgcatggggcctgtagctcctttgttctggcctatttctcccatttgaaatggctgtattcacccaatgcctgtacccccactgtatctagtaagttactaacctgcttttgattttacaggctcgtaggtgaaagggacttgccttgtcttggatgagactttggactatggacttttgagttaatgctgaaatgagttaagactttgggggactgttgtgaaggcatgattggttttgaaatgtgaggccgtgagatttgggaggggccaggggcagaatgatatgatttggctctgtccccgcccagatctcatcttgaattcccacatgttgtgggagggacccagtgggaggtaattgaatcacaggggcaagtctttcctgtgctgttcttatgatagtgaataagtctcatgagatctgatggttttaaaaagaggagttcccctgcacaagctctctctccctgctgtcatccatgtaagatgtgacatgctcctccttgccttctgccatgattgtgaggcttccccagccatgtggaactataagtccaattaaacctttttcttttgtaaattgcccagtcttgggtatgtctttatcagcagtgtgaaaacagactaatacaaaaaatttaaaagttgcccaagttcacaaagctagaaaataatgaatttaggatttgaactcagtatccccaagcccaagcctgcaattctctttttctttttttgagacagggtctcactttgtcacccaagctggagtgcagtgtcatggtcttggcctctgtagcctcaacctcccaggttaagtgatcttcctgcctcagccccccaagtagctgtgactacaggtgtgcaccaccacgcctggctaattttttttgtattttttgcagagacggggtttcaccatgttgttcaggctggtctcaaactcctaaggtcaagtgatccacctgcctcggcctcccaaagtgctaggattataggcgtgaggcattgcaccaggcctgtttcttaaaatataatctgtggtttccccctatgagaatctgggaggtgttaaaaatgtgaatgccttgatcccacccctgactgatttgatcagaatctcctggagtaggattcaagtagctgcatttttatcaagctccctcaccaagtttgatgctactgtaggtctaagctatatcttattctaactcaaatgggggcaatgaatggagttttgacataggctataggctttgtaaattgctagctttctttctttcttttcttttttctgaaagatatttgcagtgcaagtagcttacatattttaatgacttactgagagagcatattaaactaaaattgcacaaaatgctcaaattgctttgaaggtgcctcaaccttgaaaccctaaaatagtactaattgcctattttcatcttttctccatctcccctcaacataaataaatattgtgcaaatgaattatatatagattctattgttaacaagaagaccctctttcttctttttctccgttttggataatccctcctctggtagtctcatttctatgttcatactcacagaaaacattggcttccatagtgcaaagcagggcagagggaagcaggaagcagtggagcaaggggaagagagagggagagagtgaatgactctgaagaggaaaggaaattaacatttattggggttctgccaggccacagacatttttcttacattattgcactactgcactttccatgtattatctcattcatatgctctcaaaaccctatgaagtagatagtattatcctattttatgatgaggaaacagaagttctgatatgggaaatgtcaccaaacaaggtcacacagccagtgtattggcagatccaagattggctgaggctcgtttgacctgaaagcctgggtgtttttaccattcttattgtctgccatccacctgaagtcacctagcatgtttttccatcataaaactcatttggggctctgttttgtaatcaaaatctgaatcgaatgtgaatgcaatttgcttgctgctggttgtaatagcatgaattattgaactctagagctctcacataaaagttaagcatctgaagagactcagctggttgattctatccagtctcccactgctctctcaagggaaaaagattccaagttcaacattagctctcacctgttgtattgttggcactagcttttctcacccatcattgttttctgtctctacagatgcaggggcgagaaggcacaggaataaagtttgtgtggagatctcacagtcaggtcatcaccaaactctttttccttgtgtatacctaaaatgctttccttttctgatatttaaaaagctcaagactctatgcttttgtaattcacctattcatttgtctcctcagtagggtctggaagccacaagaggaatcattttgatagaaagataatgcataggcttcagagacaagagcttgcaggcactttagcaataaaattatgttgttgctttgccaagcatccccttctgtgaggaaccacctgttctctccttaccttctgataggcaggttattcaccctggccacatcatacacacaagggtacgtgggccaggctagccagttagaatatcccaaaccctcagcacagtgatgaggcatgtgcctcaatcagggataattagtattttctctgagatttgatatacagatactgagaaataatctctattgcttttgaattatgagccttcaggttgtggactttggaccaccagtgcaatatagtgtagttcaatgttggctattatattggtgatatttcccaaccagtagacgcactttcctgaaagaagctgtagaaggcagcagaactagatatagcaagctagataggtaactagatagctagagccctgacaataaaatctgaactcctagattaaatggtgcctggttattcagttagatgagatctccaattctctatatccccaatttactgttgattacttaaattacttggagttattttttgacacttgaaactggaccagtcctaaccagcacatatttgaaacccagaaacaaccaacttcataaaaatgtaatatccaaatagcaaaattcagaaacagcaggacgttcagctgccagtgagccctgagtttatttccaattttaaaaataaagggaggtaaaggctgataacagggtaaaagaaaaggaatgtaagtggagtagaatcaaccacagtgacacatacaagggaaaaagcagagctgagatgagaactcaacctgctactgtgtaataagctctttgacacaccctggcaatgcttcccaccaatttagaaaggttggcctggttctctctactcctcgcatcaggtgggaccaacatcaatatgctgagctaatggcttatcaatggtttacttccctgagctggtcatgagattgcccatcactggagaatgcagcccaaaaccaaaaccatcctggcctttgactcaagttatgtatcatttcccaggctaagttatctgctgctggagaattcaggatttgtgtctgaagcatctctgcctctctatctttgaacactgtacacaagtaggtgtttaagaaacgcttgatgaatgaatgagtgaattgctctgaaaacattcaggaattactgttctcagatacatagaatgcatgcaaggttaatacaaatggctgataagaattactcaagtgcagatctattggatgagctagggaaaagaaggattgttttcatcatgttttctaaacatcccccaattttaatgatttggtgttatacacacttacacaaaggttccatactcaaaaagttaggcatcactgaatcagcaaaatcacacaggtttctttgctgactcgcttttcagaagttttattttgtgaacatgatttgcataattgcatctggggcactttgctggaagagcccacgtgtcttgggaatgctgggcaagggaaatgtaactttccctgtgggttcactccactgataaggtaaggggtcaaaaattgtactgtaccctaactttgtagttgctgcttaaccaacgaagccactgtgcctccttcgctcatagtgataatctttttggagcagatttgttgggggaaatagagtaaatattagaaagggctggttagcccttgtgtatgttttctcttctctgataaggagggagacactatgcaaaccccagtgctcacccaacaggaggatcagatccacctggccttggcaaatcccagatgatccacttctgggtgcttgagatcagcagaaagctcacagtgatcttaccaagtggaaatccctaaatccgacattcagatttgagaccagttttataagacactctgcgtgagttttttgtttttgttttttttcatagaaaactttacttcaggagaggtactaggatgcaatagttaagaactcatgttagaatcaagtgggatgttggtttgcattctggcttttgtaactttggccaaaacatttagcatccctgatccttagtttggaccatccacaaattggggctaatactgttatttccctgtgcagcaaactcagcaagtctgggttatccaaaccctgcatattctgacaaaagttttggctcttgcctgggagataacctctaagtccttagaatattttggctgatcagagagattttgtctacctggaggccttgggtcacacgagatagtctaagctaacaatgtgacttatggtgggggctctgggccaaacggtagaagcttgacctctggaggggctggagactgagggcagccacatgggtggtctgagatggtaaatgtcatcacacaatgaaatctccagtaaaatcctggacagcaagtctctggtaaaaagaaatgctgtctgcatgactccactgggagaggacaactggaagctttatggaagctcctggactctgccctaatgtgcctttttccactgctgactaacttattttctttcactggaataaactataaccatgagtataatggctttgctgagttgtgtgagtccttctagtgaataactgaaagtgaaggtgatcttgggacccctgagcacacttcctcatggttttggagacgattaatgtgataaacaatgtagaatacttagtggaatgcctggaaaataataagtgctcaataaataaggaagcttaggagagaggggtaataggcctgctgttatagcttctggtctgacttcccagctctagtcatcattcattccttttttgctttcaacaaatatttttttgagtgccgaccatgctaggtatggtcaagacccttcatggagcttacaatctagttgaggaaacaaagatcagacttataaacacacataaatatataattgcaagctggagtaaacgtgatgaaggaaaagaattatgttatgacctcatgggaggtcagagacttgagggatggaaaggaacccaacgtagggaagattctctttattagctgcttatttatatctgaaattctgttatgtcgtgtgacttttgttatgtgtttctctctttatttattttaatgttttctccgttgtatgttctcactgatatgtgggagctaagctatgaagatgcaaaggcatgagaatgatacaatagactttgggggcttcgggggaagggtgcgagggataaaagaactcaaataaggtgcagtatatattgctcaggtgatgggtgcacccaaatctcacaaatcacccctaaagaacttacgcatgtaaccaaacaccacctgtaccccaataacttatggaaaaaaatgtaaaacagagaaaaaatattttcctgttttctcattcctggactatattagcaagtgtctctctctttctctcccctcagtcttttgctttggcctctcttcttccagtctttggtagaatgctaagacatcataggctcccttttccttctttacctaactcctgccactttgagtctgtgggcatgacatcccttccttccttcttcaagccaatatttatcaaacactcagaatatgccagcctttatctcctggtccctccttcatcagttccagggttctgcagcagggaaaagggaaggaagtaggagtttacatcacctgggcagagaaagagctgcttatagtcagtagtgccttttcagggctgccattggcgtattttcattttttcctccaaacatttccctgagatttctttgaggtgatctcatttccctatcctaggaggtaatccaagatatgtctagagccatatccctggctccaaacataagctggttctcaataaatagcttgggattgtttttgaaatgggctagatgccaatgcccagagctgttcaatgggataggactgaactccccagggaagcaaaagatttccgtcaccatctcttctccaccagggcacagggcacctgtggagaagggcaaggggtacgtgggagcctgaaggatgagggaaagcgccatctcattcggcctgggaggcaattctgccctctttaattatccccctttccagattgagcttttccaataggtgtggcacgtggtgggtgagtctttttccatatggtttgagaaactgagccaaatacaccatgcagagtgagaaaaaaatgagtcaaacaaccctcccaccactacttctcccctggcttagaggaaaagcaaagctctggttgctctaccccggctttctcctcggagaggtttttggagctgaaggaggaatgactaatgacgtggaggtttctcctaatgcaaccagctggcctgggggctggaggtggcccctgaacgtgatttacaacttatacactgtgtccttgaatgaggtactgaacctctctgggcctgtttcctcaactgcaaagtgaagaagatgatttttaccattcttcccaactctaacgataacagacatttatttatttatttatttatttatttatttatttatttatttgagacaagtcttgctctgttgcccaggctggagtgcagcagtgcaatcattgctcactgaagcctcaaactcctgggctcaagagatcctcctgcctcagcctccaaaatagccaggactacaggcacactccaccatgcccagctaatttttatttttgttttgtagagatggggtcttgctatattgctcaggctggtctcaaatgcctgggctccctcttcagcctcccaaagtactgggattataggcatgagccactgtaccagacccagagctttttaaaggtgaataatgaaagctccagaagtatctttaaaatacatcagaaatagaggtgacaggtgagatgaaaccaaattggcaaaatggtaataactgttgaaactttagtcatgggtagaaggcagttcattacattctctgcttttcattattctatagagttgattattctctccacttttgtgtatgtggtcctcctcaaaattgccagtgaggtaaaggtgccacaagctgataggctgtcgtgtgaggaatgaagtgactgtaaatactcccaggcccttggggagaatgaccttgaagagaagatctgaaggagctgggcttgtcctcaattgtcaaaaagttacatcttgatttcaagtggtttacttaattaatctccatcttttaagatttacaagtttgtgtgtgtgcgtatttatacttatttgcagtttaattttgtgataccaaaagaaaaagcctagcatgacccttgttggagaccacaagccctgggaagttggacttcttccctctcagttcagttgtccctgaagccaagacttttttcttttttgagacagggtcttgctctgttgtccaggctggaatgaagtggtgtgaccatggctcactgaagcctggtcctcctgggctcaagcgatcctcccaccttggcctcccaaatagctggggctataggcatgtgccaccatgctcagctaattttttaatttttaggagagactgggtcttgctatgttgcccaggctggtcttgaactctgggctcaagccattctcctgcctctgcctcctaaagtgctgggattacaggcatgagccaccatgcccagctgaagccaagatttttaatcaccaagaccttctgcaaatctgaagtttgcctctttcaaataaaaattcagagcattcttctcatttataccaagtgaaatagacatgaccttggagaagaagtgccctgcctgcctatagagctgaacttcatggaaggagcgagtggctgtgcatcagaggggtgctaaagactcacacaccatttgtccactggacataaggtcatttctttcaacaaaaagtctgaacttagggaaacctcctgaaagtctccaagaaatgggaaagatcactgatggatgagggaacttgagacacagagaggataaataactcatctcgggagtcacagctagcagaagtgatactgagaaacctttgggacaattcaagaggaggaatgactggaggacaacagcagaaatgtgaagaaaatcagactgacagggttgagtggctattaacactctttctttaaaggatacagacccaggatgaagtcagatgtgagatttcctctccaattgagggtatgtttgcagcccctacctattatagattttggaaagataatcatctacactaataacctgaaaatcattcgaaccccaatggacaagagagattttgtgaggaaaattctccagaaggaagaggaggctgaggaagagtctctgatgaacaaagaagaaagctatggaggcagggaccagcacgatagacctttggtggaggcagaaagcacattaccccaaaaccggtatacacaggtttccacgctttgagaaggactgaatgagatcatgcgcatggcagcttctctaggatagcaccctgcgtgaacacagtagctgctcagttaagtctttgatgggtgtgatcctgattcagcttgatcaattctgcagtcatactggattgtgtttgaaaaggtgtccagaaaaacctggccatctgcctcctgtcttcccagtaccccaaccccatggataaaaatgtcatctcagtaaaaatcatggaggaaaaaagagatgaatcaacaggggtcatctacagaaagaggattgcaatctgtcagaacgtggttccagaaattttaaggaaggtgagcattttgaaagtacctaatatccaattagaagaggagtcatggctcaatcctcgggaaagaaacatggccatacggagtcactgccttacgtggacacagtatgcatccatgaaggaagagtctgtcttccgggaaagtatggaaaacccaaattggacagagttcattcaaagaggcaggatttcaatcacaggggttggatttctcaactgtgttttagaaacttttgccagcacattcttacgacagggagcccagaagggaattagaatcatggagatgctgctaaaggaacagtgtggtgcccccttagctgaataaagaatcatcagttgcagctggaagctggatggacagatgcaaattttggaattttctcctggttgactgctgtgcttagagttttgatccatcagtggagggaaattgagtgaaaatgatccacatgccaatctgggctggcatctcatcgcttagcccagcgtttgtctcacatcttgtgtgtaatgccagcaactaaatctccaagctcgattagcaatggttacagcccagtgagctcacatccagaaacccccttgaaatgatgtttcatcagggagaactttaaccacaaaacctgcttctgaaccaactgaggaagacacctcaggtactgtgactctaattctggggcagttgttgaataaaatatgccatgactttatggatttattttctctctaagttgcatgagtaaaatgagtcttgtgattttgtaaaacgtagctgtgaaagagacctgaaaatttgagacttgctgggaagagttctttatgcactcaggtgtggaggacaggtgcaggggaaatttgttgtgtgatgctccagtacccattcctgtcttctccctttctccctctaactatatcttgaacatctctcttttctatatgattttggtgtggagttgatctgtcacaaagttcaaggattagactgtaatggacctaagccaatttatatcttctttccctagctgcagttattagtttgggtttagtcaaatgtcccatttcaagacaatgaaagggatcccaagacctggctatgtgctgttggaactgacattttcttttccctggagcatttagggttagcatgtgtggcttgaaactggggcagctatttggttgtcataagagtaaagctgaagctactgtgtgtatttggggcatgtctaccacatggaatctgatgatggaacaatccctatggaagggagagctaagagacagaaggaagatgagacatcaagggtatttggtaataatgtctaaactgctgaatcaacgaagttcacttaaagcccactctgactctggatcaattgcttaaggcatttcagctgagttttaaacactttgcataaaaattcctatctgatacaattaatattactaactctctgctctgaatagattgtgtttgcttggtaatttgtctggcttcttccaaagacttagtatacttgacacttgatggccaatgggtgctgcacagaccagtaaatggtgaatctagcttccaacttggacccagctttctgtttgcatgtctagtgtgcatttttgttagggttgagagttgagtaattgctttatttgatagtatttgctgtgttttaatagaaagggaaataattatatatcaatctgctaaatgactttctttcctccttaagatctacctttaacatttttttctagtgattgtggaactcaagcccacatagaagtggtatcttctctgacttttggctgctgaagttttattaggggtgccctggtaggtagggagtcttgattagtctgtatcacttaagataattcctttccctatgtgcttcttggtttagaagcagccaaatttttgtgacctcattttggccaattgacacaaaacatgaattggaagtctgctgggcatgggggtgcttcaggcaagtttcttaactagttagagaacagaagacccgaatgtcattgaattgctttacctcttgccttcttgtgtgagattttaagctagctgtcagagtttttttctttctttcttaatttatgtcaaagaaagcatcctgatgcattttgcaaggaccacatgaagtagggaattgttgatttccccaaggagggatccaagagccaaaataagaaaaaagaaacagagaaaagaaaaacacatttaacccatctactatagttcctttacttttatcttgatgtcctatttctctgtgcatgattctaccttcagacacagatgagacaaggagtggtctgtgtgatgactagatttgaagggctgttttgtgcaaagtagtggtgcttgaacaccatactcagatgatcataaatttgctagctcactctcatacatacttatgaaaatatcctttttataagtgtttatagggatggcattaaaaatacttaagcattacagtaatacgc

SEQ ID NO: 2289 - DNA, 1435 bp, Homo sapiens
accatgcctggctaatttttgtatttttagtagaaacagggtttcaccatgttgtccaggctggtcttgaactcctgacctccggtgatccacccacctcagcctcccaaagggctgggattacaggtttgagccaccacaactggccagaaaatatgatttttaatcatagtattttacagtgcctgcattaacagtgtacagggtgctttcataagggctgccatggaattctccgaaaacgacctgggaagctttatgacatgaaaatgcccatttgacagaggcgggaaccgaggcttgcagtgatgaagggactgggagcgcagaggccagaggtgtggcaatgccagctggggaattctggtgaccacaccctcctggcagaggtgggaagagacaggctgctcccacgagtgggcagttcttggctgttgcttctcatcagcttccctgtgagatttcgtcagcacctcctccctctccactgccggaagaatccagggctaccaataaaaatgacaattgggtgaggagggctctagcccgtgcttcactgtttgtcctttggtccgggaaggggtctgagcaagaggcaccgtcttgcctgttcggaagggtctgagtgtatgtgtgcaaggatgtgtgaatacatgcgtgagggtgtgtgtgtgagtgtgagtggaggagcgggggggctggggtgtctccagagggcagcagcgcatgggccttggggtctctgggatccccctctcgaggcccgcatttggtgtggagagaggagattaaggggaggcgtgcgcctccagggaagtggccgggcacttcatttccctctgacagctcatcggtattgaggtcacaccgtttctcaggtcaggatggagattgggtctcacagccacacactcccatcccaagatctcttcccacctgaggtcctagattccccagcacagacacaaaccgtccatgctgtggatggtttcatccaaattcacgacccacagatgagcatcataaaatggccatttgacaccaccaagttgggggctgttatttgtgcagcaaaagataactggggcacatctgcacctgtgtctctagggcaaggcttcccctgagcccctggcatgtgcaccttactgcctactggatgccgactcttcccagaatccaaaagctcacagaatcttccccaagtgcatcggcccagagcatccaaggtgaagccattatcttctcatccaaatctgaaaccactggtgacctggacaaaattggaccaagtgaggcccatgaccacctggcaggagggcaggtgcgggcgagatgggtttccagctgtccatgtatgtgcttgccctgttttttgttttttttttttgtttgtttgtttttgttttttgagacatggtctggatctataggc

SEQ ID NO: 2290 - DNA, 8095 bp, Homo sapiens
gaattgtaaatcaaaatcagaatgagatactatttcatatccactagactgactacaataaaaagtaaaaatgacagacaataaaaagtgttaaagtgtgagccactgcgcctggcccgcatgtattacatttataattaaaaattcacaactcaatgtcaagtgtgaaccttgtgttgaccctgatttgagcaagcaataaaaagatatttttgagacatttagattatgaatttcacatttgatgatagttactattaattttgtgaggtgtgatattggcaatgtggttagatgacttcagagaaaaaggaaggtatagttaagcaagtatggcaacatctaataacttgggtctaggtgatgtgtatgggtttcattatactgtcctctttactgttgtatgtatttgaaaacattcatgacaaaaaaactttttaatcagttaaataaaccatgaagaacggttaaagaagtgagcttccaagaagtgtttataataacagtactgaaacacacgaattcactaactagtaagcatctgtattagtcagggttctctagatggacagaataggatatatatagatatatgtaatatgtatataggtaatatgtatatatatgtaatatgtgtatatatatgtatataaaggggagtttattaagtattaacttacatgatcacaaggtcccacaataggctgtctgcaagctgaagagcaaggagagcgagtccgagttccaaaactgaagaacctgaagtccgacgttcgaaggcaggaagcatccagcacaggacaaagatgtaggctgggaggctaggccagtgtctccttttcacattttactgcctgctttatatttgctggcagctgattagattgtgtccaccagaataagggtggatatttcccagcccagactcatatgttaatctcttttggcagcaccctcacaaacacacccaggatcaaactttgtatccttcaatccaatcaagttgacactcagtattaaccatcacggcattcatcactgggattgtaattgtgttagaaaactgtagaaaggcttcctaggagggcatttggacaagactgctttaaggtaattcctccactccccaactaatttaaaaaataactaagtacatattatattgcaaataataaaaataattaccattacttgctttcatggcataaagaaaaaacagacaatactacttatatttattctcatatgctatttaaacaaggctcagaaattttagatttatcagaatcacatcttaacagggtaatttaaaagtgaatgtgcctgattaactcaaaatggattaaagacctaaatgtaagagcttaaaccatttaactcttagaagaaaacaagggaaaagcttcatgacattggatttggcaatgatttcttggatatgatagcaagagtacagaccacagaagtaaacataaattggactatatcaaaattaaaagcttctgtgcatcaaaggccataatcaacagagtgaaaaggcaacctaaggaatgggagaaaatatttacctatcatatctgataagggtgaatatctagaatatataaagagctcctacaactcaacaacaaaaaccaaacaacctgattcaaaaaggggcatattcgctgtttgtatattttctttaaaaaatgtctattcaagtccatgaagagatgcccaacatctttcccctcatcattagggaaaagcaaattaaaaccataatgacattaacacctcacatccattaggatggctactattaaaaaaaaaaaaactagaaaataactagtgttggcaaagatgtagagaaattggaatccttatgaactgtgggtggaatgtaatatggtataccctctatggcagttcctcaaaaatttaaaagtagaggctgggtgtggtggctcacgcctgtaatcccaacactttggaaggctgaggagggtggatcacctgaggtgagtttgagaccagcctggccaacatggcaaaaccctgtctctactaagtaaactacaaaaattagccaggcgtggtggtgggcacctgtaatcccatctacttgggaggctgaggcaggagaactgcttgaacctgggaggcagagtttgcagtgggctgagatcacgccactgcactccagcctgggcgacagagtgagactccatctcaatcagtcaatcaatagaattaccatatgatctagcaatcccatttctgggtgtatacccaaaagaattgaaagcagggtcctcaagaggtatttgtacacacatgttcatagcagcattactcaacccgtgtcacactgatggatgaacaaaatgtggtatatacaactgaatattcagctttaaaaagtaacttctgacacgttacaacatggacaatcttgagaacattatactaagtgaaaaaagccagtcacaaatactgtgattccacttatatgaatccttagtcaaattcagagagagtgagtacaatggtggttgtcaggggatgtggggaggaatggggagttgtttaatggttaagtcagttttgcaagatgaaaaaattctggagattggttgcaaaacaaagtgactacataatacttaaccataaacactttaaaaagattaagatagcgtattttgttacatatattttactacaattttaaagtaggtgaatgtgcttaactttacagggtgataagtacattgcttttgactcaaagctagaaatctgtatcttggcaccaaataacaaattacatagcttctatttttttgagatagtctcgtctgtcgcccaggctggagtgctgtggcatgatctcggctcacggcaacctccaccttctgggttccagcaattctcgtgcctcagcctcctgcgtagctaggactacaggcgcctgccatcatgcctggctaattttttgtatttttagtagagacagggttttgccatattgcccaggctggtctcgaactcctgagctcaggcaatctgcctgcctcagcctcccaaagtgctaggactacaggcctgagccattgtgctgggtctcaaattacataccttcttaataaatgaggaagatttatcaattttggatcaaagccataacaagagctatttaatgaatgccttctaaatgccgtgcacttcacaaatacaatagtacctttaaacctcacaaggcaggtatttctattttagctactgttattattatttttttaagagatggggtctccctgtattgcccaggctggagtacaatggctattcacaggtgtgatcatagcatactacagacttaaactctttggctcaagtgatcctcctgccttggctcctgaatagctgtgactgtaggtgcacaccactgtgcccatcttttctattttataaataggaaaacttaggctcagtaagattttgggcttttgttaggggagaagtggcagagccagaatttaaacccaagtgtgtgtggctccaaagctcatgttcattccccaataccacaggccttgccagacatgcttatgttgggaccatttgattgtggtatttctttagccttagtctgctaaagttctaaaactaaaaaggtagggggaaaaaagagacatcacctttagtcattctagatctatgtagcaggtattattcattacctgtagcagataaaaggcaaccattattattactgatgtcattctaagtagattttaaacatttggatgcaatccttttatcatggaaatatttaattatatcatatattcttaattttagttaaaatcatgtctggcatgatgcctttagcaacttcttaccatccaagaaaaggtccttttccatagtcttaaaataagtagtatttactaagtttacacttttcaatatgtagatactaaaaaaaaagcttgattttataaaaaggtggtaatgtttaattcattatgagacctccatatgtgagattctttctctcttctaatattttctaaatacttactcatagcaggtactgtcctaaatgctttatatgtattggctcagaaactcctccatattatctacgaggtggtaccatttctactcctactttatagatgaggcataaaaaagttaattaatttgctaaaggtttcacaggtgataagtggctgagcagggttttaaagtctgatttgagtttgtggtctggtgggcagtgtggctcagtggacaggaacctgggctttttcctgtagagaagacatagcttttagcataaggattcccccaaactgatgacaagtacaacttgaatgcatatataaataacatttattaacttaggctgtacaatatattgatttagtcaaataaaaaataccgtacacaaaaattgaagtaaaatctgtaagatgccattcagactgaattttatattctgaataagacaagggactgccattcacttaaagcaaaatggctccaattccgtttatctatctatctatctatctatctatctatccatctatctatctatctatctataagtctcgctctgtcacccaggctggagtatctatctatttatttatgagataagtctcgctctgtcacccaggctggagtgcggtggtgcaatctcggctcactgcaacctctgcctcccacgttcaagtgatgctcctgtctcagcctactgaggagctgggattacaggcatgcaccatcacacctggctaatttttgtatttttagtagagatggggtttcaccatgttggccaggctggtctcgagctcctgacctcaggtgatccacccaccttggcctcccaaagtgctgggattacaggcgtgagccactgcgcccggcctccaattccattttgtaggaaagcacataaggctataccaatcaggcactgtggctggtctaatgctcacaccaggggccagcccactgcccagacttagcctccaggtaggctgctttgctatttaaaggcaacagtcttaggatccttattataaaagtttaaacaaaatcccaaagccgtcaagtcttcctggagatggcaatgtactatcagtttggaatgtataccagtttggaagctgaaatcactctgctgtagccttttgagcactggcagcattttccaaaatttttcttttccattcttcataatcctgtgtcagatcttcatctttctgtggtttatgtggcatctcctctaccttctccatttctgacagaaaattatcaaaagcaatttcaaaattcttagcttagaaatgaaatttaaaaaaaggtaaacttgtttaaattgtctaaaatagaaaagatactgaaatgacatggagaaacagcagttatcacttttttttgagatggggtcttgtaatgttgctcaggctgcactcaaattcctaggttcaaatgatcctcccacctccacctcttgagtagctgggaccgtggctgggactataggctcacactatcacacctagcttagctatcacttttttccctcccttacactccaagcattccaagacatctaataatagctaacgtctatcaagcacttaactggtgcttgataggcactgaaccaagtactttaaatagcattatttcatttaacccctactacactccgtaataggtgataatattaatcacattttataggtcaggaaattgaggctcacagaaattatactttcttagaatcccatagccagtggttgggcatagtggctcatgcctgtaatcccagcactttgggaggtgaagggggcgggtcacttgagcccaggagttcaagaccagcctgggtaacatagtgaggtcccatctctatcaaaaatacaaaaattagccaggtgtggtagcacatgcctgtagtcccagctactcgggaggctgaggtgggaggatggtttgagctcaggaggcggaggctgcagtgagccgagaccgtgccactgcactctagcatgggtgagagaaccaggccatgtctcagaaaaagagaaaccaaaaaaccaaaatcaaacaaacaaacaaaaaaaccaaaaaatcacatagccagtaggtggtattaaaacaataatgcagccatttgcctgagattgtctttgtagctaaagctcttataagcaaactggaacctaacttggaaacatttcttttgtcgggggaaaagaacctccgaaagacaaaaataatccccagccaatcacaaacagccaaccagctgacttgttatacaactagggacttcccatcagaccatgcccaggtttaagacaaatacctagctgtagctgcccaggctggtctcgcactcatgggctcaagcaatcctcccgcctcagcctcccaaagtgctgggattacaggaataagccactgtgccagaccagccatattcttaattacccaataacgatgttacttccattactgattgcttggaaaactggtcttatcaaatgattcacagtcagaatgtacttaaaactggactcctgtcaggcaagctgctagagcagcactgggctgttcactgcataaaatgtcaacgtcagtaccgtgttagtaaaacttaccctttgctggggcttcaaccactatcttctttctcttccgtggtggagtagctacatctccaggttctcctttaagaagtgttatcaaggttaatttttctcctgttctcaatttcagtatttgggcatgttttggatcacaaataaaattagacatcttaactgatcaaatatgaggagaagagaaatgatcttagacctctcttttgggcctcttgtcagacttgagaatcattttccaggcatagattcatggaatcataggttagaaacatcaataaaaacatacctggtccacatgtaatacggaatttaggaagcagccagtttacatatttgaaaatatttgacttttacaagcaaaaggactacattttcaaatgacgcattcttgaactacagaatacttactgtcgacctgctgtccaatcttctctagttgtttacacagtcgatcaaatatagctttttttacaccggatgtggctaccattttgtttttatccactttcagctttagaatcctacaaaacaatttcataagttgcttttctcaagacctgtacagttttcttctctgggcaaccagataatcaacttattttctttttgaccatgcttccagagcctctgtctagtttttttccttcattccaaacatgttattatctatgctaagttgtttagttgtttattggactgagagttaaaatgcacatgggatctattttataacaaaaggggcacataaaagacatttgctgtagtgcttcatgacttttagaactctttagtaaatctcagattaatttaatgaatgacaatcataggacttttttgttccactcattttaactcacaggatatttatattacaggaatgtaacaaccccaccccaccctgaaaataaactttcctaataagactccacagcaaccactaattacaaacacaaaataaactttttcttcagaatagacctgtcaagaccttttcttactcagcgtaatatggtttcaaaagtagagttgactattctcactgttttctacaatatcagctgcactccctccgtatatgcacatacttttgttgaattgaagagatgttttccataaatgccaattaatactcctaggtatgtacctaatagagccaagcataccaaaattagtgggtaggtagtgagaaatccattctttaagggccaactacattttgttttctaaggagttttctggcaagataaaaataagataactttagacaaagattatcaacaattactaatatttccaaggtaacatttcagcatacacatagataacccacaattgtaagattcagatgtgataatttatcactaaaatgttataaattccttgaagaacagttgtagccagtgttttgttttttttttaag

SEQ ID NO: 2291 - DNA, 4648 bp, Homo sapiens
gtacttctgacaccagatgtcagggggttccccccaccaccaccagggacacagcgggtcaggaaagattccgaacaatcacgacagcgtactacagaggagccatgggcattatgctggtctatgacatcacaaatgaaaaatcctttgacaatattaaaaattggatcagaaacattgaagagcatgcctcttccgatgtcgaaagaatgatcctgggtaacaaatgtgatatgaatgacaaaagacaagtgtcaaaagaaagaggggagaagctagcaattgactatgggattaaattcttggagacaagcgcaaaatccagtgcaaatgtagaagaggcattttttacacttgcacgagatataatgacaaaactcaacagaaaaatgaatgacagcaattcagcaggagcaggtggaccagtgaaaataacagaaaaccgatcaaagaagaccagtttctttcgttgctcgctactttgatgaactctttctgagagactgcagcacacctagagggccctttcctgcttctctgaaagcacaggtcacccagcctcagaatcacacctcccggctgctgctgagagcaccactgaacttagacctctcaacacagtatgccaagtggattccagcctcatggcctagcaaaagaacagactccctttttcaaacatggaagcaatgaagtggagacacatgcaggacctaactcgttttttccttgttttattacctgttgcagaagcggttatctttcttttttactttgcacatcagtgttagcctttccctatttcagcacaatcttagactcatatttgcacacttttgtgtcgtgaagttctagacaaatttgtacatgtggcaatgttaaaagagcatttacagcagaggttaatatactaaaattaaagggtatttggtctggttcatatggtcaaatattactgccttggtagcatttatttaagggctttttcttaaataagaatcattaaagtcattaaaaaaatttactgaaatgcccatcttgtcatcaaaggccacaatttctttatttcttcagattaagagctttgcctcatccccgacctgttttccagagtctgggtagctgaatgaatcactttaaaatgattacctctgcctaatctatagaaactgcatttggaaatcaccataatctcatttttccctggggtttgtatttgctattctttcccatgtttgacttaagtgtaatcactcttaagtaatatttgaacattattatctgtttctatttgtgaacttcttgagctgaaattttacgtgggctgagagatataccatttagggttttagtgcagcatctaactgtgattctgtcaataaggatatgtaatatattttttcttaggttcactccttagctggctggtttagttgtaataccaaattcctaccataatccctgtctacaaaagttaggtttagattttagtttgcggaaaccttccctatatagagacagattaacttgttgatataaatttaatagagctagctcttggtaatggtgaaaataatgagttttggttggttttatttggcagatgtttttagaaataaaagtacttagacctagtgcagcctctaggaaaagtcttgccttttcattagagaaaacaggaccaaggtttcagttttcaaacagctgttgttgattgtgtagaacccagttccatctgttttggttcattgttacagaacttagtccagtcatttgggctaaagccaaccaaaagcttagttgcctttctcaacaaacactggtactggtatacttttgtagatgaaaccatcacaaggtatttagtgttaacttgtgtgccaaattcagatcactatgtcgttgttgctctagccttcagtgtcataacacaggggggataaaacagaggggatgagggaaatgaattctgttaataattattcttcctggtatgcctgttttgcttcacaaaggctactatcatgctggatagataagaacaggagatggcagtggaaagggattgcttgttaccacagagaattctcttcaaattaagatatgtcattagaatgcttggaccagtcaatcttttgtacttatttgaaaatataggaacaatttagcagctgcaaatatgcccaagctatttttaatagatatactaaacttattgttgacaaatttcagcctccttaatttttttttttttggtaattacctataggcttaaaagtcattcgttgctgttctagtataattagtagttccgtgattgaaagtttattgtaattctactatcttcaaattagatacattttcaaaaggaaaagataattttttagaaacatcttaatattcactatttcctgaaaaaatccaagcagttaacgctttctggatggtaacaaagtaccttctaaaagataagtgctatgacaccatgtatgaatgtaattctcttagtaatttacctctgactatttggtgtcttaacgctttggtttatataatctcaggggttgtctgcaaaccaaaactgacatattctgtggttagcttttattacttttttttttaacagaatgctttgctttggttatatttcttctttcttcttttgtcttatatggattaataactagtctccatgaacttcacttgaaagagcctgtaaaagttagatgagtctaaaagtgctctttgaagtagcagcaaattgggagtatatgctctgttatatagaaataaattgtccttgctattttcttacatttagctttgctagattgtatatacattgagctaagaccttaggaaattcactttctgcatgataaaatgacccaataaatattccactttgcttaataatgtacatacagtgcattattttttctatttgtagatgaatttaatgacagataattgtctgttccccgctgaaactgaagaaatctagtttttttgtgaacatttttgtggtcttatggataaggtacatgaagatttttgcagcagtattagtggttcagtggctgcactttattaatcagtgtgttaatttttgacagtgattggactagaccttttcaaatagagtctgagggtatcagacagtgaaaatgtgctgtaactaagtagcatgtaaatcagttgattgtaaaacgtttcgctgggaacttattttagctatattttacttcagacagattatgatacaataatctacctgtgcatcagttagtaggtgctgcagggtttcttactatttacagaaacattttgtgcagtctttgttataaattttcagaagactatactctttactttgaaggtctattttttaattatacctcatttagctaactagtattctaatacctggtagaaaaacagtgagccagcctttaagcatctaacaaaatttagactctttgttttgttttgaactgaagacatcattgggaaaggtaggaaatattagtttaggatagagcatacatgtcatatccagtagcataaaaaaagtattatctccctgtctccattaataaatttagctgtgcaatataggtgcgtttttgcagaagtttctagtaagagattataactccattttacaggttctgaatgctcagagtctatattaaggcttataaagtttttcctgtgatcagtaagtgacacatttaagcagacattcttttcaagttcatgacttagattcctttacaaatttagttctcaatctttaaaaaccacatttcattatgttggttaattattataaattttaagcactcatttctgcaatcaggtttctcagaattttttttttttaaacagaagagacattcctttttccttgttacatccaaggggggcacaggggtgggtggaaaggaatgtctaaaaatgaaatcccttgatatagagggacctagacggacaggatatgctaaaataatttcaaattctagcacaattttagagtagaataagtcatttttttagactaataaaattaatggctgtcatgttcactctgaaaaaaatctaaatgactgaaatgtacagaaataaaaattagcaaacaattattctagggatattttcagattttacttcatttcttgaaatgcgtgtgccatatgcaattgcatttcttgtgccaagaaactaatagaacttatttcactttacctttttttaaaatgtgaatttagttattatagttcaattttatggccttacagatggcttttattttgtttgcagctgacactgcagttcctttcatgcaaaataccataaactgtttgatgaaaatcatgcccctaatggaaactctctagtttttccatataactatcctactgtacatgtttaaacatattttatttttgctccaatggcttaatgtgaaaagctcctgcagataagtggacctgtcatgtggttaatcttgtttaagccaattcattaactgtgtactgatactgatgctatgttttttttaaatggattttattccaggtgaactttttttttataataatgttcgtctaaaataaaaactacataatgaaaatgaaaatgctaa

SEQ ID NO: 2292 - DNA, 3273 bp, Homo sapiens
aaggaagtaacccaccaaagtgaaaaagaggaacaagttctaacccaatgcaggtttaaaacataaccaaaagaacaaaagagagagcttgacacaccaatcttgaggtgttgtgccattctctgggaacatacagatgaaatgacctgaaccctgcccaccatttaaccaagtaagaatacaattctctctcatttaggttatcacgctataatagagaatggactcattaatatgggattacagaggaaggaatggttaagaaaaagacatggcctctgactgctccaaaaaaggataagcagggcttcacagaagaggtgacagcaggtttctggatggcagatcattcaaccttctttttcttgagttttctactctgctgtcatcttccactcatttctgcttcattttgtgattcgttaacagaaaaggaagtggaatggaataaaatcccccaatacagtacaattatacattaatggctgtaatgtgaagagcatcacacacgaagagagccatcttccagaaataagtttatacactctctcctctaattgcatcaggactttaccagataatgttcttccagatctgaaaaggaaaatgcctaaaagagcttccaaactcatttttgaataatactaggctacaaagaattacactgtgaattcattaagggtaacaccaaatcactaaacagcactgtttgtacagaaatgtcgaaaagctgtggaaataatttagcggccatttctgtaggaatttcgcttcttttactcttagtggtttgtggaattgggtgtgtttggcactggaaacaccgtgttgccacacgatttaccttaccgaggtttttacaaaggagaagcagcaggagaaaagtctgtactaaaacattcttgggcccccgcatcattggcttaaggcatgaaatctcagttgaaacccaagaccacaaatctgctgtcaggggaaataacacacacgacaactatgaaaatgtggaagcaggtcctcccaaagctaaaggaaaaaccgataaggaactatatgaaaacacagggcagtctaatttcgaggagcatatctatggaaatgagacatcttctgactattataacttccagaagcctcgtccttctgaagttcctcaagatgaagatatatacattcttccagattcatattagcttttcaaaatattgacttttgttattggatgataaatattcactgtaatttttcaacagcaaagacaaggaatcaaactaaatgttgatcaactgtagactggataaagaaaatgtggtacacatacaccatagaatattatgcagccgtaaaaaaagaacaaaactaacatgggaacagaaaatcaaataccacatattctcacttaaaagtgggagctaaataataagaacacatggagagaaggagaggaacaacagacactggggcctacttgagggaggacagtggaaggagggagaggttcagggaaaaaaaaaatatcaggtactatgcttagtacacacatgatgaaataatctgtacaccaaacccccaagtcacaagtgttcctacataacaaacctgaacatgtacccctgaacataaaattataattaaaatattaaaaataattcactgtgatttttattgtactgatgccattcttaatcaagttctgataagtggatggtctctgcctatctccacctttctgaatcctatgtgtatcgctgtggattaattctagatatcttctccaccctccttgcaccagactaaatctgtattatgtgatattgattcttccttctaaatattacccgttatctctttcctttatttctaccattatctttatctggctcagaattattgtcataggctcctaactgttcctcctgcttctagtttctacccactcaatcaattaccgatggtgttgccagatttatcttcagaaaatattcctaacagccacattatttctttcacttaaaatgttttaatgccccctctttgcaaaagacataatacccataatttgaactccaaaatttatggttttccacaattggttccaattcacttttccagtgacttctcttactatctctcatttctttgccttcagcagaatcatcttaaaacctgccaaacttatccttccttcacagctttgcttttctgcctcttctctcaagcctgcttcagatcataagttcttccacacatctcctgaatcactccaaacccgcatttacctttttattttctgatataagctttgatgcctcttcaattcttaggacatttaaacatatgaatgttgccacagcattttattacctagcttcatatgaaaatgtcttaaattcccacctaaatgaaaagaaactgcccaaatgcctagaacatcacataaggcactaaatgcctcatgttttactgacgggaattgaattgtacattttgctgagtagttttgagaaaaaaatctaataaattcatctgttattcatccatacaaggaatatttgttgtgtcttctatctacttgctattgtgctgtgcacctgagggacatgggttggtggaggggttacaaaattaaaaagagagacatggatcctgaacacatacagtctagtaggaaagaaaacatagtaaacaaatgaatacgatgctgctcatgaagctatgatagctcatctctaaatccactcttttatttgctcctctgaattgcttgacctgggcctctgcaaacatttcttttgccaggtggatccattctattctctaccaatagggggcactaaggaagaccgaaaggcagtaggaggcaacagggaattgctcctgcctattctttctgttgcccccgcaggaatttattgccatgtggtttactccagcatcactggttgtttgcagctttctagtttcttccatcattcccaggaccagcttctctgcaacctgtcagaagcaccagcaccagccaggtggcaccctcccttagactctgacagccagactctccttcaacctcctgaagtggtgcaggagacaagtggtaccctcagagttctgcgtcccagcctggcagggctcctcctctgaggtctggtaactctcagccaagattgttacagttactatctctgtggtacctgtgtccccttttttgtttttccatcctgccaatgcctgtttagccaattatctatattaaattctctctgttaaaacaaa

SEQ ID NO: 2293 - DNA, 744 bp, Homo sapiens
aatagtgaaataaggtggccaaggaggcagagatggagtcagggactctgtgatcaaccctgaggattgggaaggaactatacataccaggaggcaaggagcactgggggccctcctggaactgcctgtcacagcgtcctcaaaggttttcactctcctaggatgacccaggtatagaatctgcccctatggttcggctccaccctctcacctgtctcttgagagcattgtgaaattctgagacacagcaaggacagaaacagagggcatggaagatgctttcaggttggtttattcttactgattaaattaacacttcatgattgtctcagtctgcacaggctgccataacaaaataccacaaactgggtggcttaacgaaattttcttgcagttctggaggctgaaagtccaagatcagggtaccagcagggctggtttcttctcaggcccctctccgtggcttacagatggcgtcttcttgctgtgtcctcatatggcctttcctctgtgcatggagagagatagatctctggtgtcttctcctgttcttagaaggataccagtcctattagattagggcctcacttttacaatctcatttaaccataatcacttctttaaaggccttatctcccaatacagtcacattgaaggttagggcttcagactacaaattttaggggaacacaattcagtccataataattatccaagtagaaagcaggatacatgagaatgcag

SEQ ID NO: 2294 - DNA, 1807 bp, Homo sapiens
tggaagaaggcttggtccccttggcttggtgagatcatgaaataaaaacatcagtaggaggggaaggaggaaggaaggagaagaaagaggaagaataggaggagaagaggaagagaggaagaagtcgtgaacagccctcctgcattttgcatcagctcacacatcctctccattctctgaattcccacaaagactgttattgctggggctcataaaattatactccaaagtatgacgctttggcatccagagtgctttgaactaaaggagactgaaggccccagaagccaagtttccctctgaccttctcctgccttcctgtcttccaccccctacttttcccctgaagtgagtcctggaaaccagaattcttcttgcccaaagcaagccgtgacaccctggaaatatcactctaaccttccttgcctttccgtgtggcagctggccatgaagaaattctctgacctaccttgtttgatagcagatcacaagaccctggttccagagcggtcctgctttacaccgagggaaaggaatgtcatacagaaaggccaagaagaatctgaagagatgtccaatcacctttgcacgtggctgcccattcttcattgaacctaagcattaaaatagacagtttcccctgggtctttgggtcttcatttctgaagactccatgtcatgtaaaactttgattaaatgaatgtatcatgcattacttttgctaacctgtcttttgttatagtagtgtcgcctgtgacctttatgatgggtaaggaaagatttcacatcttttctacccctacattatcatactgtgaaattttattatatgctgtcttgccctcatagaaagagaattttggagtttgaaagaatcctgctaatcatgaaatctggtcctttatttaacagaaaaattcccagagacatgaaatgattagtactgtttcacagagaagcagagggagagccagaccctcagtcagtccaggctctgctgtctttggaggtggggtttcaggtctccccagcagggttgtgaggtcccaaagaacgggaggcaggccttgggccatagtctcctgcatccctccagagcctgcagcaggagctgggcccaaggatgctgctgagtgagtccacatgactgacatacactgctctggaagcaccattccggcagactagccctcttcttcccatgtaatccaggaaggttgttatagatagtccagatttttctagataatcttgtaacatattcacattcaacatacatacaaaaattcacacttggtatgggtaggagaactgtgcagacttcagtagaatttatttattaaagctttctgtagacggtcatttaaggccagcaaaatgttttcgatctcaggggttaaatggattcaaaacagaaatcagtaaagctgtcattgcagatttctgtaatagagaggcaagtataacaattgattaagaactctatccctttatatctatagaacatataaggcccctggatacccctggacctcaacgctccacattccccatttcagaaatccaggaggacgtgtggcaccgtgaggggaccacagagaccctgtctctcctgtctagtctatgcatcttcactcgcctggcccccacttcacagaacacagaacaggcattcttgctccaaaatcccttgctcattcgctgcccctatcctgctgcttacccagattttaacccgtgagtcaccccacaccctcctgacatctgcttttctcaggacatggaaaatacggacttgggatttgag

SEQ ID NO: 2295 - DNA, 2008 bp, Homo sapiens
cgaattgcagaaatccacattcaaactggatgcatgcgttcagcaactggaagctgagttcatatttcattgcccaactaccctgaccacttgggaatcgcaggtttggaaggacccacagccattctgtggaaatggatctgctttcaggaccgaatctcagacttcttggggaaggtttcagtggctgcctttgctgtgcagacctggagatgggtctgatgatcggacacctgaattatctgtgtggctgagtttcaagaagacctgctggggtgaaatgaaaatggtgcctactagaagccccagtggctttgctggtggagatttgctcctccactggctcttcttgtagacacacgactgctacagtatcaagggtctgatgcagacatgacaatgtcaagaggaagaggagagcctcgctcttcccaggcttttgcttttaagagcagaaaaactttccccagagttccaccagctcacttctcatcttacttctttggccagaactggcccttgtgcccatattgtcagtcaaatgccgacaaaggaaaggggccactatgagtggtttagacttggattggatttgtccttattggattgtccttaagtcctttgaaaaagaagtatacaacagaatgaaatcttgactcagctttcaagaataaagagggtgagatgactgatggatggctagcaaaatcagatgtgggctctgtcctcatggagcatacagtcagaaggggaagatttacctaattacactaacaaacttataactgtggtcagtgttctgaaggaaaggaaatccagttgtatggtaacgtataacaaagaaactgaactaggatggagatgggggtggtaagtgtagttggggaagccagggacatgatctgtaagatggctggcctggattcaaattccactccacttacttgctgtgtgattttagattagtcgcttctcctctctgagctcaacttcatctataacaatctttcctagggttgttaaaggattgaatgagccactctatgtaaccacttgacacatattaggcacttcagtggctccttttccagattaaagaaggagaaaacgtgtatgtttggagttagcacaagacaggatgattcctcatgtttgttttggaaaacaagtcttaaactcacagccatgacagagtctgacatcatcagacatcaggcgtgttaagaattgcactcttaattgaaaatgtccagagtttgtgattaattgcaatccttttcagatcctttccctaagaatttaatttttctccccacccacccggaggtcaggcttttaatgtaacaagtacaatcaatcttccactgaagatggcctctctctagtgcaagctggagcaggactcatctggattagaagcctagacggtttggagtcacctggtgaggtttacgtgcacagctggggcccagcctacctaattaggaccagagagtggttgagaaggggaccggcgcgtattctaggcgccctcctccagtgtctgtttctaataatggcagaaagtagcagaggcggcggggtgagcttggagcgtggtgacatcatccctccagctgttttacacatctgtgacatggctcattaggactctcttaacacctcatccttccctgctccacacagctccagttgcatgagaaaaggtgctcttgcatgtgaggggccccaagactggggctgacttcagggtcaaagattcgcttgggcactctaccagtcatcagaattttcacagagacacccccccaacacacacacccgcagcatgcgctccttgaaagtgctaatagcttcaatatgaggctggcacttctgcatgactgttggtgttcagggccagcctagtcttggggagtaggccatctgtagcagctgcagaaatgtttttgcttattttgagcattctaagtttttcctagccatgaataacaacaatcgaataaat

SEQ ID NO: 2296 - DNA, 6337 bp, Homo sapiens
agagcattaccgtgtgagctccgcctcccgtcacagcattaccgtgtgagctccgcctcccgtcacagcattaccgtgtgagctccgcctcccgtcacagcattaccgtgtgagctccgcctcccgtcacagcattaccgtgtgagctccgcctcccgtcacagcattaccgtgtgagctccgcctcccgtcacagcattaccgtgtgagctccgcctcccgtcacagcattaccgtgtgagctccgcctcccggcagagcattaccgtgtgagctccgcctcccgtcagagcattaccgtgtgagctccgcctcccgccagagcattaccgtgtgagctccgcctcccgacagagcattaccgtgtgagctccgcctcccgtcacagcattaccgtgtgagctccgcctcccgacagagcattaccgtgtgagctccgcctcccgtcagagcattaccgtgtgagctccgcctcccggcagagcattaccgtgtgagctccgcctcctgtccaagcattactgtgtgagatccgccccctgtcatatcattactgggcgagctccgcctcctgccagatcagtggtggcattagattctcataggagtggaaccctgttgtgaactgcacatgcgaaggatctaggttatgcgccgcttatgaaaatctaatgctgatgatctgagatggaaccgtttcatctccaaaccatccccaccatccccacacttgtccgtggaaaaagtgtcttccatgaaaccagtccctggtgccaacaaggttagggaccaccagtttaaataaccaaatactaaaagaactggcatagaagtaaatgggctgctgctttatttttaggctgttctttttagagaacaatgacaattatttccaagtttgtcattagaaagtaatattaggttggtgcaaaagtaattgcagtttttgccattactttcaatggtaaaagccacgattacttttgcaccaacttaatatgataaatttgttccttaaagtgtatttttggtaagaaaaaccttttgtttttccttatattaattttttgttttttttcttggtagagacagagtcttgccatgctgcccaggctggagtgcagtgctgtgatctcggctcactgcaacctccacctccggggctccagcaatcctcccacctcagcctcccaaggagctgagactacaggtgtgagccaccatgcctggctaatttttatattttttacagagacagggtttcaccatcttgcccaggctggtctcaaactcctgggctcaagcagtcctcctgcctcagcctcccagagtattgggattataggtgtgagccactgccagaaaaacttttcctaagacaaggcaggttttacattatatttagattttttttttaatgatgtcttttttggcagtgcacagccagagaacaacacatcacacacaggaaacagttgtgctcatgtgatgggggcctcagcactaggaaggagcggactattggtgcacgcagcagcttgaataaatctgaaagtcactatgctgtgtaagagaagccaaattttaaaagtgcatactgtgtacagagggtgtcgagaatgcctcctacgtgacggaaagcagatccgtggttccctgcagactggcaggagcagattccaaaggcacaggaagaagcttgtgggtagagtgtgttcattatcttctgtgcattacaccataaaaaagctggtcataaaaatgcgaaccaaaaacaaaggtgaaactaggataaaatttctcacctgtgtgattggtaaatgtgcaggtttgacatcatgctttgtttatgaagctgtgggatacaaggactctcatacgtcactgtggaatgcagaacattgcaacctcatggaagaggatttggcagcatctaacaaaagtatgtggcatttgccctttgactcagcaattctagactgcctcaaaaaaaactctggcaaaaaaatgaaaggactttactcacagagttcttttcacgcctaaatatgtttgcaaccaagttcttcactgtggcatttgtaaaactggaaacaatcaaaatgtccatcagtaggggattaggaacattaattcgtacagtggggaactcagtaccagaaggagggatgaggaagacctattgataaggggcagagtacatatcatataatgcaaatatatatttgctttttcttaaaacagtacaaagataaaaaactaaagtggttgctgtggaggacaggggtcaatggtggaagtgagactgaaatagactctgaagtaatatctggactttgaaattataagtgttttacatattaccaaactaagttttaagatagtccctaaaattgaaagaatagtatctgaaatgaatgaatctaaattccttggattgtcttctgcaggtgccaaccctgagaccaaaatttggaaggtggccctgagcagcagctgaagggaagcgggaggtaagacaggaaagaggtgagggcacagggtgtctgggagccggatcccacgtgggcagctgggcccgtgctcattgtgggagctggtgcattccttcaccagcccacgctccacagggtcaggatggtcaattccgggcaccccggcctaatccaggacatgctcctgccaccagagaaagcccctaggcagcatcccgggtgctggtggtgtcagaatcaagtttgagtctgaggagtgacctggggctggctgggctaggcagcatcacagggttctgcagcccaactgcacatcaggctggtgacagtcacacagcctattacttcgtgtgtcatcagagcatcgccagaacgcagcacttcaagtatgcagatttagtgagccatagtttaaagacaaatagagccactgaaatcctaaatttcaatcaatcatctccttgttacttgtcttattggtattaagcctttgaaattatctggggtgggagttaaaactataactaattatgttaatgctaaaactaagatttttctggccaggtgcggtggctcacacctgtaatcccagcactttgggaggccgaggtggacagatcacctgaggccaggagtttaagaccagccttgccaacatggtgaaaccccatctctactaaaattcaaaaattagctgggcatggtggcaggtgcctgtaatcccagctattcaggaggctgaggcaggagaatctcttgaaccaggaggcggaggttgcagtgagcctagattgtgccactgcactctagcctgggcaacaggaacaaaactccatctcaaaaaataaaaaaagatttttctgagaaaaaggtgtaaaaccatatactaaatttgaaatagaaatataagcattaactctgttgttcctttcacatagacacatttcctagctctgccccaggagcagtaggcacatgaagcacctagacttggtctctaatacatgaaaaccatgaattcatagtgatggtttcaaagccaaaaccaaccaaccaaacacatgtaattggtcactcttggaggtacctagggcactaactcctaacactgggagtggacacttgagggaagatcagcgattatcccaccttctgtctacaaattgcaatcagggaaaccttgctgattaggaaaagttctttacagaagaattcctgcaaataagtgagtaaagaatgacagtttaagaattgtcccagcctggccaacatagtgaaaccccatctctaaaaatacaaaacattagccaggcatgatggtgggtgcatgtaatcccagttactcaggaggctgaggcaggagagttgcttgaacccgggaggcggaggttgcagtgagccaagagtgcgccattgcactccagcctgggcaacaagagcgagattctgtctcaaaaaaaaaaaaagagttgtcaaattgccaccccaatgctgtggttctctaacctgtgtaacaggatcacctggagggaccctacccgagaccttccgattcagtcctgggggaaccctaccccagatcttccgattcagtcctggggggaccctaccccagatcttccgattcagtcctgggggaaccccaccccagaccttccgattcagtcctggagggaccctaccccagatcttccggttcagtcctggttcggcctgagaatttgcatttctaacatgtccagggaccacagtttgaaaacctccacagctgacatgtaatgggatgacttggtccaataaatgaaggaaaagtaacaggtggcaacctcaggcagcttcatcccaaccagtaagaaagtaaatccttttgtaaactaagaggaagtattaatatgggcgtttgagcaaacatttaagtgttaggacaaagaattaaaaactagcacaggcacccctgaagcatgataggatggcaacagaagggctgatttagtttccaagaaataactgacaggcagtgttgtgtgtgtgtctactgcttaggaacccaaaacaaaccttcagaccattttcatgagtactgagaccaggaaaaccactgggcagtgggtggtctggaaatgtaaatgtttatagtactccatggagtactatatgagtcatggaacgatgtttcatattgaaaatgttttataaatgtgggtttcaaggttttaaagtgaacccatgtgtgtgaggagaaaggacacaccaaagaagtaaaataattgggtcaatataaaaagaaagtagaatattgcccagagaggagatgtggataattcctaacacggatcaaaggtgagctgtgtctaagacagtcagacctgcaccgtcccgtgcagtagacaccgtggccgctgtgtctgagatattcagaccctcgccgtcccgtgcagtagacacggtggccgctgtctgtaagatattcagaccctcgccgtcccgtgcagtagacacggtggccgctgtgtctaaaatattcagtcccgtgcagtagacacggtggccgctgtgtctaagatattcagacctgcaccatcctgagcagtagccacagtggcaagtagcctctgcactggacagtgcagctacagaatgatgctatcactagaaagttccatcagccagcactgatgcagacctttgcaaatgcccctcacactgaatagcacctagctgatagattgtccactactcagtgaaaagcctgtgttaaaagcagtatttggtagaaaagcaaaaaaggggaaaaaattaaaagtggtaagtcattgtcttccttactgaattctagcagaagaatgttggaaggaagatgggagtcacgggagaaagtatcattgtcccaggacaggagggggtgccaggcatggttggctctgtccctggaattctatggcgggaatctggaaaaaggaaaagtgactggagaagaaaagattctgtgtgcaaatgtcatgatgcagccatcagtcatcctgagaaaataagcgaacaaagtggcttcagatggatgctgttggatacatgtacagatacaatgtacacttgcatatgcttgttcacacaaaggacaggatggttatctgttcatttaacaaatacttgttgagggcctatatgtgccaaagacatcagatgcataagagggtgcactatggaaagcctcaggaacacaagtgcccagaaacatttagaaaaattctaatgaaaacagaaaaggcattttcaaattagctgagagaaacgagaccaaaggaaagactgacccagtatttggatacattatgtgatgaaccttaatgcagggaggaaagtgttatctttcagttaatttctcaacttctggagagcttagaacagacctggctaggaggaaattgaatctgaggcagatgaggagatagtggtgccttgatgcttccagtgattgggtcagcagaaccaggggtgggagatgatctctctttttgttggcagatggtggtctctgctgtagctttgtcccctggtgacgggactcaggcagcaacccccatcattggcaatacccccacctctgagaatgtggagaggacttgtgaagacaatgttgtcccaagcagcacagcccagagttttgcacttgttgcccaggcctggagtgcaatggcccgatctcggatcactgcaacctcctcctcccggtttcaagcaattctcctgcctcagcctcccgagtagctgggattacaggtgtgcaccatcacgcccggttagttttgtatttttagtagatacggggtgtctcccaattggcc

SEQ ID NO: 2297 - DNA, 650 bp, Homo sapiens
gagtcactcactgtttgcatctggaataacagcttccagagtcagacttttgctaaggagatgatttgacatgttggaaagatgcagattctggatccagagagacgtaagttcaatccctgttacatccgctagcatttctgtagccttaggtatattacataactcacagagtctcagctccctcctctgtaaaatgcagaaagtgatacctccctcaaagggcagataaaggataagggcaaataaaaactctattgttggggaagacagaggatggatatggcctttcctatcttatatttcagatccattcattcatctgtccattcagctgttgagtccatgagagcttactgggtgcttctgagtaccaggacatgtaatgggtgggacacaaacacaaataagaccccatcccaccctcaaaaagccagacagggactgacttcagtctttgtcaggggtggatggtgggtgcaacagagcccactcaggcctcctggcacctgcctaccgatccaccctcatgtgaaagagtctttgtgcatcctggtggcggtgttgcgggtggcaggaagctctgatggccctccgggcttggcttctgccacactcccagggactgctaaggagtcgctttccagccg

SEQ ID NO: 2298 - DNA, 5714 bp, Homo sapiens
aaaataaaaacatgagtattcaagcaaagaacatgtattttaaagacttctcaactgactaaagtctcaaacaggaaaatacttaccataacagcaggctgaaatttcaagtaaaaactaaagggtaattttttttttagtgtgtattggaatgaatcagccaaaggtgggttcaaattaatgcctgtaaccttgataaattacttaccctaattttttgttttcttaaccaaaaagagcagggatgataatatctacagctggagttgttgagcattttaattaagatattatataagttttctagcctcagtttccccaaatggaaaatgaggataacaattctcacttcaggattgttatgggtatatgacaatgtatacaaagtgtttagcatgatcctggcacataggaaatgattacttaaggagagtgacttttctatatcactaatggcagaaagcatggtgagagtggtcataatacctggagcagtagtagtggtcatcaaatgttggtttccactcctttatcttataggggccaaatttggcagagagcttaagtaatctgtctatacttttattgaaatctactttgaaattccaccaggtttctcacccaatgggactgggtggggaaatgtccagatgtaagacattatcatctagtggtgtgtgtgtttgtgtgtctgtgtgtgtgtgtgtgtgtgacaaagagagagacagagagcacttgagtgtactctgttatattatacatgccacttcctaaagattctgaggtgtgagccaccgcgcccagccagtttccctcatatctttattccccaggcctcgtatactccctggcacataatgagtgtttagtcaacatgactgagtgaattaatgaatgcttgaataaatgaacaggtagtagagaatgaatatattggatatcgttatgaaagcaaattttcatagaaaaagagcataaagccataggaacccccgcagaagacacgaaaaacaaactcactccctgcttttgcccagagcaggcttacagctggcttcactttagtttatcctagatttctcttaggacattgaagacagaaaagatgtttgtaacctgaagtgtcagggaacaaagccagaaggtgcaacatgcagaagaaaacatattcaatgagtttctgaatgctatcctgtttttctcttcaaacagaaagaaaaactctctctctctcggccccccaccccctacactccccttctccctctctgtctttccagtcaaagagactgcagcggatggcatgccttaagtgcctgcatgtgccgatctgatccgcccaagctaagtggccaaataggatactccaggcaatacccccaagcccccctgcagctcagtgagaaagacgatgcaggaatacctgtgcctgcgtcgtgtgccgccactaggggtccccagcagcaggcgatgtgaactgggaattgggtagcagaggcggcctccctttgtctgcaccccaggtgtggactcctctttgttcagaggcagggccgctacctgcggcgtctgagctgcctgctcattaacccatcctgggccgtctgtgcacctcctgaggaaacagcgggtttctcagctcctgcccctagtgacgcctgcctcagaagagccaatgcgttctctttctcaggactaggtgtctttgtatttgaaataaggcttaaactacagagcgaaatatttctcactacagcaaaagagcattttgatgttgagaaattgatggcaaaaggaccactttcagggtacggtagagtacttgccataaaatatttaaagctagttgacgaatagccctgctattctcctgtgaatgcccaccactggattaatcttgaaagtaaggaatacagtatttcattctgtgtttagcacagggaaagggaatgaccttcactaaaaaacactccagaatgcctgcagtgagggagcacagctcctgctatgacagccacgttcaccctgcagtgctttcttgtctgcttttaaacttcaaaagaatggtgaaacaaaataaacaaattacaccaccataagagctaccctgcaaacaataaatcatgtgaattgtaacagccggtgaaggagggtggggtggggattgcaaatatttactccatcaagattttattcttatgtttcaccgtttcagtcttttttgatcacagcaaaggtagtatccttacatgaccgtcaagttctttcttttgctgcagatgtgttgttactcattgtcttgtagctcagtggtcacagctactaacgtggaaaggaactggcatacaagagaaccatttacagatgtccttaatttgctcatttactcaatgagtaaacaattgaacaacatccactgagcacctattgtatgcaaagtatggtagacaatacaggggctgggcaaacaaggatcctgcccccaccatgcttttttttttttccctgagacagggcctcactctgtctcccaggctggggtgcagtggcatcaacagagctcactgcatccttgaacttctggactcaagcaattctcccccctcagcctcccaagtagctaggactacaggttaactacaacgcctggctaatttattttttatgtttttagagatgaggcctcatgttgctcaggatggtctcaaactcctggcctcaagggatcctcccacctcaacttactgagtcactgggattataggcatgagccaccaggccaagcccgctattaatggactaaggtaatgaaatatataccaaaagtaccattaaaataagacagagcatgagatctgcccattgagaggtacagtagatggactagagaaatccaacagaagaagagttattttctgccttgggaatcagggaaaactttccagagaaggtgcattctggttgaacccttttggtatgtaggatgggaagcaggaaggaatggcagaatccagtgctgctagccccaagggcataggccaccatgaaagagggttgcctttgtgaaaggggggaacagagattagattggaaaggtaagtttggaaggctttgaatgccaggtgaaagctaagttaaaacaaaatgataatttttattcttaagaagcccacattatccacaagactccgtttatcccataagtcttttaatatttgaagaaaaaaggcagaaatgtcttttaaaattctactttccaaacaattaagatttctgtagcaccaatattctttccactggcaaataggtattacctagaattaaggcaacacataaatgaataaaatagatgataactttttcattgtttcatttggagaaatactttagaaggtccacaaacaggtccctgagcctaccaaagagggatgttagcattttatttccagcatgtcctgataacttactgatactaaacatttttgcaaggagcagccagccttcaggctcctgaatctaagaaggatgatagtgaatgattattcatgttgagttttctgcattggttatggctttatcaatccagatgatcaatcaactttcagattttagttctgaacctggagctttctgtttggtattcaaaataatgggtgtcaaagttatagctcatatcacaccgacagactgggcctcccccatcagcacttctctgttcagcaagcgtgtttgttggccttgtattcctcttctggccccaggatccaggaaaacatgagtctcagcttttttctacttctgtacagcacagggccttcaggtggtgccttcacagcaaatacccccgtcccttcatctgtcaatttaggacaataaaaataatctgcctcacagagccatgctttactttctccagttaaaacactatgaagggaaatatgagtatccgaactgcagaaacataatctgttgtccttttgtgaaatttcagagatgaataatgaaacctgttaccctattgcacaatttgggacaagaaatataagccatagattgaagataagacatttccccctagtagaacaggtcacagttgattagttatctccagatgcaatgaagaaagcaaaaatttttcaaactatacattccttccttaaagtgagcaacttacaatcactttggaacacaaacttcatgccaggtacactgtagctttccacatagcatcttatttaatcttcacagcatcctgtgttatcagatttttgtggcaggtgtagaaactgaggctcagtaggtctaagtaatttgctcaagttcgcagctaagtgacagaaccagagtttgaacccagttgtcttcgaagcccagatggtaaaattctaccgggcgacatagccaagtcagatagtccaccatctaaagatctggggggctacatagattactagtcaaacaagtaagtgctgttttctatcagaagaactctggggaaacagtaagttccttctgatctgatcaacaagccaagtgtgtgatgggtcacgtgtccctgaaggctccagattaggaactgcatcatttcgtgcagtccacaaaatgaaggatagtggtaggggctgggaaaatgcgggcgcttgggtctccttagaccagccagggctgtttcaaggtccatacagttgaggggtaggaagacgcagtcccacgtgactgaagagtgctcacactcctttaacagtttagcaaggtgtatttttaaaaaatggaccttaatgagaagacacactgggatagtatcctggagggatttttttttttaagttctaatcaactagaaaatgtgacgtgggtgcgtactgtgattatttaacattcattattcactgtatgttaggtccttggttgatgtggatccccagggcctagctgctgttctgtgtcactcctgataatttttaaattgactatgttcttttaaccatgttttaaaaagttgaactaccccaatgtgaacactttccatttttgctatataatgagagtactttcattcctttaatgtttgctttttcctttgatctaacaatttctcttcaaatttcacagttttctgttgctttaggattgaaagaaccgattagcccgctgggagcgtgaaacagacttaaaaaaaatctgcatggtatttcctcccagtgaaattaatttaggtttaaatacagggggaagggacacaccttgtgctcgagtctctttctctcacacacctgagcagttcctatcctgaaagggcacagtcggacctgctgccaagtcttaagtcttttgtgagaatctttttttgcaaggcacggagaacctctttctctttgacaccagctttgtgtgggcctgatgacacgtttggacggctctatttctttgaaggccaacctcagaggcccacggacgcgtcgggcactgtccgtggctgggttacttaagtgtagctgggttggcttcccgggtgttttaggaaacgcaccttcttgcagggcagggaccgtcagctccagagcaacaaaggacaatttggagaggagtggaaggagcgctccatagtggctctgtcatcccaggttcccttctgcctagcaccgtggccctagtgatcccgccttcgccctctggatcccccacccccactgtctcgctgctcgagagcccgg

SEQ ID NO: 2299 - DNA, 1516 bp, Homo sapiens
ctggatggtaattttccaggggagacgtggtccaagaatgttaaggaaagaacaagtgtatgtctggcttctactgagtgggccataatcatggaaaatgggcaaaaggaggctgacttgcttatcatgaaagaaaaacgagctgccacttcttggaatgagagtaatccttaaggactgtgtgaaggctaacaaatgctgatgtatctagaatccctcaggttgccagaatgaagactgaagatcttgcacattaaggacataaaggaagaatgaatgacctctgagcagagttgaagtgctccttaaataccatcggaacaaaatgggaggatgacttaagactatccttcagtttctactgactcaggagcccatgtccttgaacttctgagtttgctctaaggagctagaagacctgagctcacgcctggccatgtggccttagacaaggcttccacctttcctgcatctcggtttctctacccagaaaaccaggtcatttttgtccagagacttattttaaaaagcaaaacttactagggttatgggacgcgggggtggaggggtatcattagcaccacagctgactcacgtgactgaagaagccaccctctgaagaatgagtggaaagcagggtgagcagctattagtcactggcaacaacacatgagcaaggaaggaaggagaaaaggggacacgtatcagtcatctaccttcttctggacacgtcatcaaggatgatgaactcagcacaaaaatgcagaacaattctccctcccccttcctaaaatgtatgaaatgtcagaatgtttactgggctattcagaaggaaaaaaagtccatataaacacatttcaaggccaggtgcggtggctcacgcctgtaatcccagcactttgtgaggctaaggtagatggatcatttgaggttaggagttcgagaacagtctggccaatgtggtgaaaccgtgtatctactaaaaatacaaaaattagctgggcgtggtggcgggcacctataatcccagctactgcactccggtctgggcgacagagtgagactgtctcaaaaaaataaaaaaccaaaaaaaaccccacaaaaaacccaaacatttcaggtgtacagtaacctcaaccattcataagaaagctacaaaccaggtggtaactaaaaaaggctgcagggccgaattcagggaggctatagagcatagtcaaaaccttgctgggcttcccgagtgtcctggttttaaaaggacagcaagggaacaagctgggcctctgttccctcaatccctgaatactggattgaatccagggcaagagagcccatcagctaactttacttcacttcttgaagttaaagggctctgaatgctgtatgtagatttttatgcagatgagtctgtgaatcacctccctgtgtctactaaaaaaatctggtaaccctttctccctttggagagctttaattttccctgttgcagagaagtggcatttctaaagtcttgtcc

SEQ ID NO: 2300 - DNA, 604 bp, Homo sapiens
agtgcaatcttcggttgcctggactagcgctccggtttttctgtgctgaacctcaggggacgccgacacacgtacacgtcccttcgatagctcagctggtagagcggaggactgtagctacttcctcagcaggagacatccttaggtcgctggttcgattccggctcgaaggagacaagtgcggtttttttctccagctcccgatgacttatggcactttccttgggtgccttcagtgacacattgcattccaacgagcagtttgaaagtctagcgctttctccccattttgggcctcccagcctgcacgggactcatctgaggctaagctgcccatagttcggggagacccacagggaaaacaaaacaagaaacagagaacttggaaacggacgctgattactttgaacgtttgctcaaccgaggaagcaggaactgttcggccccatctcaagtccgcagggcggactgcctggctctgggcagatccgaggtggataggacaaggcaaaaggtagccctggagagaggcagccaccctctttctcacttccagtgggcacaagaaagcaagaatacttcctttctaccttagaggctgagc

SEQ ID NO: 2301 - DNA, 252 bp, Homo sapiens
actgtaacattattaataaattaacatgatgttttgcaaaatgtaaattaaactgagagcagaagtgacatcgccctgacataaaacagtgaagcagtgctattattcttacaatacaaggcaaattgtcttgattttccctcataaagggtgtagattaacaaatattcaccaaatgacgagccccgtaaaaagtgccagaagctatgctctgctctgtgaagacagtacatcctagaaagcatttgtgag

SEQ ID NO: 2302 - DNA, 1449 bp, Homo sapiens
gccaaatcttttctccattccctatgccaagattctccggcataaacacctatggctgccaaaccttcctgctcttgtcccaacataagcaaactgaagatgactaccctttgcgctctctgcaatttgctttgtatatccagttgccagatgcctgcagaatttttgcatatatgaatgaaacctcttcccgaaaggaaaaatgggacctccaagctcttaggtttttatcaattaattcaataattgacccttgggtctttgccatccttaggcctcctgttctgagactaatgcgttcagtcctctgttgtcggatttcattaagaacacaagatgcaacacaaacttcctgttctacacagtcagatgccagtaaacaggctgacctttgaggtcagtagtttaaaagttcttagttatatagcatctggaagatcattttgaaattgttccttggagaaatgaaaacagtgtgtaaacaaaatgaagctgccctaataaaaaggagtatacaaacatttaagctgtggtcaaggctacagatgtgctgacaaggcacttcatgtaaagtgtcagaaggagctacaaaacctaccctcagtgagcatggtacttggcctttggaggaacaatcggctgcattgaagatccagctgcctattgatttaagctttcctgttgaatgacaaagtatgtggttttgtaatttgtttgaaaccccaaacagtgactgtactttctattttaatcttgctactaccgttatacacatatagtgtacagccagaccagattaaacttcatatgtaatctctaggaagtcaatatgtggaagcaaccaagcctgctgtcttgtgatcacttagcgaaccctttatttgaacaatgaagttgaaaatcataggcaccttttactgtgatgtttgtgtatgtgggagtactctcatcactacagtattactcttacaagagtggactcagtgggttaacatcagttttgtttactcatcctccaggaactgcaggtcaagttgtcaggttatttattttataatgtccatatgctaatagtgatcaagaagactttaggaatggttctctcaacaagaaataatagaaatgtctcaaggcagttaattctcattaatactctttatttatcctatttctgggggaggatgtacgtggccatgtatgaagccaaatattaggcttaaaaactgaaaaatctggttcattcttcagatatactggaacccttttaaagttgatattggggccatgagtaaaatagattttataagatgactgtgttgtaccaaaattcatctgtctatattttatttagggaacatggtttgactcatcttatatgggaaaccatgtagcagtgagtcatatcttaatatatttctaaatgtttggcatgtaaatgtaaactcagca

SEQ ID NO: 2303 - DNA, 6890 bp, Homo sapiens
ggaaatccaaaagggattcggttggaatctgcttattaccttatcttgcaccctggcctggttcctgctccatgacttgactctgttggatcttggcattaactctggccaggacctggtgactgttccctgtaatgaccttcagtttcattggaaggggaaactacagataatagacataggaacctaacagctcccagaagccagactgagaaagaaaagcataaaggacacgcaacagcatgatgcctgagcaaggaatgtggatggagaagggaatattggacaaggtcaggaccgccacttctagagaaatgtgataccgggacaagatatgactaaaaatgtctgcagagcagcagagagtgcctacctcaagttaagtaacatgaatttgcggtgaattcagtgcatttcataatactagagttattattaaaaagacactgtttattatttaattggttttgaattgtttcttatgaattaactttgtctctccaattataactttcttaggcaagaggacatttctgacataatgtttatatcttccattgcacttattacagtgctagcgatataacacatacccagcagaaggttgatagcatataaacaactacattttcaacttggcctttatgatgtccctgcttctggattttgtttagttcttctgctattttccaggtaggccagagagatgcattaatttccttatagaaatcggttgattaccaacaaagttcagagagaagaaaggacagcacagacactcttgtgtttactaacagtggatcatatgtggcaaactcatcatgggatagcatccgatagtccatgaatatataggataataaaatttattcaacatcctcctaagaataatgtaattaaaaaagaaatccacttctcaaataccccaaattttaccccaaagtctaattggcatttgaattattcactatcttgagttactcttatcaccacttcctatcaggggatatccaagatatgactacaccttaagtgccaaccacttctccaaggttgcggactagtgataccagagaagcaagtgctctcatcagaagaggacattttgaactgcagcttttctccaggctcacaagtttaatttcagcctaacagctgcactgcagtccatgaaatatttacattgtttcttgcaaaattatatacattatttaccataccatctattaaatatttaccacctttccaaatacgtcatgtagcacactccactgctcttgtttcttttagcattaaaatagaaaaggccaagccctgcaggagcctggagaaagtagctatgacaaagaagaaagcagaggaggaaaaatgtgaaaggaagcagaaggcagctatctaaaaacaggctcagtattacacactccctattttcttcactttgccttcccctaactggaatgatcatttctttcacttggagaaggtatttttcccccaataatttatatatacaaacagcctaatagaaactgttctggaaataagctatattatcttcaggagccatattccaaaatagccaggtatgtaaaatcatctattaagaaaggcttatggtgatatcagaagtcaagacatcatcccaccttattcagaactcttccctacagaaaacagaataattgaattaattcggtataatataatataatataatataatataatataatataaatgaaatacattcagcactccctaagcaatgcgatctttcactctctggtaaatatgaaaattactaatagatgtgttgtcaataagacatatatggtacttgtgatcagtaaaaggtgcccaactatgaaaactgttgatggtgtcagggatgcaaaacaacaaaagaactaattggtttccagttaagcaagattttccttaacttgctcattgtccccaaagtaggctttttagagattgctagttagctaccaactatgtattctcctctactgaaattaacagaaacttgatgtttacaggtacacaccaaaagaccgtattttccagttttcctggcacctgcaggtagcatataaatatgtttccaccaatagaagtaagtggaaatgctgtgtgagacttccagaggtgcctttataatggagggatacatagcttgcttgctttcttcctccgtcctgctgtttgaaagctgaagatgatgactgctgcagcagtagccatcttgaatcataaaaataaaggccatatcatcggaatcaaactgataaaaactggacaagtctggcgttctgatgatggtggagctgccacaccatcccttaatggtctacctcaacactggtttcacatgagagagaaataactctgtcacatttaaactactataatttaggtcacttctacatgtagccagacttaaactataccaatacaactaggtgtatgcactatttctccctctcaaccatttcaacctacaagtattgtgtatccttatgtaggtctatttgctatcaatttttttctgagcacaattacttacatcttagtggtgcaagtactatgggtaatttcagtcatggttatctgtctactcagcatgaaagactgtctttgtttctactcatctgaagtcagagaatacccttctatagtaattatgaacaacctaaattatttttcctccaatttagattggactgggttacaaatgggttagtgctgccaatatgctgaaacatattatttatgtccatatccttggagctgtcaagaccttgctggttaattttcatttgttggattgagtagttatttgcaactaccatgcagatataaatgcattaatacatttgacttagacccagaaattaaattcctaaagcctcatttgtttcccatacaaaatagtttgaaaattttcttaaactacacttcaggtcaacaaacaatttttggatgcttatcatatgttaccatatgttaggaaatataaagcatgcttagatgagattcaacaagtccaaaacacataagtagaatctcaagagggagagggggcagacaatttgttattattatcattttaattggtcaataatattgtgtgtttttatcacgtacaacatgatgttttgaagtatatatattgtggaatggtgcaatatctcacacagctatcatttttgtgtaacatcacatagcatccattctctttacatcttaatacactataacattattaactatagtcaccttattatacaatagatctcttgaaatttatttctctaatttaaccgtagttacgtattccttgaccaatatctccctatctctcctcccaaccagcctagcttctagtacacagcattctactctctacttctatgagatcaacttttctagattccacaaatgagtgagatcatgcagtatttatttctctgggcctgacttatttcatttaatataatgtcctccaggttcatccttgttgtcacaaatgacaggatttcatttctttttatggctgaatagtattccattgtgcatatataccacattttctttatcaattaatctgtttatggtcatttaggttgactctgtgtcttggctattgtgtatagggctgcaataaacatgggggtgcaaatatgttttagagatcctgatttcattttctttggatatatacccagaaatgggattgctggatcatatggtagttttatttttaattttttgaggaacccccatactgtttttcataatggctgtgctaatttacacttgcagacagttttgaagaaagcatttgaattaaaattatccttaaatgaatggatactgtaattgcatttttgcaccaaatgtagtcatctatggcatcaatacctctttttaaattttctagattttctattttgcttttctgaaatacattgaatcacttcatattgcagctgggatttcctgaattctctactttttaacattgaaatttcccaaagtgcattgcaggtgtttttataagaaggatactctttaagattggattgaatagatcataatagcttttgattaagacagatggtttcataaacgtctccaagactatttctatactagcaacatcttcggaagaatcaagtaaatatcattgactttgattattttgatgtttaaggtgaacaggtctattttatgtcattaataatatagacaattgcctgagttttcctctttgcaagagcgagcaaagcaaaagtgttctcaaggctgcattcataaatggtatactgctttgtagttaaccaaatgctgcaatataaaacaagattggtgagaacattagcaatgaatggcattatttttagatcttggccaaatgtgatttagtttggttttgtttagcctaatttcttgacttagactgagcaagtcttagctctgtgccctcttcagtgtggagttggcctttatgcatttgcatgtcacttttataattttctaatgtacagacttaatagtttctggctccccattgactactttgggaatggggactaactatccaatccttgaatgagagtgttagagattccaagtctactttatatatgtgaacactgttctattctgtaccccttaattgtataacaggataggctgatgaaggaaatacggaacttcgaatcaactcaaaagcccaacccagtatacattatacagatggtttgctgtattcccagcctgacctctgttcttgtcatttgcaatcaattatgaaattgtgaattaccttactttaaatctagtgaaacttactttagaaaatccatacatagatcagtatatttttgttcaaagagcatcaaaaatacagaggattttcttctaatttaaagtgagctgtcatgtcacttgattcaagtttctaattgtgggatgattttaaaataaattttgggaattactcagtctccaaaaagtattcatccaaaaggattgcaaaaatccaatgtctaaaatgcactggaatggtcatactctcaagatgaattacctttctttttatatcctagttgttgtgtctctgcagttcttcctctctgcaccaatatactttcaattgtacctacttacagtgttttggagaggatctgaagagagagagagctgaggtctaaggttttaatggagattttgtccagactgactttttttttactgatattttactgcttgagattagaaaagagaaatatcaaagggcaactcttttcataacactatttttcttacagtttatcctatatagaaatctgctcagttcactaattttaggcaattttaaatctattttctacattggcatttaggagttatttgagtgccaaagtataaaagggggaattacgttcctatatgtaatataggaacataattaattaaaacacaagctttatcggttcatccatagaaaacaaatttattttagaaaataaggaaatcaagtgctatttaaaagtacaagaacagtttaatttcaccaaagaaataaaccaactctggcattcaaccaactccaccagcttccttggggactaaattctgtctgcacatcaatgaaagaatcagtatttgagacacgaagtaacttttggcagacattgaaaaaggcaccaaatggtctctgtctttgctgtgatcaactgtgaaatgaaaacctaccatttaaatcacttctactgaaacctaattcgttctccttcagcacaatacagaataaatctcagtgccctctggcccatggaatttttcttaaaataaagccaacaatatgaagtttctgtggttggaacatcgtcccaatctgcacgtatacttgatatctcaaccatagtttgaaatctagtttatcagtgcattgtctggtgtgtacagtgccaacctcatttaagtgctggttctaccactagctacctagtcaggtcatttttcttctatggccttcattttcttcagtgataaattttaaaaaatcaaactaatttcaaagatttctttcagcttttactttttaaacattttatttttattgctacataacagatgtacatgttttccttccagctttaggggcctgtgagcccagctgatttttcactatataaaacagttatttggtggtatttagtcatggatttaaattgtctttccctcctctctccaactttcaactatcaaacacaattttacaaaagaatttagctactgatatgtgaaataggactggtcttacttattcaaggagtagatatttaccttcataaggcaatatgctcgtacttcatacaaaagccctctgcagagaagcaagcctccaagacacttcatatttgtgtttctttgtcttatgataattttgtctacatgcaacctaattcttggaagtaaagtataggatctcttactgaaagcaagtatattttcaatgtggtttggcaactataataaaaagtatacttggttattaaatataactatggactccacagcaaaataatcttataaaagaggtgaaaacttccacttgtaaagatgaatgtggtcattggactttaggagacattgtatatacctctaaatgagggaaacctctgaaaactacatttagggtcaagcaacaaaggaatttcaatactagggaaaagcaggtgcttaagttgatcaaatattcaaaattgatcaaatgcaatacaacatcactggagtatcaaaatggttatgaaaaacttatttacttccttaaactaaaatttatttattactaaatttattgaggcacacatacac

SEQ ID NO: 2304 - DNA, 1817 bp, Homo sapiens
aggccagagccatgatcagagggcgcgcagtgaggacgcccccagcccgcctcggagcttggggccgcgctggggtcaagcggagcgcacagaggcctgttatctgccagggttaggagccaccgtggccaggtgccctggagcgggccctggacctgcgcgatcgctgcgggacagaagagcggagacgcggttcactgcctggcgcctacaaccagcgtgaactaagtggcgagtggaagagaataatttgccaaaagagggaggatttgctggtctactggcggaactggaacccactatacccacatccccattcacgagcgcccaccttgaaggcgtagagacgccatggttgtcatagaaacactcgtgctgggccgctgacatgagcctgcggcgtggagtgagtctctgaatcttgcccagccccaagtgctccctccaggatcttcctctggactctccatctctcccctttccctaagaagatcacccgggtcctgcctctccaagactgctcgtgggaatacacactgtcacccacacaagacagcctgctcaacgagtacttgcatcgccagcatccacagtctgcagaggtcagcaacagtttttatttctgaaacacatagcttttctcatccaacttgcccagaaatccaggaggtagatatcattcccattttacagacgaggaaacagaagcctggggaggttaagtaactcctccagtatcacatgtaataagtgacagaaccagcactcaaacccaggcagtcaagctctttcccctccccaaggagtctcacagagcagcagtttaaagaaccatgtctgggtgatatcttctggtgcttctatgagcattcatggaattgttgcatatgtgatgtgcaggtcatgagaatgtgtgatgttcttgcatcattttatgctgctttggacttgaagcagcatttctcagatacagaaattatgttggcaagttaagttggatgacaactacctacacccgtattttcttttattaatcaaatacaaatgtagctgaggtatatggcctcattcgatcctcacaaccccttatgagactgaaacagtggtaaagtgattccttcttccacattgtgaatttccttcacggaaaattctgaacatacagtacttcaaaacgtaaatcttttccacagtgtcacagatttcaaactaattataaatactacatataaatgctgtgtaaatatgacatatacacacacacacactataaatgctatatatttatatggtaacatctaaatgccaggtactgctctaaacactttccatagtaactcatttaataattacaatcaccctatgaagtagaaacttatttttttcaaagatatttttaaattattaatttttatggctgcataggtgtatctatttaggggtacataagatattttgatacaggcatataatgcataataatcacatcaggaactgggcgcggtggctcatgcctgtaatctcagtactttgggaggccgaggcaggcagatcacgaggtcaagagatcgagaccatcctggccaacatgatgaaaccccatctctactaaaaatacaaaaattagctgggcatggtggcgtgtgcctgtagtcccagctactcaggaggctgaggcaggagaatcccttgaacctgggaggcagaggttgcagtgagccaagatcgtgccactgcactccagcctggtgacagatcgagactgtgtctcaaaaaaaaataaaaataaaaatgacattagggtaagtgtgttatct

SEQ ID NO: 2305 - DNA, 17771 bp, Homo sapiens
catttgtgtttttcttcatttgcatatttttaaatcatgaatggctattgaattctatctaactcttacttcaccaagtaggattatttaaaaattttgtttatcttctaatcatcttttaatcttttaatgttattaattgcttgataattttttctaatgttgccctatctgtattcttgaaatgaatgcagtagatgaaattgaggtcatcacttttgtagacattgcttgctaaatgtggtagtcattagtgctactcactgatatttgtttcttctcttctttcttccctaactttaattaggcatagccaattcatggtgaatggaagacctgtgtgtcacttctgggctgcaatatttaattacaagtctgaactgtccagaacgatcttcctccttccaaagagatcttggaagcacatgttgcaatagagcttgtgagcttctagttcactgaatgactcattgaatagagttctttcgacaaccagaaaatgggcataagggaaaataaactttttttttctgttaaacatatgagatttgggagctttttataccacagcattacctgacctatctaagtgatagagtgagagtcaataagaatcaatattcataaatcagactcgcctataattttcatttgtcaaactatccttttctagtgtcagataacgttgcactgttttcatagaataatatacattttcatatctttggatgaattttatgatcttggaatgatgtactccttttacatctgctaaatctcaagtgtaaatttttttttttttagtttgtgggaagattttagcaaatgttcatgttgaaggctttttctaactttcctaagttctttgaagagataatgctagtatttcatataaagaagatatgtagaaaagcgatttgagaatggagataaaaagaatcaaatgtttactcatgctgagaaatggcagatccttgggctgcagaaagagaggatgggatttgttcgttgttctctgaccttaccttaggaaatttgtaagacctcacacaaatattaggttggcacgaaagtaattgcagtttttaccattacttttaatggcaaaagccacaattacttttgtgccaacctaatatttggcatctatggggtttaccactgaagcatgacatcttctaaaagattatcattctcaaagcaaagaaaaagaaaaccagatgcataggatctgaaacagtcatgctggcttgtaccttgtgtattccagtggcaatcaatgtgcgcccacactgaaggatcagggggatttcctaaagcaaattgttctaattctctgtaggattctagaaacttgacataatttagaaaaactttttgattacaatagaaatataattttccataatttctgtgggtttactatcagatacaaataaagattgatttaaataaataaaaaatgtgatatttgcacacattaatttctaattgacatacttacatttagatttttattttaacagaaataatgtaaacaaactcctgggaattgctcttcaactttgttcttgaataaatacataagtcaaattcttagaagagaggcagacatatcaggcttcacactgcttagtggcttgtagcatctcttgatatcaatatagaaataatacaaaagcctttgaaatttttagtattcaacaatgaaaagcctgagttctccaggaaaaaaaaagaatctgtcccagagcagttgttgaagaggccagatgagggagcctgtacagagagtcatttcccattgagggaaactttgatgaaatggagggaggagatgagaagcaaatggaggataaattctctcttagaacgccccctgggtgaactgtgtggagatgcaggagttcatacagcttttctcatgatgtctagcaagaccgaaaaatcagatgtgcttcttaagaagtacataactaaaatggaaataaaagtggagtggttgttaagtcaattctctcatgacaatttacgcaacttcctctattttctattttcttacatccatatgatctgctttctctcatggctctcattttagaaacacctcttggcagtgtgcaatgacatttttgcttgttttgaaacaaccaaaaactcaggttgcttaactccctatctcatctagttccttaaattattcagtcttgtagaacttggcaaaggaaaaatgagaaaatggtcctgctcagtagaaatctgttgatttctatccactgaaatccattagtctttgaagttaactctttcttaatgtgtccttatgttacagtaagtatggtgattccatttatggatagatacacattattttgtttccagaaatattttagaaaaataatgtacacttcaatctatattggcaaccaataatccatggtattttgtcgtccgctttcagagaccttgcaatatttgagatttgttttctactaaatttaatttcttactaatatagaccttctgtgttagactcctatctgatttcatatatgagtttgaaacattatcacatgactgaatcaactttgtgagcaaattattccaaaaaaacaaatatttactcatattaatcaccttctcaaaaaattttgatagtttcatatcagagaaaaatttcctataaaccaaagtaaactcagtgtccaagaccccctaacatcaggttccaactaatctttcaagacttacttcatcaaactccattagaaaaacagtctggtcttacagctttttcaaaaactagcaatttagtttaattaattcccatttatgaattttttgttgcttatattttaaggtcttggtcatgattattattattattattttttgcctagacaaatgtcccaaagagtttttctaggctttcttctagtattttagtcattttaggtcctgcatgtgtttaatccatcttgagtgaatttttgtatggtaagaaataggggatcagtttgatgtttctgcatatagcaagcaatccaatttttccgaacaccatttattgaaaagggtgtcccttccccagtgtatgagtttgtcaactttgtcaaagatcagttggcttctgtacagcaaaagaaataaccaatagtgaacagacaacctgcagcataggagaaaatatttgcaaattatgcatcctacatggattaatatttagaatttacaaggaattcacacaaagcaataaataaataaataattccattaaaaatagtcaaaggacaggaatacacatttttcagcagaagacgtacaaatgaccaagagacatatgaaaaaaaacttagtgtaacaaatcatcagacaaatgcaaattaaaagcacaatgagataccgtattataccagtcagaatagttatcacaaaaaagacagaaaataacaaatgttgatgaggatgcacagaaaagggaacatttatacactcttactgagactgtaaactagtaccacttctatggaaaataatatagaggatcctcagagaactaaaactagaactaccatttgatccagcaatcccattactgagtatctacccaaaggaaaataaatcatgatagcaaaagataccctcacttgtatgtttatggcagcactattcacaaaagaaaagatatggaatcaacctaactgtccattagcagaagatcagatgaagaaaatgtagtataggtacactatggaatactactcagatattaaaaaaatgaaatcatgtcttttgcagcaacatgagtgggactggacgtcattattttatgcgaaacaactcagaaatgggcaaataccacatgctctcacttataagttggagccaaataatgtgtacacgtaggcatagaatgtgaaatgatagataattgaaacttggaagggcggcgaggatgggagaggatgagtgatgagaaattacctaatgggtacaatgtacagtatttgagtggtgtatgcactaaaagccataacttcaccactatgcaatatattcatgttacaaaattatacttgcaccccttaaatttatacaaatgaaaaacaagaaaccctagacattttagataaacattttgtgacatttaaatacagtgaattgaagctctcttatctttttcataatatacctctttctttaaaattttactaaaagctaaactagtgttaactttcctttttaattccactcatgccaaaatatttttaaactatttaaacatgaaggaatctttacagtattattcataattataagtaactcttaaataaattatttaccagccctaaaccagagccaataggaaatgagattgtggaagaaacttaaatgaccagaaaagatagacaaaatatactgagagtaaaaaggagcaggttatcaataagtatatactgtataattctatatttgcataaagtaaattcacaaaggttatcatctgcaatttatattttcatgtaatgagaaaaatgttaatagaaacctccctaaaagaaaataattttatgtcatactaagagagaaacattataataattattagttttttggggaggggtagagggatgctgtggtccatgcctgtctctaagacattcattcattaatctgctctttgcctagttctgaatgaaaggcagaaaatatggtgatgcactatgcagatatatgtcggcctgttaataaaaactgagcaataaataattatcttttttcctaaaaataactttaatttttcatgcatgtttaataatgtttgtttctagaagtaacatgtaataaaaagatatatttaatatctttaaatggacaggcatgaaaatatcatctgttctatccttcactttccaagctagactcaatgaaaaatgttagatgaaaaataaacactcagaaatatttccatgtcaatatttttggcaaaaatattaggtcattttgcatgaatacttactggaaatatacataattctgtgggaaaaaatgatgatttttgtgtttatggttcatacctcaagaacatagttattcaattaagcttgcctactcaaacaatataacaggtttactagacattttttaataagtaaaagtatttgatgtctttattatctgctccagatatgaagatcaaatccacactcaacaacacacaatttgagctcagagtctttattgtaattggaaaatacatggcctgcttgccaaaaactaaggagtctctgactatgtgatgtaatttaatgagtgtttaatcccagattttactactgaagagcatcaaatcccttcattagtataaatttattgtgagctgcagtcttagttttcttatttttattttcccagttcttgcatactacttgtcatgtagcacttagcctatacagatttgttgatagacttctccttaagtgtttttaatgtgcacatgcatttcaactagatttggtcattattggctagatgattaatacttgcacactaatataccctccctagccaagggtactaaaaaaaaaaaagggtagctaattgttcatgaaaattagaagatacacagaaaggaaatttctaggaggttgtatgttggcgggcagggagtaaaactaagcaaagcagaaaagactgagaacaaaatgagcagctttgatgaagcaggaagataccgagtttctgagttgaagaaggggagtaaaatgaaaattagaattatgctatggactaaattgtgtctgcccaaaattcatgtgctgaatcccaatcccccattatgaccctatttaaatatagggcttttacagaagtaatctaagttaaatgaagtcataagctagggccctgattctgtagggtgagtgtcctcataagaaaagataacagaaagtgtggctcgctttctctgccatgtgaggacacagcaagaaggcagccatctgcaactctgaaagtggactctcactagaattcaactatgctgtcatcttggtctcaaatttccagcctacagaactgtgagaaaataaatttctgttgtttaagtcaccctgttatggcattttgtatggcagccttagctaagataaagtgtgaaagaaagtaaaagttatttaaagttaaatataccagattaaaaacatatatttgcctcaaattcctttcaataaaatggatgcattttcaaaagaaaaaaaaaagagagagaaaatgttacaactagatgcaggcaagcacaagtgctggctacatacgaaaggtgacaccccagggaacaatgacagaaaccagcaagacattgaaagagctgtgagaatcctggaggaggctgttttgaaaaggtgtgtgtacaagggaggagggatgtgaggggggcagaaagcagccctgccttgtggtgaaagaataaaaataggaaagaacttgttggaatttttgttcctgcctcctcccactctgcatgggaccgacaacgccagcctccacaccagcagtgacacacatttctggtgcaggttttctctagagtaaaatcacagcaacacaaaaaccatgggtagatgaggacttgagaaaaacaggttttttttttttttctttgagacaaaatctcattctgttggctggagtgcagtggcatgatcttggctcactgcaacccccgcctcctgggttcaagcagttctcgtgcctcagcctcccgagtagctaggattacaggcactcaccaccacgtccagctaatttttgtatttttagtagacggggtttcaccacgttggccaggctggtctcaaaccctgacctcaggtgatccactagcctcggcttcccaaagtgctgggatttatttacaggcgtgagccatagcactcggcagagaaaagcaggttttgaaggtttaatgtgccttggacaggtgtttccccaactcttctctatactcctctaagcctggagaacaagaggacaaagttctccctctcacttttgtatctctttttgcttagctagggatggcttcctgagctgaggagctaagacaggattaactatgattttttgctgttgttgctttctatgtttcagtgtactcattctacatcttattattcagggtacaactaggaaaggagaaagcatgttacggcaccaggaaattattataggagtgataccttgaactattttggaaagatctgggaaaagaaattaaggtctccaaggaggaactggagaatcaatgagtgactggcctggtcaccctgagcagcaaaacactgaagtgggactacaaaaaaggaagttggcacagggatatatggaaactgttgactccgaggctcctcagccacatgtttagtgatgggcccagagctgttgttgctcagcaagaccagcattttggaagaagatgtgagcacaaagctgagaagatctggggagagcaaaggcacactggaacccctggttggttacatcatggccgtctctcattgcttctcactataatggcctccagagagtgatagttgctcttttgcttctgtaaattcctcttttgaaatattctaacctagaaccataaagaccagggaggttgtggaatgtcaatttgatctaaacaaactgatgaagcacaaaccactctgctacattttgagctcattggaactgaacttgcttagggcctggtattgccctttgtgtattttctgacagagaagtagacaatcacataacaacaagtgtggggaacagtctcataaaatagctaggcattgtggcattatttcaaatgagagacaatatactgtatgactgatttgctcataggtagaattatttcattgaaggagtcaaaagtttcaaaacaagcctaataataatacaaaaagggataagaaagatacagaataaaaagaaaagtataaacataagcgaaatattaaactaaaaaatacaattgttgaatcgaagaacatgtttgttggaataaagtgtggaaaggatgtatctgaaggataaatgtgtgtattaggagctaaggatagttgatgtacaaacaacaaagaagaacaaaaaatatataaacctctggatttaagaatcagaagaactgggttcaggctttagctctgtgtctctcagaaacaggagtgaatttaggtgagttgctgcttctatttgaatattcattataattttttccttaaactttttgttgagggttaacatatatatgaaagtgccttgcccactgctgtgcaaataacatgttaatattccagaaatcctcatttctttaacagataagaggaggaggaggaataattcctttcttttgggtatttttgcttaaagtccttgtgggagtcagtagcattccatgaaacagattttaagtaaaagcaaattagtacagtgctaaagctataactttacttgccacccactatcaaatgttatttgtggaataccattgtataaagattagcaagggaaaatacagataggcagagcaattgattttacatacttctcaaaaatgaaaactacaggtggatctcaagctggcctaacatcatccaagatttatcttacttttgggtggatttgacttggtaaggtgcattgcctgactacagagactattccctattcttccctctctgtcagcagactatttgctagcatgtcaatcatcagttttgtcattgaacgtggtctctaccagtggtaattaggaaagtaaattcaacagtgaaaatcagcaagcaaaactcatcaatcagcagctcttaaaaagagagatcacaatcatagcagcaaaagctgggagatcatgtccctcagggcattaggagttttatataaaaatgtacgtgatgactttgcaatagggacacccactgtgcaaagcccaatgtgtggctctcattttcaattcagatatcgtcagtctgaagtcttataatatgatcacagttacaacagaaagatattcaaatcataatgactgatgagcaacaaaaccaatttattactagatctgtctccccacacactctgaagaattcctggggatgtttacatttgctcatgaaaccatttgtattgctatgctaaaaaagcagaaactcagacatcagcacttgcaaccaatgttgtaaatgctgccctctggaagcccactggtgaggctgtgtccataccacccttggtaccattagtaatatggaggtaagctttaatcttgaaccaaaatgaaaaaagtgctgtgatagcaactccagcagtctccttttgtttagtacttccacaaacagcaatgcagtttctgctaatgcacccaagcctgggtgactctacttcaccaaagagctggtaaaccttcagtattgagcctagtttgggaaactcctgagtacaggctttaagaccacaaagaggccgagttgcagcaaatgcatcttagaatttacacacagccattttcccaaaggcagagcactggtgtacaggggaaggggagataacagagaaaaagtggactgcatattgtgcccaggatctattatcacttcagatctcagtaaatttgcaatgattttcttacattcaaaatgtcagaaagaatttatcttacttcttgccagtgggtctaaaactcacatgcatgttttgaggtgtattctcataatagtgaataagtctcacgagatctgatggttttaaaaagaggagtttccctgcacaagctctcttctcttgtctgccaccatgtgagatatacctttcaccttccaccatgattgtgaggcttccccagctacgtggaactgtaagtccaataaacttctttctttggtaaattgcccagtcccaggtatgtttttatcagcagcatgaaaatggtaaattggtaccagtagagtggggtgctgctgaaaagatacctgaaaatgtggaagtgattttggaactgggtaacaggcagaggttggaacagtttggagtgcacagaaaaggacaggaaaatgtgggaaaggttggaacttcctagagacttgtttaatagctttgtccaaaatgctgatagcaatatggacaataaagtccaggcggaggtggtctcagatggagacaaggaacttgttgagaactggaggaaaaggtgactctgttatttttttagcaaagagactggtggcattttgcctctgccctagagatttgtggaactttgaacttgagagagatgatttagagtatctggcacaggaaatttctaagcagcaaagcattcaagatgtaacttgggtgctgttaaaggcatttggttttaaaagggaaacaggcataagagtttggaaaatttgcagcctgacaatgcaataaaaaagaaaatcccattttctgaggaaaaattaaagctggctgcagaaatttgcataaataaggaagagcctaatgttagtcacaaagacaatggaaaaaaatgtctccagtgcatgtcagagacctttgaggcaacccctctcatcacatgccaggaggtttaggaggaaaaaatggtttcatgagccaggcccagggtccttgggctgtgtgcagcctagggacttggtgccctatgtcctagctgctccagccagggctgaaaggggccaatgtaaagtttgggtcatggcttcagagggtgtaagccccaagacttggcagcttccacgtggtgttgagccagtgggtgcacagggtcaagaactggggtttgggaacctctgcctagatttcagaggatgtatggaaatacctggaatcccagacagaagtttgctgcaacagtggggccctcatagagaacctctgctagggcagtgcaaaagggaaatgtggggtcagagcccccatatagattccctactggggcactgcctagtgaagctgtgagaagagggccaccatcctccagaccccagaatggtagctccattaaaagcttgcactgtgcacctggaaaagccacaggcactctccagcctgtgaaagcagtcaggagaggggctataccctgcaaagccacagggacagagctgcccaagaccatgggaactcacctcttgcatcagcatgacctagatgtaagacatggagtcaaaagatatcattttggagctataagatttgattttcctgctgggttttgtacttgcatggggcctgtagctcccttgttttggccaatttctcccatttggaatggttgtatttacccaatacctgtactccaattgtatctaggaagtaactaacttgcttttgattttacaggttcataggcagaaggtacttgccttgtctcagctgagatgttggattgtggactttagagttaatgctgaaataacttaagactttggaggactgttgagaagtcataattggttttgaaatgtgaggacatgagatttgggaggagccagaggaagaatgatatggttcggcttgtctctacccaaatcttatctagaattgtaactcctccaattcccatgtcatgggagggacccagtgggaggtaattgaatcatgggggctggtctttctcgtgctattcttgtaataatgaataagtctcatgagatctgatggttttaaaaagagagtttccctgcacaagctctctgcttttttctgccaccatgcgagatgtgcctttcaccttctaccatgattgtgaggccttcccagccacatggaactataagtcgaataagcctatttcttttgtaaattgcccagtcttgggtatgtctttatcagaagtgtgaaaacagactaatacaaagtgtaactgcatgttaccttccccagattcagtgcttttctatgcaattgattagaaacattgccactactgcaactgcatactgcaactgccaaaaaaaaatgtttgatggaaccactggttcttatactgactctatgtggcctgggacagctcatcatcaccccctaaacctactctgaaattcctcattcttcagaatgtgaatttcaagagggaaggcagcacctctcttctaagtttcaagtcggttttctttgcctcaggagaaactattttccagtatgatttgcaataggagtatacattcatttcaaagcaaaactacagtccatacatttgtggttgtttttcctacagaagctcaataggtaattgaaataatgtcaggaaatttaccagtgtgtttaagagccaggctccctggcctatgtctcagttcattatttattcaccgtgtaaccttgggcaagacacctaccttctctatgccttgatatgttaatctgagaacaaaagggatatcaacagtatatcacagggctgttgtgaaggtgtatttaaggtacaaagaataatgcttgacctatagtaaatgttctatagtttattttttactctgacacaggtttgtctcacaaatctgttatagttaattatatctagggacacattttaacagtagccactatatgtatatcatatcacaagaggtgacaaaaatggaaaagagtagacaggttctgcagaaaaaagaaaatgaaagaaagtagataaggacttaaaactgtacacctcaaatgacctttgcttaaatcctgcacttttgggttactacagacatttttccttcaaacactgcttaaattctccaacctttcaaggatagtggtaaattacagcattttaaaaataaaatcattgcactgtaaacatatgtatatcttatgtgtgttttgggattttttgttgttgttgttggatgatggctattgtagtctttttgagacacaaatgtatgtgatagctcaagccttgtcaactaaagacctccaaaaataactctctggcaggggactttcagagacttttaccttttcttttatatcaagcaactgttcccaattattcttttgtgctgtcatttataaacagtgaatggctatgaaggaagagcttttcagcaaaggaaagcagtaacatccaacccttagctgccacattctattttctgattcccttatttgagacagtcatgaaaatgccagcatttaaattgtaagacttagtgacgatatttcgataggcttctgaaaaagcttataggtacttcagttcaactcttttatcgaataatagaagttctttatattcattgtacaaaatgtaaaattcaaaatgcaaacgagtgaatagaattaaaagtcatctgcaatccaataagcagacacaaccatttaaaaaatattatgtgtatactacacacatgcgccagagacaactaattttcacacttcacaatatatttatcacaattagacagataggcagaattcctacatgttatataaataggagacaaagaaatttgaatcattctaaaaaccaatgttggtatcatttatttggcattcattaatactatatcatgaggactttttcatgtctttggatatgcttgtagcatgatttttaaaggctgcagaaatgtttttatatacagacaccatctttttcttaacctaaactctatttatttatttatttatttattgagatgagatctcactctgtcacccagcctggagtgcagtgacacaatcatggctcactgcagcctcgacctcctgggctcaagtgattctctcacttcagcttccagtgtagctgggtctacaggcatgtgccaccacacaggctaattttttttttaaattattcgtaaagatgaggtcttgctatgttgcccaggctgatctcaaactcctggcctcaagctatacatctgcctcagcctcccaaaatgctgggattacagatgtgagccatcgtgcacagccaagattatttaatgtgtttaacatttctctgttgctgaatattaggttgtttctattatcttttaattttaattaatattttgaagaactatctagaacataaaacacagtttgattcttgattatttttattggtaaaactaccaattaaaagaacaaatttccctccaaaaagcttcagccagtttttatttgtactagaagtatagtattaattactagttttaggcttagctagttagaaagataaaaatatcctattgttcttttaatttgcatttttaaaattatcgatgaaagtgaacatttttctcattttatttctttgccttttaaacattggaatgccattttacttatgtttgggaaattgcttcacatattttattaaaatatacattcaaaatatttccgctaatcatttatctattggtttatttgtcatggctttgaatttatcaactttgaaataccaggtaaaacattattcgcattacttatttttgtagggggtatttaccaatgcatttatagtatattttatcatattgttttacataaaagttattatttgacttctttaaacctgtggaatttatttgggtatatatgataaggaaatacaccaacttaaaaattcccaagtaacctctatttcccacaccattgtgtaactctcccatcagtagggcatataatgaactcagtttcaagactgaatagtctgttctgtttacctacctattaaattttatgcaaactaactttttacattattctattttacaacatattttaaaatcttgtaggaaaattacatttttgtatttttcaaagtatctttatttgaataatttaatgataatagccgctacactctgatacccctactacctgtactacaatgcttcctgattacattgaatttaaaaattattttgccaagctctaataaaaatccctgtgaagaggtgttatatgtctttttacatctataaattaatttgagaaaacataaatgcttacactattctgtttttcttccatctcttaatttattaaaaggcacttttcgtttattcaaacatatggtgtatctatggagtgtatctattgagtcactgtgttccagatgctactcttaagttttgggaatatagcagtgatataacagatgaaaaaaccctgccttcatatggtttatattctaaacggaacacaaagacaatgaaaaacaaacaactaaaagtaaaacttatatcacagctttatgaaacctatgtaagaaagcagaagacggaaggaggataaagattatatgtgcctgtgggatgttgaggaaatagctcactgagaaaggaatatcttagccggggcctgatgctggggacaccactagccagtctaatatctgaaggaagagtgctccaggcaaagggaaccaactagttgaaccttttttatttaatgtaacagcctttcaggtttttcttatttagatggactctaatcctaccttgcagagttattttgatgtattttatattttttggtatgaaaagtaaaataaattcctgtaattagtatcattaatattattgtaccatctaggttactgctgtttgtagaagagaaattgattttttctacttctcattcaatttttattggtactagaacactatttaaaatagatacccattgacatgtaagcaaaaatagaggccttgtctagctctccctactcccaattcaggcaccccacaagtaaaaacttactattgttgcctatgtcttcagatggttccatccatatttctaaatactatgcttaggctaccatttagtgaattttcagttttagatacttaagaaccttctcccatcaccatcctctatacatacttacttctgatagtgttcccaatacaattatattatgatttgtattaaatcaatattctgtgattacattactataactaagcaagtattcagatctgtacaacttagttatgatgtttaatttttttcttgaatgacttttctgattttgttttaaacagttaataattatttattttcctgttcattttttcctaggcagactcagatgttttgacttaatgattttttgacttagcaatggtacaaaagcaatacacattcagtttgttcctcaacttacaatggggctacatctggataaactcatcctaagttgaaaatattgttaaatcaaagacacactttcaacatacagtattttcaatttacagtgggtttatcagaacatagccccatcaaggaggggctgtactcgtaagtcaaggagcacccatactcattatgattccttctctccaagactccaacaaaccttataattcttctcaagatcaacacattgagaaatctgtaatttctattttgttttgtttggctttgtttcattgttttctttggtgacatgtctctggggcatatatctggacggtgaaatatattatatctggaggatatgttgaatatgttacgtcctccagatatacatggaatggaggattgacaattaaggctgaaacaagtgtcccagagacaccatcctggaatgtccatcctcctgttccaaccttgactagtggatcttgaggccaactacatcactgttttcttagaatttcccttcatcttcctcctggggattccctttgcctcctacctgtattggattctctgtgtccttgattttataactccctctttcaaagttaattctatccggaaggaactcatcttccagtagctcagtggtcagcaaactatgggcctgcaggataaatctggctctccatctatttttgtaaaactcacaagctaagaatgatatttacatttttaagtggctggagaaagaggaatattttatgacatgtgatcgttacacgaaattcaaatttaagtgttcacaaataacactcatttggaatataggtatacccattcctttatattgtttgtagctgcttttacactacaagggcagaactgagtggctgcaacaagaattgtattgtccacaaagtctgtaatatttattaactgtgcttttacagaaaaagtttgtcgacagctgaaacaacccacaaagtgtggagcatgacatggaattgttctgaaatttttgcatctaaaaatgtctttattctaccctcatgtctaatttttagtttagctaattatgaatttctaatttgtaaatcacatttccacaaatattcaaggtcttcagtgttcagggctgttattgagaggtctaataacattttagctctctctcctggtatttttcctctttataagttatgttgttatgttttctcaagtgctttagaatcttcttaatttattttactgagatctcagtaatagtgtgttcattttttattatttttaatctggtaatacatgttcttcaattctgggaagcttctttgaagcattcctttgataattttctcccttccattttctcagtttgcccttgttgcaactctttttatttagaaattgggccttccgggctgatcttttctcttttatctcctattttatattttatattttatctcctgatattaattcctttatattttagttgtctctgggatgttgtttcaaccttagttgtcaatcctccatttcatataaatatacctcttacagatataacatatttaattctccagatatatacaaagacacatacacatgaacaaacacaaaataaatagaag

SEQ ID NO: 2306 - DNA, 2475 bp, Homo sapiens
aggtaacaccatgtttggtaaataagtgttttggtgttgtgcaagggtctggtttcagcctgaagccatctcagagctgtctgggtctctggagactggagggacaacctagtctagagcccatttgcatgagaccaaggatcctcctgcaagagacaccatcctgagggaagagggcttctgaaccagcttgacccaataagaaattcttgggtgccgacgcggaagcagattcagagcctagagccgtgcctgcgtccgtagtttccttctagcttcttttgatttcaaatcaagacttacagggagagggagcgataaacacaaactctgcaagatgccacaaggtcctcctttgacatccccaacaaagaggactggagatgtctgaggctcattctgccctcgagcccaccgggaacgaaagagaagctctatctcccctccaggagcccagctatgaactccttctccacaaacatgtaacaagagtaacatgtgtgaaagcagcaaagaggcactggcagaaaacaacctgaaccttccaaagatggctgaaaaagatggatgcttccaatctggattcaatgaggtaccaacttgtcgcactcacttttcactattccttaggcaaaacttctccctcttgcatgcagtgcctgtatacatatagatccaggcagcaacaaaaagtgggtaaatgtaaagaatgttatgtaaatttcatgaggaggccaacttcaagcttttttaaaggcagtttattcttggacaggtatggccagagatggtgccactgtggtgagattttaacaactgtcaaatgtttaaaactcccacaggtttaattagttcatcctgggaaaggtactctcagggccttttccctctctggctgcccctggcagggtccaggtctgccctccctccctgcccagctcattctccacagtgagataacctgcactgtcttctgattattttataaaaggaggttccagcccagcattaacaagggcaagagtgcaggaagaacatcaagggggacaatcagagaaggatccccattgccacattctagcatctgttgggctttggataaaactaattacatggggcctctgattgtccagttatttaaaatggtgctgtccaatgtcccaaaacatgctgcctaagaggtacttgaagttctctagaggagcagagggaaaagatgtcgaactgtggcaattttaacttttcaaattgattctatctcctggcgataaccaattttcccaccatctttcctcttaggagacttgcctggtgaaaatcatcactggtcttttggagtttgaggtatacctagagtacctccagaacagatttgagagtagtgaggaacaagccagagctgtgcagatgagtacaaaagtcctgatccagttcctgcagaaaaaggtgggtgtgtcctcattccctcaacttggtgtgggggaagacaggctcaaagacagtgtcctggacaactcagggatgcaatgccacttccaaaagagaaggctacacgtaaacaaaagagtctgagaaatagtttctgattgttattgttaaatctttttttgtttgtttggttggttggctctcttctgcaaaggacatcaataactgtattttaaactatatattaactgaggtggattttaacatcaatttttaatagtgcaagagatttaaaaccaaaggcgggggggcgggcagaaaaaagtgcatccaactccagccagtgatccacagaaacaaagaccaaggagcacaaaatgattttaagattttagtcattgccaagtgacattcttctcactgtggttgtttcaattctttttcctaccttttaccagagagttagttcagagaaatggtcagagactcaagggtggaaagaggtaccaaaggctttggccaccagtagctggctattcagacagcagggagtagacttgctggctagcatgtggaggagccaaagctcaataagaaggggcctagaatgaaacccttggtgctgatcctgcctctgccatttctacttaagccagggtttctcatatgttaacatgcatgggaattccctgggcatcttcttgtggtgtggagtctgacttagcaagcctcgggtgggtttgagggtcaaatttctaccaggcttatatccctggtgatgctgcagaattccaggaccacacttggaggtttaaggccttccacaagttacttatcccatatggtgggtctatggaaaggtgtttcccagtcctctttacaccaccggatcagtggtctttcaacagatcctaaagggatggtgagagggaaactggagaaaagtatcagatttagaggccactgaagaacccatattaaaatgcctttaagtatgggctcttcattcatatactaaatatgaactatgtgccaggcattatttca

SEQ ID NO: 2307 - DNA, 7689 bp, Homo sapiens
ggattttgccccagctgaagggttgtacaattgagtctaagttggggtttggggcatggacacgcatttggaaatggaaaactttcccataggataacagctctaagtctgcggccgtgtgcttgtgctcccctccaggcagggaggacatgcactgctcagggttccgagctgacccaagcctcttacctcaaccccctcctcctggtgagagagccccactgggttccgcagagaagaggaagaggatgtgactcaaagattctgggcttccttggttccctgggctggaagtcagagagataatggaatccaggcaaaccacttcaatagaacatggctggcggccatatggacatatttgaatccaacaattaattcagcaaagaaagctgcttgtggcaagttttgaatgtgccattccaggtagtgctttgatgataaatgaggagaagattgcaaagaaaatgacagcaacatttataaaagggtctcatgaatataacacgatgcccagcacatagaaagcatacaataagtgtttgttggataactgtggacagttcagtcgaccagcaaattcctcttaggactctagatgcacggagagtggccagattaatacagactggcaaaagaagaacttggcaaagtgatttgatcacacacttctcaccctcacatctcctgacagttcccctaatccctgccccacttccccgccatgggcttccatcaggaaactccttgatatcatcttcgagaagaaaactgaggcatagaacatttgggaatgaatctaagactacacatctagaatagcagagttacaggaatgcagatgtgattcctatggatgagggtaacctagaggctagaagaacaataggacagaagaagcctgggtccctgaacaaccttgtggagcatagacacctacgtggcctggactgccagctcacaatgggcctctctgtgagagaaggaaacttccctcttgtttaagcaactgtgcttttgagaatctcttggtctataccctaatgaataaggccatcataaatggatatcaaagtaaggaaatttgtgtaaatgatttaataaaacattacctcaggtatgaaataattctaccttgtgccttgacaacatcaggtattattcatgcccttttctctccctgtaatgtctcttatccacgggtagaaattatattttccatctaaggtttgctcaaatattatctacttaagtagctcttaccaattttgcctctcctcctgagctgaccctatgccttctatgctgttccaggtaatattaatctcttcctttgtacttctttcacagaacatacttttttgtctaacataataactataggcataagtgtatagattccactaggggcttcagaacagaaactatcatcttattaatttttttctccctgatatctagggaaatatgttatatataataggcccttagtaatcccataaatgtttgtgagatattcactgactataagccatactctgtatttatttagctaaaacagacgtctttcatatttagttagcagaaaatgctcacatttactcctttcctgtttaccaaatgaaagggtaattgttttttcacagattgcactagaaaagtgtcttctctctctttttcaaatagattgtctttaaaacatatgacaggaaaagtgactattgttaggataagataattacgattgtaacagctagtttaaaagaagtgtcagttgctcctgttttatttttcacaggatagagctgcggcctgtctcagtatgatgttttcaggatctggtatatatttttattttcctacatgaatctttcatccttttactgacatttattcattttatctaattatcctaaaaggaaagctctggccaggcaaattggttgttgtctgcctctgaagagacattcatatcgcgtcgcttagctttcaagttttgtgatcaggaaccctcaggcccatttttaaggaggtttcaggctagctgagcttcactgtctcccaaaatgtacaaaatgagattacatgagggacaagatcaatttactggaaggtacttaagcagtaaatctggagctttttgtccagtcactattgctttcaagctttgtagcagaaaattaagccacaagagctttgacaaattagatattactacctctaattgtgtatgtttaagcttatcacactgaattgcagcattgtaactgactattatgccaacaaggccttcgtttaatcagcgcagtgccatttaatcgcaattaatcactcaactaaaatgtcatattaaggtcacagaaacttgaagggctaaaagaaaagagaacattaaagtcagctgatggaggaaaagagcatggtgtgccaagggaagttctgagcactctttttcattagaagctggtagaacatttaatgagaattcagtcttaactttcagctgagatcagaacaacgtgcctcacttggttaagcaggagactattctgcccattcttagcgggcttctgtctgtaaataggatactcctgcccacagaatacctgaaattttacagattcatgatttttatttctattattctttggctttctggcattttcccctttcctattacttttaagaaggaaagaaatcagatatgatatggtactgaagacaagatgaaataaatagcatcattttgcacagtcacttacaaggtatttataaaaaggaacaattggattcacttgtttgccaggaagattttatttcccagaaaacttgtcaaatcgaatgttatagtgcaaaaagaaaatgactgaagcttttgttttttaaattttaatactcaagaagtactatgccagtctgaaagatctctgttagcccctcacaggacaaaacttgtgagaagtaatttcacccggaggaccgggactctgccacccatggctcattccttatgctttaaccctgcctagccctaagaaatattgttccactaactgattgactctgaaaacagagccatggtaaagggtatatagacaaagggcacacttaaggtctctctttgttaaggagtagtaggtaattttattttattttgttttattttattttattttatttatttatttatttattatactttaagttctagggtacatgtgcataacgtgcagttctgttacatatgtatacatgtgccatgttggtgtgctgcatccattgactttttcagcaacgtggatggaactggaggccattatgttaagtgaaataagccaagcccagagggacaaatattgcatgttcccactcatatgtgggagcaaaaacagtggatcttagaagacaaaaactagaatggtagttaccagaggccaggaagtgtagggggaaagaagacgaaggagaaaaaagaatataaatgtatttattaccatgaactgtacacttaaaatggtaaagatggtaaattgtatacatgcatctcctcagtaataaatagttttttaaaaaactgactctaatgaccactcttcaaacttgcaataaatagcacagacactggaaacaatgaccacctccaacaggaaaaatgaatttcagttttcatacccactgagcctatgaagcttggtgagcaagatgtctgtgtttgagcaaggctcgctcaaaccgtctcctgcagacctgtgtggaacggtgcagtccactagccacacgaggctactgagcacttgaaatgtgactagtataaattgacatgcactgcaaagatgaaatacacactaaatttcaaagactgactttaaaaaaagaatgtaaactcattaataattttttgttgattacatggtgaaataccaattttggagtatactgagttaaatgaaatatgttattaaaattaatttcatctgtttcttttcactcttttcaatgtggctactaggacgtttaaaattatgtgtatagctcatatcatatttctattggacagtgtttgtatagaccaatgagaagagtcacttacatcggtatcaccactgacctggaccagatgtgatccagtaacccagaggagaaacatttctgacctattctaatcctctaagccaaacaggctcttaatcaaagagctagtgtttttacaatatcaaatggaaaataaatataataacctcaatagtacacttgaaaaaatgaaggattaattttagaaagacaggaactggcattattcagattgaaggaaaaaacaacaaggcgaaatttaataaatatctcctggggacatatgagacaggttaagattgcagcatgaaggctggaggttaacttaaatgatttcttaagagtcagggttgtttaacacttgatacaggttgtgactcttcttttcctggagggcaatgataataaggcaaggcctcctctgaagtcctagataagcataagattggagaagccaatttaagatagctatgccatatcagcacttattcagatactttgagtgcctctgaaagttggtgatgagacgggactagattaccagccctttcaaacacactgagcctcagtcagagccatctttaatttctctccttaggtgttaataaaattcatcttaaaatttattactttatgatatctcaacattctcttacaaaatttgcacttaaaagcttatcaaaatcttatacctggaaattgaatggaagcaccttacaagctgaaacagtgtctttatttataacagtaaaaattacctttttattataacacacccttgtacgcatgtaactatatcatacatgttatataactaaatgtgtatgtgcactataggatatagtagccattcaaaaacatttgatgagtgaatatatgttcactcacaattgaaaaaaaaaccaaatgtccgcatttccacagctgaggtagagaaggcagctgaagtgtggcagaaagcccagcctctccagttctggtccagtgcatttatattgcaaaacgttgataagcaaatgctgcacatgggtataataaagtttggaaattttaccaatgagatgtagtgttagaacaattttatgccttggtaaattatcaataacttctctaaaaatatcgatgttttaaaatctcttgcaaggtaacttcctcagagagcatggctttatattagtaagtaaaggaatagtcactacataggtcagtatgagaaaaccaaatggaaccacaaatctctttctaaaaattctacctaaataaaagttcctgatcaagttaaaagcctagtttatagcacatgatgctttgtctgatctacatccaaggtaacttcttgagtggaagactttgggcttttttagacaaaggtttctggcctccatttttataaagcctagttaatttatatgctgaggtcttcggtggatcacaggtgtattttctctatatttataaccacacatcaatttttaaatggaaacatctgagctttcagtggctatgagccagtcttgagtgaggaagccatactcacacaaaacttggtataataaccaggtgtagccaaaataaggcacatccatatgcatgttgagtttctgccacataaggaatttataatagagtttatcacttatcagaatgtatttgggcttacactgactccattaccaaggaaaagcaattttaacgaggctttcctgtaaggaatctattgtttcttcttcctaaactatcaacttcacctgaaaatacttctaaaaatgagaaaaatagttaattttcagccattgagtctacctttggctggatgtattcctttaatttcagtgccaacgcataactatttggccttttataaaggttgcgtatttttcttctgagtagagttgccctcactatgtcagaaaacatgcatatgtactcttccaaatgaggggagggccttatagcctcactgatgatgagcccagagtgagtcactcaggatcttgatattgttttttgaaaacaacaacaacaaaaatactggtgtctgtatagaaaatgcctaattctttccaggtatcaataaattactttgctagtcagagtatcaatgttggatggtgttgtgaggtttacatccatgtctagaaaaccacatttatgctgcaagcaagctattataaaaagacgaaaaataatatatttttaaaggactttccaacaagttattggaactgttcctttaaatattaggaaagcactccaactagtatacctagtatactacctggtaaaaattaaaataactactacacgctttttttggaagatctgagtgatatttccaagtgtcctaaaaaacaattcttcttccccatctcaatccctaacctcttttgaaggaacagccattgtttgagccaggcaatttaattcttaggacttttatcaacatgacaggtctcagcctaaaccagggaacttttttttttccttttatttgttttcttttcaagatatagatgatatgcccctatccaatgtacagtttagtgagatggatgacacttcactcactggcagttcaaggaagtcttagcctagcttgtttacatgaacacgttttagaacagccatatagcttccagccagctctaccctgctgcccagcactaagggggaaagcaggcagtgagcccataggtcgctgataaactaactccccatttggcaagcagggaagggaatgataagggctctgatttatgttttatctgtcgctaagttttcagccagcctgaaatgacttggttctgttatcacctcagatgccacaggtttcttaagtgaggcagattctttggcgacttttaaaaagaactttatttcacctcttgcagaaggttagcttagcgatggatgctgctttaaaacactcccatctggcttcataaactgtgaggctataaaccagcttgtgggctctattccatggttagttcttgacatcacctgcatgtaactatgctacccttttggaaacacaaagctgggtgtgatgcatataatgacagggatgcttgaatcttttaaaaaaattacatacctaaaaatgtgttaatatgaaaattgcatacatcatcctacccaaacttatctaaaaagaaaactttctacaaattaattttctgtcaacatacgttgacttcagatagtaaaaagaaatgaagaagaaaaatctgtcttgagggagaaaaagagtgtcagtggatacaattagaaagcaaaaaaaaaaaaaaagcccctgttttctgtgatggatgctgcagggcagctctgggggtcagtgggagattagctgacataaaagcaagggagtgtatccttatctagtaaactaacacaagtcagtaaatgaaagccctcggtccccaacctatttcaagttgtttccccctaagtttaaattggcttgtcgttttacaaggatggatgggtattatttttaagcctttattttacaatggaagaatgtgagtgtttcacaagtgaaatgttcccatggagaagggaatagcaatgaatcataaacagtgtaaacactcccaagcttcttatatatgtaag

SEQ ID NO: 2308 - DNA, 1741 bp, Homo sapiens
ttctaatctggctgccaggcacagacggcacgtctgcagcacctgccagcccacgcactggcctgcctggacatcacaagtgaccagggttactcggcactatcatatctctcaaagaagaaacaactcctccaacggcaacatctgtggggctgcttttgaactatcagcaattcatttgagcaagagctgggagcatttttcccctgggcctgatcatgaggaagtgtttgcccctctggaggacacagcaacaaggaccatcttggaagcagagacctggccctcaccagacaccatacctgccggcaccttgatcttgaacttctcagcctccagaagtccagcagtgaaagtgcaacgactaaaagggaatggagtgacacagacaagtgtctacaagagaccctggggctgctactccaaatgctgtcactttgcaaggttactgggtagaacttcaatcttactactcacctgctcaacaacctgcaatggctccctattgttgcctttcccaacaaggcctcatttcatggatgattttccatcgtctggccctatcctaaaagagagtggagcctcttgctcagagtcaggctttggtctcaactgccttgtttcacattctcactatgccagtccccagctgggtgatgatgagtaagttacttagcctctctgggcactggcttccttacttattaaatgtagataatattaggttggtgcaaagtaactgcagcttttcccattaaaagtaataatatctcacttataaaattattttgagaatttaaaatcatgcacggtccctgtgaatatgctacaaaccgctgatttatacaacttaaaatggtaattttatggtatgtgactaatatttcaaaaaaaaaaagtaagcatggtgtctggcccagatctttgaaaataaaacgatgctaattattgttatgaacaaggtttcccaaggccctgtcactgggccaggcacacagcagatgctcagtaaacactcctggaatgaatggagaacatattccacaagcatgctttgagcattgtttatgccaggtatgtgggggatggggaacatagagattccgagttcagttttgcatcctcaggaagggaagacagaattattctccttggagtggggcctcctgacccagctgtgcctggctgtcaggggaattaacagcctctgtcccttgctgcctgttccaggaggcagaacccagtccagctgattctgagccatggggaaattgtaacaggcagaggaatgtgttcttgtatttatctttgactgacagtatctgatgttccaggaattgacttcaaacagaatccggaggagccccttatggtcccgctgccacaaacaaggcccagagagcgcaactctgcccagcccagcaccaggtttttggcctccccgccggcccgaggcacatcggcttcgatgtgccaggcggtgggcgaggaagtggaggttccagctcggcaaagcttaggctgaggctgaggatgggctagagtcaagtctacgtgtgcagccttactcagggagacgcctctgcgctgcaacctcatgcccgggagggcaaggctgggctagggcgggggatcgcgaggggcttggctgggaagaggactgcaggagaggtgtcccaactctcccctcgctcgccaggcacacagcacgcgcctactcggtgctggctgcatagaagcc

SEQ ID NO: 2309 - DNA, 1894 bp, Homo sapiens
ggaaaatgacctgcaggattttacatggagcttcctgtgtgcatgctggtgactgttggcaacaaggtgtcaggaagaaagacattgctttccaaactccttttcccaaatgatcctttcttacccagtctgccttacctgcttctgtactgttcaacagaggagggggaacagggaaaagcaggggcagttgtgaaaaatagaagggaaacttgagtgtgcctttttcttctccttctctttctccaccctcagtcatcattaacagaaaaatatttttaaaagatcccttgatggcatccccaaatgttaagtctgacattttcttagctgatggcctcctttgtgaaggtactttgtgtccgcccagcatgcctgctggatccctggtttgccgcagttgctgaggtaaatactctttccattaagcaccacagcccaagagtggcctaaagctcaaataaatgaccaagaagcaacttaaacattccctggggcgattttaacctatgcaatggctttttgaaaaaattgcctattttttcatgttttggccgggggggtgtctcttattcccttcttttttattttcctttcagctgagtacaccttctctttcatttattcatgcactgcatgaaggatggaagcaggatgaataaatcacagagcattgcccctctccccactcagggtctgtgaagagagctggagcagaatacagtccaggcattatgtcaactttcaggggacctggggcaggtggccgattctcacagagaccccacttccctttcctgtgaaaaataccacagcccaacagccactggagaacagtgttcttctggaagcttcctctgggcaggaggagtcaaagatcctggtcctcagggacacttgagatgggtgtgcccaaagctgtgcaggatggtttggtttgttttgtttttctttgcctcaggaagaatgtgttcacaaacctcaggacaaatcgtttaaaaaagtgtcctgacagttgtcatgcttcatcacttgatttagaggcaataggacagccttattttcttctaatctctggtggttgaggagtctggttggcctggcagaaggctgagattggctgagggagtcatgagcgagcaggggcctctggtgcctgaagcgcccctcaggaagagcgggtctcaccggaaggccacactcatctccttcctggttacccagtgtggggatttgctactttgctgagtgtgttttgtctacattcatggtgctccagaactgtgtctgtgtttctcacattctctttcgtgtctgccagagcaacattctcagcaaaccatctgaatgcaactcctgtgatcacaaaagtcaatcactgatggaaatgaagaccacgaccctgattcctcaggtgccggattgatggaacctcaaatgtgtaaagtcttgcacaggaaaccccccagcatggccattcagaggctctcaactcctgctggacccaaacacaagaaaccaggaggcccagaccccgtctctcattttgcacctcagtaaacagtacctcgaaagagaactccattttcttttcttaacgttcttcagctaaaacaagagtgtagggaaggggctacttggaaaagagattctctaaattgcctgaaaaatcgatcacaacccaagaaccaagtattttgaaacacagcatatttaggaagtttgaggaagctttaaaatatctccagaaggtttgtgtttagcccagcacgatgtctgtcttgtgacccaaaggtttatcttccgaaccttacttgagcaacttcattaataaaaacatttttgagaatgcacatctaacacgtatatacttattataacttttgtacacata

SEQ ID NO: 2310 - DNA, 865 bp, Homo sapiens
cacgcggccgcctgcacagggggttccagccacccgcgctctcccaggtttgccgaccttacgggcccttctccgccagccctggctgggtcacccccacgacccgggactcccccgccgttccctcccgggctgcctgcagtgaggtccgctcctgaggcctcagcctcgccgggggtagggccctctcccgccgtcgccgcagctcctttccgtcccggggcctggggggcaccgtcccacgggtgagggccgcctccagcgcctggcccagccatgcgaacgcctggagcccgcgagctgcagctgcggccctgaaggtgccgcatatcctgccgagtgggtgaagcgtggcactttggaaaacaaatcgggtgatccgcccacctcggcctcccaaagtgctggaattacaggcatgaaccacggtgcccggctgacacaaggaactttctatgaggtcctaggaatgaaggaaaacaggcaataaggcaagaatcgctgtcgaaggagtctgcgccacctgctcgcacagctcacttgtgccttctgagcctgctggagcccagtgtacatatgccgtctccgcgtgattagagattgctgctgcacgtgcccaatcccgtggcggggctggaacacaaacggggtggtgttccagctgcaaccatgcagatgaagactataccctaggagatggaggaacaacagacaagaaagaaacctgggttcctgaataaccacgtggagccaagcagcttacttatctcaagccactgttgcccacctccagattgaactgtctgcaaacaaatctttacttgatgagaagtttaaatataattaaatctagaatattacatga

SEQ ID NO: 2311 - DNA, 2415 bp, Homo sapiens
cttttgattcactcctaagattttttcagaatattttctttttctttctttctttttttttttttgatggagttttgctcttgttgcccaggctggagtgcaatggtgcaatctcggctcactgcaacctccacctcccaggttcaagtgattctccttcctcagcctcccgagtagctgggattacaggcatgtgccaccatgccaggataacttttttttgtatttttggtagagatgggtttctccatgttggtcaggctggtctcgaactcccgacctcaggtgacccaccctcctcggcctcccaaagtactgagattacaggcgtgagcccccatgcccagccccaggatattttcatgagggaaaccacttgaatattgtttagatatggatgctttgggtaaagtgcttttttgtttttctttttgaaattaagaagaaacatggcggctatccttctctcacatcgaaaaggaaattttgaacaatcatggaaaatctaaaacgtgctgtgaaaacaaagaagagaaatgttgcaggaaagattgtttaaaactaatgaaataccttttagaacagctgaaagaaaggtttaaagacaaaaaacatctggataaattctcttcttatcatgtgaaaactgccttctttcacgtatgtacccagaaccctcaagacagtcagtgggaccgcaaagacctgggcctctgctttgataactgcgtgacatactttcttcagtgcctcaggacagaaaaacttgagaattattttattcctgaattcaatctattctctagcaacttaattgacaaaagaagtaaggaatttctgacaaagcaaattgaatatgaaagaaacaatgagtttccagtttttgatgaattttgagattgtatttttagaaagatctaagaactagagtcaccctaaatcctggagaatacaagaaaaatttgaaaaggggccagacgctgtggctcacacctgtaatcccagctctttggaggccgaggcaggcggatcacttgaggtcaggagtttgagaccagcctgaccaacatggtgaaactccatctctactaaaaatataaaaattagccgggcatggtgatgcatgcctgtaatcccagctactcgggaggcttagacatgagaatcacttgaacccaggaggtggaggttgcagtgagtcaagatggcaccactgcactccatcctgggtgacagagcaagacttcctctcaaaaaataaataaataaataagaaaaataaattaggaaattattaaaataattttttagaaaagcaacaaaataacaaaaattagtgactgtaataattggaatgtttgaaatttgtcacagcaataattgactaaaatgaatgtaaataattattcagttttcagtttgttgtaataaactctaatcagtataaaggattgactatcctaggaaaaagattagtcaaggaataagaagcaaaagtagtatttgaaatctaaaaacattaccatgtttgctttatcatgcaggcaaataaataaataaatgacatttttaggttggaataaaaaaagataaagtacatattgccttaattaaattcatcaagttcttactgaaaaacagctctccgccgtgcctggccaggaaatacataattttttttttttttttttagatggagtctcgctctgtcgcccaggctggagtccagtggcatgatcttggctcactgcaagctctgcttcctgggttcatgccattctcctgcctcagccttccgagtagctgggactacaggtgcccgccaccacatccggctaattttttgtatttttagtaaagatggggtttcaccatgttagccaggatggtctcgatctccttaccttgtgatccgcccgccttggcctcccaaagtgctgggattacaggtgtgagccaccacgcctggctgaaatacataatcttaaaagaaaacataagatactttattttaatatacgtgactaaatgtaaaacctaacttattttctgttatctatttatttttactttcagtaacactttttttattttaggtagcattcagcctagaggcaactgctgtttgttaaatatttcctgttcatatattttgcacattttcttatgggttagttttcttctcattgttttgggaagttcttaatatatttggggtatttatctttcattcgttgtctgtgtaacaaataacttctgccatatgggttgtctgcacattttttggtgtcttttagtaaacaaggtttttttgttttgtattgttttgtttattgtaaagatttttaaattttaatggagttgatttcttttctcattcaagcttttgagaataaattggagttgaatttttta

SEQ ID NO: 2312 - DNA, 17171 bp, Homo sapiens
cctggaggtggggtggggagaagtgaagaatctcttcctttttaatagattttcaagatgggaaaatcatattgcaacccacaggcatttggaaacaatttgtgccgaagacagaaagtacacctaacgttaagctgaaaaaactggacgctcccagcaaactcactttgcagactcctggttgtcagaagaaaacgccagaggatttcacttggcattgacctcttactacttccagccacttaccctgggcagtagaaagaaggaacagaaagcagagtagattaagaggagcaagtacaaatggcgtgggacttcaaatcaccacctaagattacttctttgatttctgaaaaagtaggtcaaaggaagatgtcaggggcaagaaaccaattgggtgttgtgcctaagaacgtggaccctgtggccagactgcttggatcagtgtcctccctccaccactttgtagccatctgacctcaggcaagttacttcacctctctatgccttggctcctcatttataaactggtgatatgaacagagcctgtgttctaggattgctgtgacaattacatagaaatgagtcaacatgtacatagcacacagaacaatgccaggcacacagcaagtgctatttatgttcttctttcttcctcctcctcctcttcctcctcctcttcttactttatgccattctgataaacactattttatttattttataatttaggaactgattctaaactacattaagtaatttgtttaaggtcgagcatctagtgagtgttgggcactgtgttggagcttcagtctgtctgacttcaaggcctgtgctcctttcaaggtgaggtgtttgacacatcccctgcttgccatcctggtggcattctctcaaccaccaaagcttatgaaaacatgccactcaggttagcttccaccggacactgacagaggagcaattatacctccgccaaagaaaattctcaatgccaataagggttctggctactgtggtatacttagaggaaatgaatttaggaagttttaattaagatttcaaggatgagaagaggaaaatatgaaggagacggaataaatattcttctactttgattgggagggtcaaaattcgctttcgctgtcttatgaaggttgaagttctaggattcaggaataggattctttgctattgggtattaaaaagcaatagagctccaaatatatgcaatcaatccatcccatctttagggaaacctaaatctaagccacctagtatagagagccacttgtcctgtgagtaaagacttttacaagatttaacagagaataggagcaggaaagagaccaacgtaaggcagttgctagaacaacagaattgctttacagttctgacttcacaacctcattttcctgacctgatagttctgagacgaacttctctgggtgcatctagaatctattccttctgtgaggtggtcaccaggcctggtgaccttttaagtttaatgtattagagccagctgggtctttgagccagtggaaggagactgtgtgaacacttgtaagccatgtgcctttgtccagtagcgtttcagtgctacctaagcatctctacagctattgtgtctgacctgctctggggattgaaacatatagttggaacaggaggcagtggctttttttttttcttcgatagatttctaaaacctttaaatgaagtactgcatatatacagaaaagtacatagagcataagtatatagtccagtgagctatcacaaaatgaatgtacctgtgtaagtgccactcaggttaaagaatagagcattatcagcacccaagaaacccactgaatattccctccaatttatcatgctcttccttctctccaaaggttaccactgtcctgacttataacgccataggttagttttatttgcatttgagccacatataattagaatgatacattctgtattctttcaggtctggtgactttcacttactgttacatttgaaagttttagtagatttgcatgtaataggagttcatgtatttttactgctgaatagttttccattctataaatatactatgagttatttacccattcaactgtccctttaatggacatttaggttgtttaaaatttgaggttattatgaataatgctgccacaaacattcttatacatgtcttttgtgtatatttctgtgggagtacatatctgcaagtggaattgctgagtcagaaagtatgcatgtagtactcagcgttagaggaaccttgccaaagagttttccaaagtggaaatgtgccagtttacgcttccaccaacagtgtgtatgttcaaaatccttgctaacatttggtattgtcaggcttttaaattatgattgttccaataggtgtgtagtagcatgtcattgtggttttaatttttattttcctgaagactgataaagttgagtacctttggaaatgttaattggcaatttggctacctttggtgaagtgcctgaacatggcactgggttatttgtcttccttattaatttgtagttttcacttatcctggacatgcgttatatgtgttgcaaataatttctcccactatgtgggttgcctcttcggtactttaatggtattttggggtgaacagaacgtcttaaaattaaaggaccacaatgtatctttgcctttttgattaggacattttgtgactatttaaaaatcttctaagatcataaagatattctcccatgttaacttctagaacaggggttggcaaactatggactgtgatccaaatccattctgccaactgtttttgtaaataaagttttattgggatacagtcatgctcattcatttacacatcacccatgactacttttgtgctacaacagaccttatggcacacaaagcccagaatgtttattctctggctctttacagaaaaagtttgccaaaccctctagaagatttattgttttgcctttcacatttggaatggtatttgtgtatagtgtgtgatagggatcaagattttttttccatatgaatatgtaattgaaccagtgtcatttattaagggcttagcctttccccatgattccctatgtcataaatcaaatcaagtatacatatatgtgtggatctgtttccagattttcaattctttttattggtccatttttctatcccatgaccaatacgactctgttttacttggtgcacttttaaaagtgagtcacgatatcttcccacttcatttttcttcaaggttgtctctgttactgttaagacttgacatatctgtattagtttttgaataggcctgtcaatttcctcaaaacaccttcctgggatttagattggcattatattgattctgtagatcaatttggagaggtttgacttatttacagtgatgagatccttccagttcataaaagtgatgtattttttaatttatttaggtcttcttcaatttctttcaataatatttagacctgactttgatatcctgtacatattttgattggtttatttctaggtatctttgatgctatgataatttatgtcaacactagcttttgtgtaaaagaaaaaaactactaactagtcacctactgatatggtttagctctgtgtccccatccaaatctcatggcaaattgtaatccccaatgttggaggaggggtctggtgggaggtgatttgatcctgggggcagattttccccctgctattctcacaacagtgagttctcacgtgatctagttgtttagaagggtgtagcacttaccccttcttattcttcctccttctctggccatgtaagatgcgcctccttcctcttcatcttctactgatgattgtcagtttcctgaggcctcccagccatgctccctgtgcagcctgcagaatcaggagccaattaaacctcttttctttgtaaattacccagtctcaggtagttctttatagcaatgtgagaacagactaatacacccagcaaatgccatgctgtagtggaaatactgtggagaccaaaacaatgttacatgctctaagaaataaaaattgttgggtggtaaagggaaatgacaagcctggcaggaaaaaatcatcacacacagcacatttatatacacacactcacttaagtgtctgtctcttccatgggttgagaatgcatactggtattggctcttaagactccatgacagaatggaaagagtgctagtggaatgtcaggactcctggatcctaagcttggttcttcacaaactagttgtgaaatttcaggcatagctctacttaacctccttagatctcagtttttacacctctaaaaagtgagttggctctaacattgacttataaataaggaaagggaaccctttggttcctggtgagttctgacatagggatgtcctgggcatgatttgtatgatttggggggcggggtctgcctgccaagagatttcttaaagaaaagctatcttcctactagtttgtgaatgcttagtaaattctttgacagaacaaatgtctctgagagaggggatcccctgaggtgaataagcagaggaataacagatgcaagaagacatcacaaggatcaggcacaggtgccttacctgaagtacgttccagaggtggagaaggttcaggaaaaagcatagaggcagaagtgcaatgaagctggcagtgtccatgcagggacttccctttgaatcatgaaagtttcatagaagagatgaattgagattctgccttaaaagtctttaaagaaagagttacaatcaatggacaaaaagtgctgccatttctctttgtgtctaacagtgatgatgaggagtgggtagagcagcaaaggctgtttgtcaaaattcatggtcctcctcacctagtaaaatattcaccctggaatatttcctgatctttgatccctgatccctgctgcccaatcagagactccattcccagcacacccctgcatttgtgttgagccagtagaatatatagaattagtatttgttacttctgaaccacgaccattaagaagcatgtgtgccttctccatcttttgtttctctttccatggctagaacctaaggactcccagttcccaggagataatggagcctcaagatgtaaggagcccgtctaagctttgtgctgctataacagaatacctgggactgggtaattaattaagaacagaaatttatttctcacagttctggaggctggaaagtccaagatcaatgcaccagcatgttaattgcttggtgagggtctagtctctgcttccaagatggtgccttcaatgctgcaacccctgaggggaaaaagagatgtatcctcacatggtagatagcagaagggcaaaaagggatgaacttcctctatcaacacctattataaggacagctaatatcattcctgagagtagagaccttatggcctaatcacttcttcaaggccctatctttgaatactatcaatcacactggcaacactcgaattttggatgggacacattcaagccatagcagagcctcaatctttgagttatctcattgaggaaagtggtgtgcccaccgggaatacttccaccagactgttctgtgaatgagaaataaaattctgttgttgtgttaagtcacaaaagtttgaggtttatttgttacagcagccaatgttaacctaaaaaatgcagtttgtttccgaaacaattcacagtagtgacaggaaaggaataaaagcacaatgttcttatattactgccatttcacctaggaaaagagagaaaatgtgaaaggaggataattaaaaaaaaaagtttccccaaactttttaaagttactggagaatgttcacaatttatataaaaataggatgataataatgtcaacacgtaatatctgtgcctaatagattttcactcccccaagttgcattttaattttcctaaattggctcatgacatattcttatgtgggattcaacatttagcaacaaataagacttccctctctcttggcacttcttactcctccctttcccccacgcatccatatccctgctgccttctccttcccacaaagctcatttttggcaaagtggtttttataaaccacacattttaatgaattaagtgtagtcccacgatcacacttacattctcctacagtcccctgacttccacactcctccagctatgggaattttccctcacacctccagaaaggaaaaaaatgaattgaaaattttgtctataagtagaaaagttatgcacagaatgtgatggctctcccacttttctttttttctttttctttttttttttaatgcaagaaggaagatgattttcaaacattgcacgtcctctgagaaactaaaatattcagtgctgtttttcttttggcagtagcataattggttgtgatcataaacccacatagttccttttatcctttttagtggcagcttcatggattgtcttctaccctgtcaaagaagagagttggggtgtttgacagcaaagaaatttaggagaatttcagagcagaaaaggactttgtacatcatagtttccaaacttcttattttaccgctgtggatactgaggttcacaggtggtttaacttgccgaaagtcatggggttagccaatagcttctgcgaaattaagctatacccaacttttacagtttgtatcacatgaagtttcaatcacacaatcttcttggatccttgcaacagctgcatgatggtactagaaccaccctctgctagtgaagtgacataagaatgctcatcagagtgctaggacttagaattgcatccctggccaggtgcggtggctcacgcctgtaatcccggcactttgggaggctgaggccggtggatcacgaggtcagcagatcgagaccatcctggctaacatggtgaaaccccgtctctactaaaaaatacaaaaaattagccaggcgtggtggcacatgcctgtagtcccagctacttgggaggctgaggcaggagaatggcgtgaacccgggaggcggagcttgcagtgagctgagatcgtgccactgcactccagcctgggtgaaagagcaagacttcgtctcaaaaaaaaaaaaaaaaaaaaaaaagaattgcatccctgaccactgagtccatattctcaagtccacctagcctttttttttttttttttttttttatgtttttgtggtgtcaccaacaaagcattagacgcttggccagggtctggagttacctagacaaagggcataatctatgctctctaagagcacacagtttagtgagggcagataaataaacaggtgattccagcccagtatgatcaatgcttctatcttttgcacttggcatgcaatcatttcagaagcaatggttgcatttcccaagaaaaaaaacaacaacaaaataactaacagcagtggtggtagcagcagcagcagcagcagcagcagccgattgctgactcatcaaacgaggaggcaccaacagctttgcctcccaactaaggaacatcttactcaatctccttcccaccccccatcaccacctgtaggcttggaaccaataaaggctttggaaatgaaagataatgtgctaataggatgttaaaacaaaaccactctcaccacccaccaccagaggtagtttgtgtaaaggcgttattcccgagcctcgtgcttcatttcatgactccaacttgtggcactttgctaggtttgcaagtgttgcttatccagagagctcagagattgtttttggcaaaggactcaaagcaggcagatccaacccctctcgctgtctctttcttgttgccaaaacataagactcttagttttatggaaaagtcgtgtgaattttgcttccaaggaataacctgagattacagttaaaattaagtagtagaggaagattgggaattagaaaaactaagatctggtcctgaaaattaatactgtgtataccataccgttaatgctgtgtattaattttaactcttgaacaaggctattcacctcttggttttagtttttccatctttgaaataagaagagtgaactaaatattttctaaagtctccaacaattctggcatgtatgcattcaaaattttgttatttaattttagagaatatttattgagttcagttaccattagttatgtgccaatcactgtggtacacactggtgaaaagaggtgaaaggcccagctgcctttcatatggctgagagacgagctagggagtggagcagttaaaatttagcaggaggcgtgggtttgaagaggtgtgcacaggaagctgtggggcacagaaaaagggcactgggcacctccagatttactagatctttctccactgataggaatcagaacttgccactctaaaacaggcaactttagcatattgattattttgagctgaatgaacagcagctgtaggaaaggctctctgatctctccctttctacccaaaagctggcacagacttcctacaagaaaagtgccttcctttcccttaccagggagaagagaacattcctattactgaagacagagagtcaatgtcaagatgaatctgtacaaacaaacctacgaaaacaacctttatcttccactagtttctccaatatttcctagtcactttcccacaatttgctgccccagccccaactcctttcgctccacagttgatctttcacatctccacagttgatcattctttgttgaaatggtatataccctctcgggccttttcatttcttttttctgtgaagtctcctatgccatgcaaaaatattaacatcaaataaaatgtctatgcttttctcctgtttctctgtcttttgtcagtttaattctcaggcccagctgcagaacctaagagggtagaggaaaaagctttcctcccttacaccacctttgctcttccctgggagattggtctacatggaccacgtcaacaagactcctgggccgtctggtttcttgttggcttcaactgacaggcagcactttaggagactggggcagagaggagaggcagctctggagtatttctttctctccttgggaagatgactccatcaaatatcactgctcatcccaaactcacctactgtctcccttaccttctcccttacgacctacagataatgagagctccactgctgctgctagtccaaagtttctgtaccagttcctgtagtttcacttaactacacccacaactttataattagttgcttgtaaataaactttcctcatatttagattgatcagagggtgtcatctgttttctgttgggaccctggatgatgtaggcatgaaaaccacttttgaggtgtgtgtatattggaggtagtgaaggagcagttagttaaaaggaaagaaagggcaggagaatggggaaagcgtcccaaaggaaaacagagctaagtcttaaaagatgtcttgaaaagacacaatgtcttgaaagaaataatgagaagggagaaataatttcagagagaaacatgtggaggctcagagacttgaaaatgtcctggggaaggtgcaaatgatcaaggtgactgcagggaaggactggtaggtaggaggatggtaagcgatgaggttggaggggaggcgagggagagatcatgaaggactctgtatgttctgtgaatgcgtttgggttctatcctgaagacaatgggaaattactgaaagatttttaagcagaaaagtaacataatctggttggaatttcaaaagattcctctggtatgtagtgtgggagaaagcaggactagaagcagggagattgtttggcatgttccttcaatgatcaacacaagagtcagtgacaatatgaaatttggcagtggtggtggggcagcaggaagtatatgtgagaactattgaggaatttggtgaggaattgggtccggtagtaagtctgagatgatgcccagatgtttgggttgggccagttaaaagatggtggaatcattcacaaacagacgggatcctaaagggggaactgtattaatctgttctcgcattgctataaagaaatacctgaaactgggtaatttataaagaaaagaggtttaactggcttacagttccacaggctctacaggaagcatagtggcatctgcttctggggaggcttcaggaaacttacaatcatggtagaaggcaaaaggggagccaatactacacggccagagcaggagaaagagagaaagagggaagaggtgctacacacttttaaacaaccagatctcatgataactcactcacccactattatgaaaacagcactgaggggatggtttaacctatccatgagaactacacccccttgatccaatcacctcccatcaggctctatctccaacactgagggttagaagtcaacatgagatttgatggggacacagattcaaaccatatcaagagccaaactcaattaactcctcattcgttttttcccagtaccctcaggaacgtcccctgatcactggctttttttcaacattcagcttgcatattgcccttcagtggcctctgctattacgacccagccagtggggggccatatcagttccttcctcacatttaaaaactactgagtgaatacatgcacagttccaggcacagagttaaacattgaatagaggttactatgaaaaccaatgtgtaaactcagtccaaaataagtatggttataaaacgtctttgctcattcaataaatcctttttgagtgcctactttgtgccttttgttgtttattccttatgtgggcaactgtcaaaaagctgtgagaaagggcttatgctatttaaataatttcttctctctctttgtattcttctccatttctccttttgttctcccccctttctcctcctcttcctcctccttcatttccttcggctttctttttcctatatgcatacagtttttgtgtccgggagaaaaaaggtctagagagctagatttttagagagcattaaaaaaaacttgcctgaattattgattcatagctttataatgcacccagtatagtaaggacatttatagatttcatgagctgtttaatatctatttgtggagtaccaccatgtgcaatcatcttggactcattatgtttctttggctgcccagtgagtcataacgagcctctgaaaaaatgtagaataatggtttagaactagagggaatgaaataacagtcaaagtcaaatatgaaattattagtacatgtagtctgtaagagcaatcaagacaaggaagggatagagggcctattattacatgcacatgtgtgcacacacatgtgcatgcacaaactttaaagggttttcagtaaagggggaggtagctggggagccctatgaagaagattcttaaaagtgaagggttgcagctctatttttccattaagattcaagcacgtgggggtagggagctcaaattatggggaggaaatagaaaagccaatggaggcccttctgagaagagggagccctgtactgagaggatgaaagagactttattctccagcagttaaaatgaagaggaagagatcatttctaaacagggcacaagaaatggcttcatttctccctattaacctctgttcccctaaagaaagccagttgaagcaagcaggacaaaagaattctatgtaagcctagtgaagaataccttctatgatgggagccatattttgaaaaaatattaatgtaattttctctttcaattgtgcaagtatagatctttatttctaattggttccaaggtcatcagcccagaggtctgtgggtgtgttctatggtgtgcaaagggaaaaaaagaggatattcagcatttgatatttaaaacaggatttcaagcaagataatagtcttgaaagaagactttttttttcttcctgagacccatctgaattgctttatctcctcctttggcctatgtactgaattcttatcattttatgttatctttgcatccattttgaatataaattggactttctcatacagaagcagggctttatcttcttcgacacagtttccagttttctgcctcctcccagttcctcaagctggttaatccagacatctgccctatacaactcctttcccctggcaaccacctccctagggaacagttagacacagcctacttgacttgcctcactgacccccacaccccatgtggactgcacagatgtgcaccagtgaccacttctcagtcacagcacaactccatggaattcgtgtctgcttgctctgaactcaccagttagaactcccccagggaaacctgcttagataatgctctggaccccaataaaggctttgacccacaggtttttctcccttccttgctctctgcccactgagtgagcacatatgtccctgaaggttcctctgttctgctggtcctgcaaaacgtgctgccctcctttctctgggatctgtaagtaataaactgcttctggtatttcatgtgttttgtggagttgcctcctctgtgtctctcctgaccaacacacgtgaacctaacttctttccaaatcatggttctcctatagaatggctatcttggcaggagtaaactggacacagtccagataaaagccacaagggcatctgatagtataaacaaattttctgtgagaggggcacctggtcacaggttgaacacttaggcatgaggctgtccaccaagataaagaagcaccccaagaaaggcacactgtaaacatctacaggaaaatccctggagccctgtcaagtcagcactagagtttatattcactgtccggagagagacctcaagaacaaattagaaatacaacagcctattcagcaccaacaagaatcacccagatctacaagtttccctgcagggtagaaaagttattcttttggagacaacaggtaggccatgaagcttgctggtccatgggaagaggagataccacagaggaagacaggcaagccctactcttcctgtcccaggagatgatgagaggaaaaatgaagagagagtgaaggggagggggctgatttaggactatcccaaaggagttaatgcaaacaccaaggaggcactgagacaaaatagaggagcattgtcaaggggatggattggggttggggagaaatttgcccttctggaagactccatcagttgctatctggtaaaggaagattgaatatacaaatggacaatgaccagaccatacttaaaaatagaactctggccgggtgcggtggcttgtgcctgtaatcccaacactttgggaggctgaggcaagtggatcacctgaggttgggagtttgagaccagcctgaccagcatggagaaaccctgtttctactgaaaatacaaaattagctaggcatggtagtgcatgcttgtaatcccagctactcgggaggctgaggcagaagaattgtttgaacctgggaagcagaagttgcagtgagctgagatcacgccattgcactccagcctgggcaacaagagtgaaactccgtctgaaaaaaaaaaaaaaaatagaactctgacccacaatctgcaggaatctgcccaccttatctatataacaccccccttatctacaataaccagcctaggaagccagcctgcctgaagtcagacttgcaggaggccagattgctgtctctagtaacaatcaatgaagctgaatagtaacttctgtaataatctgcaaaaaatgaccagaactttatgaataatggacagcttccctaatttttgtccatgcttccaacgtagggccaaccagagaaaggcaaatattcacccctaagtaatcacttaggatgcccccgctcctagtgagccagccacctccagcttcccatgccaacagcctccaatcagcatacacctggagccttcccttcatgccactctaaggctcctccactcctctgcccgcctttgcattgctgccaaaagtgacagtggcagactcccttgctatagaaagctctgaataaatagcctttgcttttctcatttggttggtcttcgtttatttctacagtagagaagcttagaatagagtcagttggtctaacatgagggcctctatggcaggaaatagattgtctaggctggagaattgaatgaggaatcagagtgtgttacaaatggctattgctgagggaagataaagtcacccagagagagctgtcaggcctgaccaagtgagaggaaccagaacaagtattatcctggctgtgagcttgagctatgaactccagtggggtaagtggcaagcgagagactccaggaaccagaccctggaccttgacctgtctattcttccttctgtaagaagacacgtaagtcacatcccttcccctatataccaagaaactatctgggagaggagctgcagagaaaagtagaagtgtgaaaaattggagtgattgggcatttttacttaaagatgtggggtatccattaaaggggctgtttaaatgactgcatcatcagctttgctgttacttccccactaaccagctcacccataaaagcatatcagttatgggaaaaatattaaaaccatattttctctgcatgttgaagttgtagttaagcaaattttgtaattccataagaactgaaactaatgtattttcttgttccttagctaaacaactctgggataaagaataggcttttagttgaacaatgctgagatcaggcaaaaacaactcagctacttgctccagtggatacccgctcctggaaaataagactgtggagctactgaaacagctgacttatcaggactaacgggtcactcatcaaagctcactttcatattctcaccttgtggtgcctaccagtccaaagctattgtgccataaattctgcccaatcccaaccagttccctgcctttgaagacccacctaagaatcacccagcctaggccctaaaaccctaaataatcctcccctgacttctctcttctgagatgctactggattctgtatctagatcaagctgatgttctctcttattgcaataagtctattaaaaacccagctttgcttaaccaacactttttcttttctggtggtctttttggacactccatagccagtgccattatgctttaaattgcatagtctggctatggaatactaggggaaaacagccacaggcaacaagttaagctcatagctacaggaaacagatgaattctttctgagcaaaagtaactacaacccagaagaccaaacgttagaagtgtacatccaggagaagctataaacacctatcctagtaacaaagacataagacatgtagtttctatacacggagtagaccaatcacaccacttttattttcagtgatttcctgtacacacaaagagcatcaattaaatttaagaagaaaacagtatacaaaagaacatataaaatatctacataaatgtatgcacagatatgatgcatagttgggaccatgcaagtccaggggttctttttccataccttgtattaaattcacccagtatttagggaagatgacatggtttgactgtgtccccacccaaatctcatcttgaattacagctcccataacccccaagtgtcatggggggacctcttgggaggtaattgaataatgggagtgggttttcccatgctgttctcatgatagtgaataagtctcatgaaatctgatggttttataaagagcagttcctccacacacactctcttgcctgccaccatgtaagacgtgcctttgctcctctttcaccttccactatgattgtgaggcatccccagccatgtagaactctgagtccattaaacctcattttctttataaattacccaatcttgggtatttcttcatagcagtatgaaaatggactaacacagaagaaaaggaaggaggaagagaaggagaagaaggccctgattttcctaaggctcctgtagaccagattacttcacgctctccttttcagagctctcacatagaaaagctaaaaggacaggcccatggatatggaaaaagctggacaagcacgtacatccagtgatgcctgcttaatatgttcactttgcacaccctcttagcccagtcccttcccatggcccccaggctcatgcttcatgttgtccacataagcatttctattgtgtcttgacaccaagcatcaattcctcagttaccacaatttgcaattctcatccatgtcatcctcaacacataatgctttattccctctccttggctgtcagtgagaacttggagggcacttgcttctatagttaactctcagatgagggttggctgaatcttggaagcggctagaacatttgctcagtgccgcctcagatgagttgtcatctccctgctctgctgtcagttctgattgcaccgccctggtttcttgggctgccgctgcctcatgtcaggccctctgaaagacctcgtcctgcagctggtatctcttgctttctctggacacggtgtctgcccacccgggaggcccagagaaactaaaccctccagcgtgactcagcagaaaagaactgggttgctgttgctggccgacaccatcctgtttctatttttctcctcatacagctgtgactagcccagaaagtcactttctgtccccaaacatctgttctccaaacatctctttgcctgtcagtcctcccaccctatagattttcatatttcatcaccgtagtaccatcttgttacagcaaaactggttgaaaggagtaagattatataagatgggggacaaaaagatttctcataggaaaacaaatatgtaactttaagtgcttaaaagttaaaaacaaaaacaaaaacaaaaaacttttctttagagatggggtcttgctctgttgcccaggctggttttgaactcctgggctcaaatgattctcccaagtaactgcgactataggaatgagccaccacatctggctctaagaaagtttttttgtttgtttgttttttaaagaaaatattgcacttattttgtgtaacttcgtagcactgaaacagttggtggaaattatagaaatg

SEQ ID NO: 2313 - DNA, 1286 bp, Homo sapiens
agaagaggcacgctgactatgatgttgatgacaatggttggcaatatgagagggtcaacatggtggctggagttgacaaagtgggttgttgccagtgattagtgtagtaatgaagctatgtctcctgaacagtgaagcctgatcctccagaaaatgtggtagcccggccagtgcccagcaaccctcgccggctggaggtgacgtggcagaccccctcgacctggcctgaccctgagtcttttcctctcaagttctttctgcgctaccgacccctcatcctggaccagtggcagcatgtggagctgtccgacggcacagcacacaccatcacagatgcctacgccgggaaggagtacattatccaggtggcagccaaggacaatgagattgggacatggagtgactggagcgtagccgcccacgctacgccctggactgaggaaccgcgacacctcaccacggaggcccaggctgcggagaccacgaccagcaccaccagctccctggcacccccacctaccacgaagatctgtgaccctggggagctgggcagcggcgggggaccctcggcacccttcttggtcagcgtccccatcactctggccctggctgccgctgccgccactgccagcagtctcttgatctgagcccggcaccccatgaggacatgcagagcacctgcagaggagcaggaggccggagctgagcctgcagaccccggtttctattttgcacacgggcaggaggaccttttgcattctcttcagacacaatttgtggagaccccggcgggcccgggcctgccgccccccagccctgccgcaccaagctggccctccttcctccctcaggggaggtgggccatgcagctaacccacccaccaaagaccccctcaccctggccccttgggctggaccctccaatgccagcgactcccaggagcccttgggggacgtgaggggagcctctcacatccgatttctcctcctgccccagcctcctgtctatcccagggtctctgttgccaccatcagattataagctcctgatgctgggggggcccagccatccccctccccccagcacccacaattttcagtcccctcccctctgccctgttttgtatacccctcccctgaccctgctcctatcccacagtatttaatgccctgtcagtcccttctagtctgactcaatggtaacttgctgtatttgaattttttatagatgtatatacagggtggggggagtgggcggttctcattaaacgtcaccatttcatgag

SEQ ID NO: 2314 - DNA, 8860 bp, Homo sapiens
ccgaatgagggtctaggtcgcggcgagcgggttcactccgggttctgggtgtcgggagccagcgtcagggtcctactcccctgctgccgtgataagtcctttggctcgcgggaagtttcgaattgtttcacatccccctccccacggcggggacccaaatccccccgcgtccccaggctgtgggataatgggggcgcccccgggggggtgtcaggaaagtggaaaagtggctctagaggcccttgggtcggggcctcagaggaggctgtccaggcgccacgcctgagccggctcctcctgccctcgcagcctcaaagtggagtacgacaagctggcaaacgagaagacggagatgcagcgccattatgtgatgtactatgagatgtcctatggcttgaacattgaaatgcacaagcagacagagattgcgaagagactgaacacaattttagcacagatcatgcctttcctgtcacaagagcaccagcagcaggtggcgcaggcagtggagcgcgccaagcaggtcaccatgacggagctgaacgccatcatcggggtacgtggactccccaatctgcctcttaccgtgtgtatagcccttttattcctctcatttatcataaccagagattgaccctgaccttagctggcctcaaagaatggcggccccagggctccggcttctacaagcaccccaagggcttggacccatgtagggctgtttcccccttggctcccagttgcctcctagtcctcaaactaaaggggagccagacacgcctcaaatccacctcttcagccatctgcctcatcttccactggcttttggtgtccttgccattgaggagggtgggggcctagggtcaccttcaaggccaggccagctggccagtacctggccacctcctcacacttaccccggggcctgtctgcctcctccctggcagaagtctgcccttctttggccacctgggatcagaacagtctctgctgtactgttgatgtgcatcgtgctgtggaatttgggtttacgtcttgctgtcccatgcgcgaagctgcctggctgagcattcatcatgtacgcttgtgaactccagctggggagctgagactggttttcctgactttctagaagtcccgtctcccctttacacaggaagacatacccaagagtgctctgtgaggcccacttccggactggccccttagtggaaaagggaagctgggtctacctggcttgtatctttaatgcatttcttaggttcaagtggcatctttctcctgcttgctgctttggtgtgaggctagtgacatttaagataagcacctgaggaagaagagtctttttagtgtgactttgggcaaggctcttacccttggggtgtacctgtccacctttcatctctgaaatgaagagggtggacaggatcactgcttcccagtccacggaggagcttctggacggtacagatacaggggcacttgccccagaggtcttttccataggtctggggatgggactggaaatctgtgttcctaacgatttctagatcattctgaagtgtagttaggcttgggaagcagtagactgattcaactctaacattctgggaacctggttggtcttctttcctctttctgttctcgtgggaagtcactatttcaaggtggaactgaaggccccacaattttcctctgcttggtaggatacatgatgactcttgacttttccgcctggggcagagacctggaggtctgtgttttagtcatggttctcccccgatgtgacctttggcaagtcccttctcttccttgggcctcagtttctgtatctgtaaagggagaacgtacaccggctcatctctttgggcactcctgactcctaccaggaatgctgggaggctggaatcacagaatgacacttatggacaccggcccttccatcacactgtcaggacccgtgatggttgcagagtcctttgatgaaggcagcacagtgggtttgtccttctgggctgagcccatagggacacttctcagtgctgcttgggcaggtgggggatgcaagcattggcctggtttgaatcctggcctactgtgtggaatgggcagagaggagtcttgaaactggaacgtgaagaagtgttcagtgctggaaggcagcaccccaagaggggaaatcatgatattttaatgtttaaagtatcatcagagatcatctagcccggggatcgtcaaccttgacactgttgaaatttggggccagatcattctttgccatcctgtgcattgtgggatgttcagcagcatccttggcctgtagccactagatgtcaataacaccctgacaccctgatattcataggaggcaaaatggcccttggttaagaacctctgatctagctcaatgcccttgttttacagagaggggaagtgattatgatgtttaggaggaaagccaggccagaggcccaggtggctgactcgcagcccagggctcttcccctggccctggtgcagccctggagggtggcctgtgtcatctgtctcagtgaccagctctcagcttggtggtggttctgctagtggtagcagggggctgcagggttgggacataccttgtgaattctgttttccgacatttctcctcttccagctcctcaccccatcccctttcaaccatcttcttgaggtttccaggccaactcctcctacccctgcggtggccacagcagggtcccctctcaccctctgcccccctctttggaattaaaatcctcttatgaaaataattttttttaagttttaagaaaggagtaaaactgggggagaagcactgcttggattagctgtatttcccttaagtagtattcaggaagctacaagttaggtcgaggcagctcgaggcagacattggaattcaattaaagccaacgagtggggcctgtgacccccattttcaaggtaattgcttctccagctccaagtgaatgcagccatcgccctgtcattaagcaggcagccgtctaatcgctgcgcctgacagagcctcacaaggcaggaattacggacagccgagtcgtgctcgcactggggagccgtgcttgactgcactcccgcgaaggagtccgctaatctagtcagggcgttctttatctcctcctcgaggagagcagagagcgagcctgcagctgagctgcctctgggaagcaaggtgaagaaggataacggggtgcagagccatgggctgagcaaaagggcaggcatcctggccccagcaggaaagggcaggagagagagggtcccaagaggctcttggcagctttcagtggctacccccactgcactgttggatttgctgctctggaaggagacacagcctggcatcctggtcttggacttagaggagggctttgggcaagtcactttgttcctccaggcctcagtttctccatctgccctaattgtttagtggctctcttgctcattggatttgaaagattctgaggttgtggctcggctcaactcaactcaaagagaaatcagatacctccggcatgggcagggaggtagctggtggcatatttatcatgaggattagagtattcctggggtcttccttcctggtgagaaagggcaggatccaaggtcagggtggcatgtgtgaaaaggggaaggaaagacagacagagggaaccaggctctcaagccaagcctacccactcccctgctggaccacagggaactcaagtgtctaccgagggaagagaagtggaagattgtctctcttctagctggggcctggcaagacttggttacagtagccctgtttctgttacatgcttcttggatccaattaacaggaggggctttagaaggacaagattcctgagcacgaggagggaaatttgacacttggtcagcaacctgcagaaggcagcatctatatttcccaagcagatttaagaccctttgagccgatatatcacccatttctggaaccctcttgttacattgctatatcatggcccaagatctttggactggaaagtggaggaggtctcatctgcttacctactgacaatttggtcttcattcccttggaaattaacagtaggggagatgtcacagagcattgacttgattttttttttaagtgggagggaggagaggaagagggacgttgtagcttgtcacaaaatacacaggatattttgaagccatacctaaggtattcactccaggatgtggatgagctgcattcagttgactgaattttgtgtgaggggaaaggatggccaagagaatgtgccttaggatccgtctttcagccaggcagccatggtggaaggaggtaacgctgagtttgagtctgggctctggttgctgatggcttcatggagctgttcagcctcccgagcctgttcaccatctctgaagtggggatcacaagggttgttgtgagcactaaaagctattaccaaccccagaagctcaatgcgtgtggagctatggtgcccactgagtgatgtgaaagagaaggagcagtcggaggcctggagctgttctcgctgtccttggagggcaggaagtgttcattttacgctgtcaggaccctgtctgactcctctggtgggagcccttggcgggtcttggctctggaaatgcttagacaacttcactacgttcaacccaaatcatgaacctgagaaacgcagcattaaatcacctagcgaaggcctaaggcgtgatgtgcataatccaattacacgtactctgcaagcaagatcttcccttcaacctctcctggaagtgactgcaccttctgagccaggccatgggtgcttatcacttgtgtggagtacatgttcgttgtcctatttgtgctctggcaggaaatgttcaaggagggaaaagtgaacgcccatgcatgggcttggttccaggctcctagcgcctctttggggttagggatgcaagagggaattattgacttcctttcatattgtggatggaggagttcccatattggaaggaatggtataagctggagacaggcggtctctgattgtggaattgattccatttctctgccatggggaaagctacccagttgaaaacagtatcagcctcccactcagacatcactgtgtttgagcacattgtgctctgaagccagcagacgtgttgcaggggataggaatacagcctgaggatagctgtgcccgcctgcctgcagaggtgctgagctgtgatagggacgggggtcaggtggggctttgcccactggcccccacacctgtcagggaaaaatcttcgtttcactctctgttgtacccaagattgttgttagcggaccctccgtctgacaagccctggcatctgctcttgcactgaggaaggagccttggaggttggctctcctgtccctgcttcccagagtctgctggaccggtccttgctgtgccttcaaaccaccccaaggagacctcgagggagtttctggctctttgcagcaggttgctcttgcactcagagatgaggaacgcttcagttttgcatgggagattccttttctcttttgcaaagaggacgctcctacctgacaacactaaggcagaaaaccagcctctcagccttggaagcttaacagctttgaaagccactgtctgccaaacagccgctgctgcctttgttccaagtttctgacgtcggttcactggttcatgttttgggcaagcaggacacctcatgaccccattgatgcttcctgtcccaactaactgttctagctgcgtctaattgggccttggaaggaaggcatggagctgggaggcggttggcacctgtggacaccatttctcagcctcttcatataccttttccaaaattttcactaatttacccacaagacatgtactgagcaaacatgccaggcactgttagaggtgctaggatggagaagacacagtctctgtttctggaactcacaggttgccaagcagtgcacaaaggcaaaagaaacagtgtacacctgggatctgtctgtttgctaagattgagcacctgctccatttttacctgtagtcacacatgtgatcctggcacaacacagagaggtcggctgacttgtccaaggactcatagctgataaaggatagagctggaagtctgccttattctgcctggctccattgtctgtgccgttagagctcttagaacagagaaatccattctgacctgaagtgggagggcattcagaggatatggcctttgaactgggcaaagctgagcctagaaggttgggtaggagaagagacctttcctggtaagataagagtcagggtgcgtggagctattcaactccatcttgccttgggtacaaatgttcagtgcacattttctctagaaacagacttgttcatgaaaggagttagctgtgtctgcaggcagcaaagctacttctttgaagccttctttcccctcctcttctttgtctcttcctcaagggatcttattggctctgcactataaaatgtggattaaataccttgctttcagtccttgctttctgggattttactaaatagttatcaccagcagaattaacgggcctaccaacaatttgtctaaacaaaggggccctactggagactcattttaaaaccaggtatccagataaagttgtattgtccgaccacaccagggaatactaggtagccattaaaaaggacaagaaaatttcttcagaacattcctaaattaaaatcaagctgtatagcagtatggttcacaggagtccatttctgtataaatacatttgaaatgtgtagattttcataaagaaaaacctaggcagatttaacagtagaatcttccgagggtaggattgaagggtaattttaaaaactttttaatgtctacttatttttagtattttcttaaaatgggcatgtattagttttgtaataagatattaaaaattacattttcttaaaaaagaaaaagtggaggagctcagagtaagcgcccatcctagaggagctggagtttcttagctgggaggggttggatctccgcattggactctgtgatgctggctccaggggcccccatagctttgtgtctgccatagtgtctcagtgcagatgtggggtcagaccaccctgggacagtgcccatgaactgcctagcaacagacgtcacagaagtgctctgacagctttgaacaacggccgcagtgccagcctttcacccagaactgacaaagggagccctctggggccaggagtgccatggcttctgtggctgccgttaactttgggatgaggccaggtgggcagtttgcagcttagctgggggagagtagggccctttatccataacctgaaatgcttactgcctcctcctgccagagccatgggccttcactgtgttctgttatctgttcgcggttgccagaaaaccatctcatattgacaggcgagctcccttagtaaggtgtgagatctggaagcttctcagatctattctctatggcactttccaccaacccctcttgctttggggatcttcttaggaatgagcattctttggatgaggggtggtggttgacagatttactagtggtgggatttggccaattactagctacctactccagccccctaagcatctattaaatggccacaacccctcccttgccaggtggttggaaggtgcccaggcattcattcaggcattcagtaaatgttagttttcttctcttgcactagttgagaagaaagatgtgtgcataggtggataccagcatacctaacttctctttcagtagtggagaagaagttgggtggggcgaagggagaggaaagagaagcccaagcccctgaggctagtgttgagtggggaagttgggcctctggagccagggcagcggagtccttgactggggaggagacagggagaattgcattgttgttgataatactgacttgctgcatggcaagtttttagaagggttcagcaatccattttaaactctttgtaaatgttagctactgccatgaggcttagtagctgtgcgccatgagctgctgcaaacattatcttacaataatcctctggggtctgctgctttccccctttacagataaggaaatttgaggctccaggacttgaagtaacctgccccaggccacacagctaggaagtgccagagctgggatttcaatcctgttctgtctagttccaaagcctccactcttccagttaccccgttttccaccactgatgtccggtgacgttagctctcattccactggcccccagctcatctggctctggggcctttgctgtgatgacctgccctgcccctgctctgtaaggcaggcttggagttcctaagaaataaggagccttccccagggtccagcctcagggtggaagatgctggcagctaatgctgaaggcatgtatgcatgagcaaacactgccagggctgtgagcttaaaaatggatccctctctactcagagggaaccccatgactctgcggttttttaaatgcatgcattctttatctcaggcttggaaacaaacattgagaaattatttgtgaaacgggggtgcagggagttggggggtgcttgaagacataaatctttacattacagtctattaacagacttccttcagcgagacattcatgtgaactgagctgggggcaaaggttttgggggtgcttccccctgccacccacccagtgaaggagcaagaggaatgggaagagccactccctccctccctcctgaggtggccacgcctcccctgccctccccaactcagctgtactcaccaccgac

SEQ ID NO: 2315 - DNA, 8523 bp, Homo sapiens
gggaaactactcagcttggagtcacaagacttgggttccagtccagcctctgccccacgctgagctgggagctcacagtccagtctcattctttggagcctgcgttttctcactggaggagggggcttgacaactgtgcaaccgggtgctcttgcaggttctggggtggctcgtgagtgacagcagtactggtatgctggtgagtgcctcagcaggagctccctctgtccccctaccaactccccgatgtctggacggcaccagagcccgcctgggaggccacgagctaacactctcaagaggaaaacagggggatcaaaccaatgacccaagggcctacagctaagaactgctggagccaggctctgaactgagctctgcctgactccagaggtggtttctaccaccaggcaatacaacagggagacacgcaggtgtgtcagagagcagtcctcacagtgcgagcacagaaaccagaggccaaggctgaagattttcctggactcgcggtgctgcccaggaatcttctgagaaaacctgtcagttgcctatttgttggtgtggaactgcctgtgaagtcattctgcaggggtggaaagtgggggccagctctctgtgggcaacagggaccatcccagagacaaagggcagcctcagcccacagaccacttcggacttgaatcaaggcctcaaagggcgagacctgggccactgtcaatgtgagggcagggctgaagccagggatttggaaaattggtggaaaacactcctatgagctggggcttgctctgctgtggaaaactgccagcatcagcacttctcccaaggctgtgccgagtcagcagtcagcccactctggagctgcctctgaggaccaggtgcctacaggaccctgtaaggagcttgaagagttgtggctgacggagggatttctgtcctgggctctaggaattctagactgggcccttcctcaaggagctttcagtctggcggagcagacagacatgggcaaataagcccacaactaactgtgccatcactgcagaaggaagtgccacggaggagcatgagggccagttgcaggaaggagccagggccagcatgtgcctgtaaaagccagatagtaaatagttcacgctctgcaggccacagggtctttgtcccaagcactcaactctgccactgctgcatgaaaacagccacaggcgatatgtcaaccaaagaggggtggttgtgcccatatgaaaacagagggtggatctgtcccacagtttgccacagcctggctgttagacggcctgacctgattgggggtgggggtgatagtggggagaaggcttccccgaggcagtgatatttagctaaaagctgcaggctgaggcaatgatggaggcagaatcacaatatgacaattatgataatcacatcaccatgatcaagttccacctaacacgtgtgttctatgttgcgcactgtgctaataacaacactaccctgtgaaggaggaagattttatgcccactttacagatagagacactgaggcttggcagtatgctgagtagtctgttcacacaattcagctgcattttttgccctgcccacttgccacttctgttcgggggaggctgacccctgagatgcatctcctggaccccttgcccccagctttctattggatttggccaatgaaaggctctggtggcagactgagggctggaggaaagggaggccagggatttttctctgctcgctcctgcttccccctccctgcccacagaccctgcacagccaatcatcctccagaactcagccatccctgggattggtaacacttcttccccatgccctttagcctagggctccaccctccccaggaccctgggccggcccatgggtgcctcgccatgctttattggttctgttcattaaagtctcttcatgtgaaccatctggggtccattctgtcccctgccagggctctgatgctggaggttggctggcttgctggtttctggtctcacatggctaataaacaacagagccaagtagaggtgtgggtggattgtgggaaaggaggctgtacctgaggaggctgggccagggctggctcctagctgcccagctgacttccaggacagtcaggggtcaaaggaggccaggaaatgcagtgcctcctttcctgccccagggaccagtgagtgaccccattcttgaggcccccaattagcacttttagttttctaagcctggctccaggtctgcaacctcctgttcttctccctacccctagcagcgggagccagtgttgctcagcgcagacctgggctgggggctagggctgaggctgaggctgaggctgaggctgaggctgaggcagggccctgggctcttcctcagggaggagatagtggggcagatggtggtgaaatgcagggaccagctgggtcacatagatgcctggaggggaagaggaagcctctgtcgccatcgccctggcaggaagcagcatgcaggcgtgttgaatggctggtgccagggagagccaggctggcagatgagggcttgggctggaggtgaagggtggaggcaccagggaggaggagagccctctgaggctcagtcgtgaggctgcagcaacaggatctcctccacacttgggctagtgtataccaggggcccacccagagctgcagcctggctcttcatccacccatctatccacccacccacccactcacccatccatccctctcctccaaaaaccctacgaaaattgagcatctacaaagggcaggcataatgccaggtgctaaagatccaacaaggaatgagtcgggcccagtgaccagacagagaataatgacaagttgtggtgagtgccataaagaagccaagagctgaaataaaggccaccctgagcccaacaggatgagcaggagcagaccacaaaaacaagggggagaatgtctaaggcttgagcgaggggcctggggaggagaacttcacagaggccttgctactctcaggcagaggtgaggctagggtgtggcctgtggatggacagagccactagggaaaggcagagttggctcacaccaaggcgaacaccatcctgtgcctgaccctgggctctcccacctctccctgctcagtggctccagcatggaatcaggcagcaggaaggggcaccgggagatgggtattccagagctgtctgaaggacagcaagtgtggcatggagacttcttggcatttaaagaagtccagggatgtggctcatcctgtgaaggctattgaactgaagaggctgcaaaggccaaacaggcctcttattcacactaatttggaggggactcggaaggacagaccaccactttcattttgctccagaattctggcactatctcccgatgcaataggctagtctttgctagcattccttctgtagctcttaacaactgctgtctcctacagtcttctgataggaaccctgccctgctccctcctcgtcccccacaggtcagttgtaggtgactgcgcacctaaaaggagcaatgctgaccgagggggaaggtgttctagaatggcagaaatgacaaagtagagacaagaccagcactaggagctttccttctggccacctttgctgggggtcacctgccacatatggaaggcaatggatttggaagactgcaagagatattttaatactgggcttatggaaaccctgtgaaaatcaagcttctgccaggactgtcttgaggtatagacaatagcatttccggagaccccgagaatcaaccagcatgtctctctaagatatcagaggcccccaggggtgctggaggcagggtctggcttgtccaatgcagccaggagaggctggaaaaggcaagcagcccggagtcccccctgggaatcagggcagagccttactgggtggggctcatgagaggctgccacactggccctatgggctctgtggtcctgtgtccagcaggagctgttacagaggttggcctggcaccagagagtggggagagtggcttgagcaggtcaacgggctaggggaggtgtggcaccacgtagcagcttgtagcagccacccccttacaaacagggcacatcagactctgagccgagtgccttccaaatagtattttgtttttgacattccaacgttcctgggaggaaggtttcatcatcccattttataggataaaaaaaaaaaaaaaaaaaaaaaaggaggcccaaaggggttaagtcacttgtccaagactgcagtggcctagaacccagggtggtatgacctagagcgcaaaccagggggaggaagtgctgttgggttccccttgaccccccacgcccccgacctctccctggacagcagtggagatcagctcctgtcgttgagagtcagttggaatatgagtaaaaagtaaccattaaataataacgatgaagcagccaacactgagcacactttcacaatgtcagtgtgagcagagcactttacaggcaggcatgagcttactcaggcatcacaacaacccgagaaggtaagtcgtcatattatcttcattctgtggatgaggccactgaagattacaggtaaagtgacaaagccaggaaacagcggagctcgggcttgactgcaaagcctgggctcaaatcactaggggacagtgtatgtgtgtgtgtttcacaagtctgatgagccacctgcatctggtggcaccagataccctgggcatcctccgcacccctccagggcacataaacccaagcctgggcagcagccccgctaagggtctggagagcctggagaagatgctggggctttctctaccttgtgtgtgctcccaacttggggctctgatcctgcctctcttggggctgttcaggcccaggctctaacactcaggctcttccagggagccccggcacagaggggaaccacagaagtcccgcatgatcaggagcctgggcaggctggtgcaggagggctgtgaacagggatagctgagtctgctaagctgcaaacttgatttgcccttggcctccccggtcaaggccaactctggcagccacaattaggctattaagtgggtttgctcccactcgaggtagctacgatacctgcaagatcttccttggaagagactagtcttggagagctgcttcctggttcgattctgagcgacagtctgaaaacaaagattttcataagatcagatgggctctggtttaccacacaggaacctgtttggggctgggaaaagctactatagtcacagaagccaggaatactgtgagatctgctccagatcacagtcacttccctctgaggtctccgggggtttccacagccaagaaacaatggttaagaaagacaaagtgaaaaggagttgagtgtggcctactctctactgagcacagatgtgttcactctgaaccagtacattttctagatgaggaaactgaggagtggtgaggttaagcagcttccccaaattcataggattagcaagtggcagagtaggggatcaaacccaggaatgtgtgaccctgaaccagagttagttttttctttcttttctttttttttctttctttctttctctttctttctctttctttctttctctctctctctttttctttctttcttttctctctctctctctgtctttctttctttcttttgatggagtcttgctctgtcgccaggctggaatgcagtgattctcctgcctcagcctcccaagtagctggctgggaatacaggcatgcgtccccaaccccagctaatttttgtattcttagtagagacggggttccaccatgttggccaggatggtctcaatctcttgaccttatgatctgcccgcctcggcctccccttttttgagacagagtctcgctctgtcgcccaagctacagtgcagtggcaagatctcgcctcactgcaccctctgcctcccaggttcaagcgattctcatacctcagcctcccaagtaggtgggattacaggcgtgtgccaccatgcctggctaatttttgtatttttagtagaggtggggtttcaccgtgttgcccaggttggtctcgaactcctgagctcaagtgaccagcccgctttggcctcccaaagtgctgggattacaggcatgagccaccgcacgtggcctctcaactggagtgtttaatgattacactgcactccccatgatcagatgcccttagagaggcacaaggcaacggacatgctatgaggactggcccttcaatatatctttttgaagcaccgaataggaacttctgggtgaaaatgacagagtgagactagatgccagactctccctctcctcccaaaaccaacaaaaaattataaaagcttacaagtaaaagaactcaccaggtgcaactaaacaagggaaggggcataatttaaagccatgaacttcaaagaattagagttaaggaaagaaaaagaggattctgaaactggaccaagagttgcatcatggcatggctcctgtcaagcccaatgaggggtctcactgggtctgagtgggggtccttatcgctccctctgctgaatggcaccagctgctaaggaactaggtggagagcacggcagctcctctgatggaaatgaaggctccacggggcatgatgtgaaacctgagggtacctctttctggaatgggatacagctccccaacgaggtgaaggaaactccaacataggccttttgccagaacacacatatgtgaaacagactgcttgcttactgcctccacagagcctgagccttctactcccacaggctacagaagaggagaaagactaaaacccctggacctcccagctagcagtaagggtttcccccctcacacacatgggaggagggccagacatctctcccaccctcggatcacacccatggaacatccagacagagcttctcaaatgggagccagaagaaaagaaatggtatggcaatacagccaacatcctcttgcaaaagaaggaaagagaacaggtgagcattgcccaatggcccaaccgagaaggcagccccaggagcagacgaaatcccctcaagtgcttagagcagtggaacaacttattacaaacacaagtaaaacaaaacccgaaaaatgagatgctaaaacaaaggaatgagaagaaaaaaggagattgaagacctagggggaacaaatccaggactgaaataagagagtgctgaatgaatacctaagtagaaatagacaatcccagttacagctgatgaacaagatggaggttgccgctgttagcaagaagcgaatggctatgacgggcagagagcatccaacacggacggattcctggaatccctggaagagagaagccacgaaatggcacagaagtagtcaaagatataaacaaaaggaattcttctgccatgaagaaagatgacgacaccatggtctggggaaatctggtacagaaccctctactctgaggcattctcttatgaagcttttgaactttaaggaattcttcacctaccaggcagacaggacccttaacaagaggaaaaaaaaaattagatgggctcattctctacagcaacacccaaagcccagaggcaacggcacacggcctgcagtgctgagggagagaaacaaaggagggcagccagcaaggccgggtctagtccaacacagacatttctctgagggaatgcagggcatgcgggccctgtgagcacttttatttttctggtggagcagtaggtagggggtcctacttcctgatgaaacgcagctaaattaagggactgattaaaataaagactccaggaatggaaaaactatggagaaacaacaggtggtaaaaactgaatctgtttaaaaatactaaacagtaagaattatgattcctgaacatgcttatgttatagacttggactatgtggtaataataacacaactaacaaaaagttggaagctggtgaagtggaggttaaggaaggggagagggctaatattctcatctttcataaccagagttggctgacactgttcacaatggaaacctagttaaaataaaacttattgactcaagcctcctaatgtttttcctgatctcttttattattattattttttttgagatggagtctcactgtcacctaggctggagtgcagtggcgcaatctcagctcactgcaacctctgcctcccaggttcaagtgattctcttgcctcagcctcccgagtaggtaggactacaggcgtgcgccaccacgccagactaatttttgtatttttagtagagacggggctcaccatgttggtcaggctgttcttgaactcctgacttcaggtgatccgccctccttggccttccaaagtgctgggcttacaggcgtgaacaggcatgagccactgtgcccggccctcttttattaattttagaaggctcttttggaaaataatctctcttttggtaaataaatatttaaag

SEQ ID NO: 2316 - DNA, 427 bp, Homo sapiens
cttttcagcaaggtgtttggatggtcctgtgcaatgtctttgagggcaagatggtgctatgtggactggacagtagcagcatgtggtgatttgcagctgacccttgaatgcctggacagtggatggcggacaggtgttcatccagagagaaagttccagagaagcagaggactgattaaaacagcagatacgcatcaaaacagggaggaatcagcttgggacagtcaccaggtgggaggaaaggagtccaaggggacagccgagccaagaatctgaaacccaagctgtagagactcaacttgcagataacctgtgagtggttatttttatagcacccattagctgacactcttgaaacactaaggagaacttatcctctcttctcctcttacacgctctaaagtatgtgatcacttttccatcttgc

SEQ ID NO: 2317 - DNA, 3729 bp, Homo sapiens
ccctggggatggctgctgtggacgccagcccagtgcggagaggccagtgtgatctcacccatcatgacctcaaggtccttctttgagggatcttgccaggaagttcagttggcaggatggcagcagcagacacacagggtggttaagaacaacaaacacaggtaacatctgctgaaggcttctacaagctgagcactaacaggcaaaccacttcaatagaacatggctggcggccatatggacatatttgaatccaacaattaattcagcaaagaaagctgcttgtggcaagttttgaatgtgccattccaggtagtgctttgatgataaatgaggagaagattgcaaagaaaatgacagcaacatttataaaaggattcctcttaggactctagatgcacggagagtggccagattaatacagactggcaaaagaagaacttggcaaagtgatttgatcacacacttctcaccctcacatctcctgacagttcccctaatccctgccccacttccccgccatgggcttccatcaggaaactccttgatatcatcttcgagaagaaaactgaggcatagaacatttgggaatgaatctaagactacacatctagaatagcagagttacaggaatgcagatgtgattcctatggatgagggtaacctagaggctagaagaacaataggacagaagaagcctgggtccctgaacaaccttgtggagcatagacacctacgtggcctggactgccagctcacaatgggcctctctgtgagagaaggaaacttccctcttgtttaagcaactgtgcttttgagaatctcttggtctataccctaatgaataaggccatcataaatggatatcaaagtaaggaaatttgtgtaaatgatttaataaaacattacctcaggtatgaaataattctaccttgtgccttgacaacatcaggtattattcatgcccttttctctccctgtaatgtctcttatccacgggtagaaattatattttccatctaaggtttgctcaaatattatctacttaagtagctcttaccaattttgcctctcctcctgagctgaccctatgccttctatgctgttccaggtaatattaatctcttcctttgtacttctttcacagaacatacttttttgtctaacataataactataggcataagtgtatagattccactaggggcttcagaacagaaactatcatcttattaatttttttctccctgatatctagggaaatatgttatatataataggcccttagtaatcccataaatgtttgtgagatattcactgactataagccatactctgtatttatttagctaaaacagacgtctttcatatttagttagcagaaaatgctcacatttactcctttcctgtttaccaaatgaaagggtaattgttttttcacagattgcactagaaaagtgtcttctctctctttttcaaatagattgtctttaaaacatatgacaggaaaagtgactattgttaggataagataattacgattgtaacagctagtttaaaagaagtgtcagttgctcctgttttatttttcacaggatagagctgcggcctgtctcagtatgatgttttcaggatctggtatatatttttattttcctacatgaatctttcatccttttactgacatttattcattttatctaattatcctaaaaggaaagctctggccaggcaaattggttgttgtctgcctctgaagagacattcatatcgcgtcgcttagctttcaagttttgtgatcaggaaccctcaggcccatttttaaggaggtttcaggctagctgagcttcactgtctcccaaaatgtacaaaatgagattacatgagggacaagatcaatttactggaaggtacttaagcagtaaatctggagctttttgtccagtcactattgctttcaagctttgtagcagaaaattaagccacaagagctttgacaaattagatattactacctctaattgtgtatgtttaagcttatcacactgaattgcagcattgtaactgactattatgccaacaaggccttcgtttaatcagcgcagtgccatttaatcgcaattaatcactcaactaaaatgtcatattaaggtcacagaaacttgaagggctaaaagaaaagagaacattaaagtcagctgatggaggaaaagagcatggtgtgccaagggaagttctgagcactctttttcattagaagctggtagaacatttaatgagaattcagtcttaactttcagctgagatcagaacaacgtgcctcacttggttaagcaggagactattctgcccattcttagcgggcttctgtctgtaaataggatactcctgcccacagaatacctgaaattttacagattcatgatttttatttctattattctttggctttctggcattttcccctttcctattacttttaagaaggaaagaaatcagatatgatatggtactgaagacaagatgaaataaatagcatcattttgcacagtcacttacaaggtatttataaaaaggaacaattggattcacttgtttgccaggaagattttatttcccagaaaacttgtcaaatcgaatgttatagtgcaaaaagaaaatgactgaagcttttgttttttaaattttaatactcaagaagtactatgccagtctgaaagatctctgttagcccctcacaggacaaaacttgtgagaagtaatttcacccggaggaccgggactctgccacccatggctcattccttatgctttaaccctgcctagccctaagaaatattgttccactaactgattgactctgaaaacagagccatggtaaagggtatatagacaaagggcacacttaaggtctctctttgttaaggagtagtaggtaattttattttattttgttttattttattttattttatttatttatttatttattatactttaagttctagggtacatgtgcataacgtgcagttctgttacatatgtatacatgtgccatgttggtgtgctgcatccattgactttttcagcaacgtggatggaactggaggccattatgttaagtgaaataagccaagcccagagggacaaatattgcatgttcccactcatatgtgggagcaaaaacagtggatcttagaagacaaaaactagaatggtagttaccagaggccaggaagtgtagggggaaagaagacgaaggagaaaaaagaatataaatgtatttattaccatgaactgtacacttaaaatggtaaagatggtaaattgtatacatgcatctcctcagtaataaatagttttttaaaaaactgactctaatgaccactcttcaaacttgcaataaatagcacagacactggaaacaatgaccacctccaacaggaaaaatgaatttcagttttcatacccactgagcctatgaagcttggtgagcaagatgtctgtgtttgagcaaggctcgctcaaaccgtctcctgcagacctgtgtggaacggtgcagtccactagccacacgaggctactgagcacttgaaatgtgactagtataaattgacatgcactgcaaagatgaaatacacactaaatttcaaagactgactttaaaaaaagaatgtaaactcattaataattttttgttgattacatggtgaaataccaattttggag

SEQ ID NO: 2318 - DNA, 1558 bp, Homo sapiens
atttcccaggcccagacctctgggaaatccctgctccagccctgcagagatttataggaaagtcccaggacgcccatctgcttgcttcctcacattaatttcagggctaggattttgttttctaaaggaattcaactatgatgccaacaaaaatctataggaattgaagagttccgtattttaagtcacatttttaaaatgtttgcttctttgtatattgagacccagtaagaccctagtaagcccagttactccatcacctccaacaatattaatcaagtagaagacacgcggattttaaaagctgtgtgatccttgaaaaatcttcagactgtcaggggtcctgggtgcctccaactgtgaaaggagggttggacaaggcgattccttagatctctctcgggtatctatttctctaattccaaattccaacaggcatccaatgattgctacccacgtccaagctttagactcatagcccgaaaagggcgaagcgcagcgtggtagagatcgcaaaggagacaggaagagaagcaagcatgcacttttagaactctggaatgctgacctacagtctgagttcctgtgcccttgcctggggctgactctctacttgacctgtaacccacaactgggcaagagaaaattctgcagccacagctctgaggacatgagcaaaatggtttccagacggaatgtcaaggattcccatgaagtgtcagggagtcttcaggccacacttcagccaagaggcatcacccggatccgaggctgcttctccttaggacatgcagacagaaggagaaggcggggctggcagcctccagtccacagcctccctttcttcttccggcgatgattaactaggcctagacaatggagatctacggcatacgcccagggcctcctcttctcaagcatggctgatcagtcactttcccgtctatccttcatttattgaagccaactatgaacgactaaaggaaggatgagaaaagtcacccaaagtcaaaggggacagcgtgggagactgttctagacagaaggaaacacctttgcaaagaccctgaggaaggcaggggactctccaggagcagaagggctgtgtggcttcagagtccacaaaagagagcagatacaggacactggctagagcaggccctggagcccgctgctgtcctggaggccttggggaggcccagtgttcccagggtggaagaagtaggggacagcttgacgtagtggctgttgatcagctgatatggaagtatgtcattttattaacaattgagaaaggagtgctgtgcaattccattcaatgccagtgatgcttatggccgtttttatgagttctgtcattttcaaatgagcaagaggaagcctctaagggggtttaagcagggactgacgtaatcagatctgtgtttttccaaagggagagggagaaaaagaacatttcttatttttcaaaaaaggtaatgcaaaagcatcattccacaattctcttgtaatgaaaaaaataaatgcaaacttaagcaaatccatcattctgaaagaa

SEQ ID NO: 2319 - DNA, 4969 bp, Homo sapiens
cactcttatcacccaggttggagtgcagcggcatgatctcagctcactgcaaccttggcctcccaggttcaagtgatcctcctatctcagctttctgagtagctgggactataggcatgcaccaccacgcctggctaatttttgtatttttttgtagaggtggggtttcaccatgttacctaggctggtttcaaactcttgagctcaagctttggcctcccaaagtgctgggattacacatgtgagccactgcacttagcctatattattaatactattattattgttgacttctttttacaaaacagaaagcttgagtcttaggctgattgcttccctaaggcttagatggcctatggatttgattccaggtagcctatctccacattttgtactcttgaacattttctaatttatttactaattcctcagtcacgtaaatgtcatccatgaaaaatattagagttttggtatctcagagatggttccttagagctctcagccctaaatggaaacacatctttttgatagtgtgttttattttccaaatcccaagaatctgtgaaattagtagtgttcttgaccaacagttagatagcctctgcttgaatgcttctaataactggagagctcaccacttcatggtgacaacatttttcattcttgcataaattcttcctaaatttgagctatcctgaaggtcagtttagctttcctatcgtctaaagtactgtatattgctgtctgaaaacacacagacaactaaatgctccagttgctttttttcccttttggtgacagctttattgagatagaattcatatagtatacagtttactcatttaaagtattttgcatatattcaaagagttgtataatgatcttattttagaacatttttattatacccgaaagaaaccttatacccattagcagttacctattttcgttaaacacctccagccctaagcatctactaattactatcttataaattcgcctattctggacatttcatttaataggtggccttttgtgtctgacttctttcacttagcaaaatattttcaaggttcatctatcttgttgtatcagtactttttttgttgtatttttagtagagactgggtttcaccatgttggtcaggctggtctcgaactcccggcctcaagtgatctgcctgccttggcttcccaaagtgctgggattacaggcgtgagccaccacgcccagccttgttgtatcaatacttcatttattttatggacaaataaaagtccactctatggatataccacattttgtttatactctcatttctttatgggtatttgggtagtttccacttttgactatcatgaatagtgctgatctaaacatttgtttcaaatgctttttttttgtatgaaacactgctctgtctgctcctgcactgtgatgattttttgattaatctcatgtagtattttacttggtaaaatctcatactgttggtattagtctggttccgccttgctggaagtttgaaattttgattctttgattgatcatatgatttgttcatttcaaccttgggtactatgccaattggttaaatctccattctctgtcctcatccatgtcagtgatcagtatactgattgctgagtggtgtggcctctctgccacatagcttattgctgtggaggaaagagagtcttctcttagccattgttctgtgtggagttggcggactaacacatttttatattcatatgcaatattttcaattctaaaaatccttatgtttgtaccagaactaagatgtcctggcattatggaattattcatgtcagttgcctatctctggtcaggtagttagttgtgacatccagcagctcagactacaatttgaattctggctcttgtcccacttattatcagaatgacctttggcaaatgacttgaaggttaacttgggtaattttctcatctggataatgcggatagtagaaggacttaacctcataaggtttttgagaggactgagtgaagcagtccccacaatacaccatcatgtgctgggcatgttggtaagggctggatttcaaggatgaaaacagaggccagagaactttctgtggctttctgaatgtcaaaactgagactgtgcagatcaagcagaacgctttctgttccttccaaggcttgttcccttcaggtttcagtttcagacggaagcgaagttgtttgtgatgccggagcacacacctgcgggaactgtagacttcttaggagtccaccggggttgcgtcgcattgcttccacgcctctgtcctcaccagtgttgccaactgtggatttgtgtgtgtgtgtttatcgttgttggccatgcaccagaaacagagatatcagtcacatttaaactctgctgcccaggaaactcctgcctacaaacccagcccagccctttgagaacctcaccgaccaagatgctgaggaccttggaaattgaggcactgaagctgaagtggcaagggcaagtgtgaattgcatcagatctttttctctcagggtaatttcttcatatcccaggtaaggtagcatttggatttctagtctttatatttattggtggtgagtaattctccccaaaaatggagggggagaaactagtatgcaaatgatgacaaaatagaagaaatctatctcattttgcagtgttcttatcccatcataaaaattagttgatcagataaattgaagttttaacctgattccatttatttcctactagacgcattttggaaatctcagtttgtgttctgaagattttctagctagaaagttttagtggggttagaaatagtgttcctctcaattgcttctgaatgaaagcatactccattggaaggaccatcagcaagggccatacattctaacaagtctcattgtttttcccatgctattcttcagcttcctttttctttggacactgtctcaaccatcccctgggtttggtgatgccagacttccttctggcattatccgcaaccgacaatggactttacttgttacgacaatatcaccagctttcattgcatgcggcagatggcctggaatgcagtttgtcactatcacttcttggaaatgcagaggcctcctggttcttcaaggccactaagcccaggaagggagcaagtgtgagatggcaaagaccccctaaggaacagcatcagatccctttctgggtgtttgttgcagggtggctcacttgctgcttttctccaggataaatggcaattgcttgatgcttgatagggacgtattaaatacaacggctgtctcaggaccctgtctgccttgtttttcatcacctggacgtctgatacatgcaaagtggaggaattactgcaaagagtggaagacaggttaaacaaacattcaccacaactaactgtttaagcttaagtcactaaaacactcattgtgtttttgctctgaaggtccatgaagggatagattcgtccatcctccttctccgtcatcacacatcaaggccaggattgtgccatttatggattccacatcctaagagaaaactgttcactcagatggtttctggtagtgactcctcttctctttgaaatgcccttcaaagtatttagccagaaacaaagctttttggtttttgggcttgtgtcaggcttttgctagagagtgatttttttttttcaaggaaattaatagatgatacagtcaatgctagacaattttagatctcagagctgtcttccttgaaaggtacattactgtttcttttacatctctgagatgagactgctcagagaatgattgattttggggtgaattgctatgtttttacatagacaaaataaaaccacagaatccttcaatagaggaaataaaatatggcacgccatcaatgtggaatattaggcaccctcaagtgtaagtctatgtatatatgacatggaaaaatgtttaagatgtggttgggtgactttaaaacaagttgcagtttgggcacagtgcctcatgcctttagtcccagcactttgagaggctgaagtgggaggattgcttgaacccaggagtttgagaccaccctgggcaacatagagagaccccatctctacaaaaataattagctgggtgtggtggcacatacctgtagtcccatctactctggaggctgatacaagaggatcgcttaagcccaggacataaaggctacagtgagttgtgatcacaccactgcactccagcctgggagacagagggagaccctgtctcaaacaaacaaaaaacaagttgcagaacaatgtgcaaaatggagtgtgatcctatttgtgcttcatatatatgaggatcaggaccatcctaaatatgtatgtatatctctgtgtgtgtctgtgtaattgcttagaaaaatgactaaaatggtatgaatcaaactgtgttccttcaggcaacactagggggaagtggacagagggtgaccattgcgttttgtgtacatctgtgtattgtcctgatctcatacaatgagaaatatttatacactatggataaacaaattttggaaaatatcccagcaacgttagtaatgcaacagtgctttccctggggccaccattttggttctcaccaagaacagatggtagcatcaagtatttcagtaaaattttaatatcataaaaagcatatggggctttcctaaggtctgagaggcacagtataatcatgttaaataaagaggacttacatttaaccttggattcattaacaatttattgctgggaggataaaaaggggatgtttacatcacacacgggtcgaagacaaatacattttcggttgcagagagtatataaggcaagtagaatgaagaatgagtatttcatgatacattttttacttttattaatttttgagtacattccagtgctaagcagtgaatagtat

SEQ ID NO: 2320 - DNA, 11796 bp, Homo sapiens
agcacacagatacaagtatgtgcttgatatgtaaccaaagtaagttaaactccttatttaatcttagcacctgtctaaaggctgggtgactgtatttatagatgaggaaaactgaaaattgggggccaaggggcagtgaagtgaagtgacttgttctatgatacacagctagtaggaatattagcactggaatttgaatttcatgccatcccattccaaccctgggtgtttactacttcccactatctcccaagcatgggtattttaggaaatatagaacattttctcagcaatacagacttatttctctattctcctttccacatactctcttttcccttaacaacaacagagatggagtcttgctatgttgcccaggctagactcaaatgatcttcctatctcagtctcctgagttgctgggactactaggcatgagctaccatgcctggcttcacatcatttattcttaggccactttgatgctttttcattgatgctctttatagacatagtgaagtaaaagtttatctaggatatatggtgggaggtgaggaagacttaggtagagaggttccaaaccagttgttactgcttagctcaatttcagacatacttcctccagccctctctaaactacccaccagtcttcgcccctcttttcttagttctgtggcacttgccctgggtgccctaactgtatggcatgctgttctcatcagtcgaggtgagactagcatcgaaaggcacatcaacaagaaggagagacgtcggctacaggccaagggcagagtatttaggaatccttacaactacggctgcttggacaactggaaggtattcctgggtgtggatacaggaaggcactggcttactcgggtgctcttaccttctagtcacttgccccatgggaatggaatgagctgggagccccctccctgggtgactgctcactcagcctctgtgatggcagtgtgagctggactgtgtcagccacgactcgagcactcattctgctccctatgttatttcaagggcctccaagggcagcttttctcagaatccttgatcaaaaagagccagtgggcctgccttagggtaccatgcaggacaattcaaggaccagcctttttaccactgcagaagaaagacacaatgtggagaaatcttaggactgacatccctttactcaggcaaacagaagttccaaccccagactaggggtcaggcagctagctacctaccttgcccagtgctgacccggacctcctccaggatacagcactggagttggccaccacctcttctacttgctgtctgaaaaaacacctgactagtacagctgagatcttggcttctcaacagggcaaagataccaggcctgctgctgaggtcactgccacttctcacatgctgcttaagggagcacaaataaaggtattcgatttttaaagatatgtagcttctcactctctgcctcacgatagggcagggaaggggaaagtcagggtcaagacctagtgagtaggtgttctggtcatgcttcctacattttttttttttttggagatggagtctcactctgtctctcaggctgtaatgcagtggcgcgatcttgactcactgcaacctccgcctcccagtttcaagtgatttttttttttttttttttttgagacggagtctcgctctatatcacccaggctggagtgcagtggtgtgatctcggctcactgcaagctccgcctcccgggttcacgccattctcctgcctcagcctcccgagtagctgggactacaggcgcccgccaccacacccggctaatttttgtatttttagtagagacggggtttcactgtgttagccaggaggtctcgatgtcatgaccttgtgatccatccgcctcggcctcccaaagtgctgggattacaagctttacaggcgtgagccaccgcgcccggctcaagtgattcttgtgtctcagcctcccaagtagctgtgattaaaggcgtatgccaccacacctggctaatttttgtatttttagtggagatggggtttcaccatgttggccagtctggtcttgaactcctgacctccactgatccatgcgcctcggcctcccaaaatgctgggattacaggcgtcagccaccatgcccagcttaatttttttttttttttaattatttgtagagatgggttcttgctatactgccagggctagtctcaaactcctagcctcaagtgatccgcctgcctcagcctcctgaagtgttggggttacaggcatgtgctactgtcctggttaccctgaaaaatttttggccaatccctgtcattgttattccagtgatgcctctggttatatgaggcatatgtggggtgggggaaatatctgacagccccattaccaaaagaaatctttattcttcagcaggtagacaacatctgccagccctggtcctcagggccacactcatatgcactcacccctcagcagcatatcgccccttttctgacatataaatgcaagagacccaggaccctagatctttcttcaaacgcaagtgtctcacacacacttattttacaaatccactagaaatatggactcttatgttctttgtacagccatgcaacagaggcctagcatttgtgctgtgtctgtgggaaaggcagtcagagaccagtggtttccctgctttggggaagatggctcaacagttagtaatcccaggttagattgtcagaacagtctaggccaggactgagggctcagctgccagggctccccaacagaaacctgtaggcaaaaagaaagttggcagcattagtgatgaggctcatcttggtcccatctctccccacgacctagaaactcaccactcccctctggctgacactgcttccttgcgcaccagtctcttcttgtcatccaggggtttggctaaggcccgaatcacctgtggtttgtacggcagcagctgtggagtcagaggatataatcaaccttgctcatccaaggcaactgaaagtaccgcttttttgattctgtacaactaatattctgaggaaagcaaaacatctttagtgattccaagggatgttaagtggcaggatggcctttctgttaccttctgggcccaaggaaaagaatccttgggcccagaattacaagatctgtaccttgtaattcagatctcaattacacaccagggtggccaagcccacctgactaaggcaaaaaggtacttatgtgtctcttgagatgttcccaggccagggaaggacacctgaggtacttaccacaggggtgggcaggcgagtgagagcatgcatgcactgcagtgcggcgatccggacagcctggaacacaaccacaaggaggtgagagcatgcccagggagagatgctggtgcctaagagttgctggggctcaacgcaccatggaagggctagagctgaggttcagaaacttggtgacgagggtgtccacgtgaagactcatgacttggggtgcttccagtagaagaggctgaaggcagctgagggtggagagctgcaccacacagtcagggcaggacagggcctccagcagcaaggaaagaagctaaggggcaatgggcaaggtaggggatggccacatcatgaagatcctggttcttgttccctcccctttctagccccatctggggaagaatagctttgtcctttgcttagaagctctgcctgtgggacttaccgtgggcagctctggcaagagtacaggcttgggcagcctgttaagtacatgagaaagacccttcaagtagtttggcttcacatctgtaaaaaatggaaaggcttaggggagaaattggacttagatatatagcttgagaaatcaattccaatctgtggtgaggctgagacatcagcctacaaacgggtgaaagagcccttcacgctcagaataagcaagatacgcccatgaaaggaagaagtgggacaagaatctagaagtttagtcttctaggcacagaccacaatatagctctaaagaagcaagcgggccctaaattatcttagggaatgtggccaagcaaaggagagatgtgtatatgtggggaccttctttcagactcctcaccttggggagcagcatggaagccctggaccaaagcaggcacattatctgtgaagaaccgctggcggaacatgatccgcacttcggcatggccagcacgagtcagcacatcagtgcagtcagacatgagcagagagaagccatcagctgctgctggacctaattctgggtcactcaggaggcccatgagctggagaaaaaagagcctttgaggtacatcagggaagaagaatcttaagtgccaaagataaggatggggccgggtgtggtggctcatgcctgtaatcctagcactttgggaggccaaggcaggtggactgcttgagtctaggagtctgggcaacatggccaaacccagttcttacaaaaaatacaaacattagttgggtgtggtggggtgcccctgtagtcccagctacttgcgaggctgaagtgggaggatcacttgagcctacggaggttgaggctggagtgagctgtgattgcactactgtactccagcctgggtgacagagtaagaccctgtctccaaaaagaaaaaagaaaagaaaacaaaaaacacacaggggaggatggaagtccttgggaggaataggagcaaccagaaagtttgtttaggtcctgggttcttctgtctccagaaaggacgtacccgggctgtaaggcaggagctgagaggatggtatctgagcactagggcctttgttacctgtaattggagacagagagagcaattggggaatgacactcaaacccgagaaccctgagacatagatgtttatggtttagggtcaaacagggacattttatttaaccagacataattgcctctctggctaaccagactccactccaactccttacccagagaagaagagtgaaggcctgactacgacagggcccagagcccaggccagcctccactttgtccacagctagctgtaggaattcatccagctgctgccctaaaaaggagagaggaaatgctgacataaaggctacacattttccctttagcaatgaaatgcaaatcactttaagtgcagagctccctgagaagctgttagaaagggaaaatatcatttttgcctgtggacaaaatgattggacacctgcataagagcctggtattctcataatacagaggtgctgccatttgaaaagagagggtcatctacttccaataaagaattatccacactagccccactgtagggagtaggacggcagaactagactctttgtgctcccttctcttcttaggtactataaagctctgcccaactgtggtcttgacgcttttcccacgggcagtcccaggacagtgcttgagcagttgaagccctgttaatgttattagcaagctccttttaaaaagagaatgagtactgagctataagatttcatgggtagttgattctgggaggctccttacatagtctgatctcagtacctgcagggtgcttgttgaggagtcctgcaaagcacttggcagcagcggtggaagaaaaggggcagctgtggcagcagctcagttccaaaagctcccgcatgagttggttcagctgagggatttccacctacagaaaacctggccatgtaatggacccagagaacacttgaactccaagagaaccagtacatagtggcagcagggaccgggacggatgagaactaacttctctggtgggggaagtaaaagatcagcttagcctgtggcaaatttcagcccggagtcaccttgtcaaggttaaataacagtacttcccaaatgtgctcacttacatttcgaggcagggagcagacaaaggccataagcagtgcaatcagccgcctctgccctgaggagccatcctataaaggaaggagagcccgatcaagcctgccagcaataagcttgtctgcccctctacccattccagattagccctaaaaaaaaaccagcttgaaggatgtaagttctaagactgttacctggaatggctggaatctgctcgggaagctgttttcaggcagaaaggacacgttgccatccaagaagaggggcacaatgtgtgtcacactctgggcagctaacctgggggcagagtactaggtatgaccaaggagctaggattctaaagcagccctctcctccacagacgtgcttttcaacctagggtttgaattaggatcaccacgtcaatgggacatgccctgatcattcatgcattgaacaaatattaatttggcacatatgtgccagtaatcatttccattcaggttcccatctgggaagtcaaggtatattttaaaatgctctacaggtaattcttaagcacatctgcggctaagaaccactggccctggcttcccaccctcatagtccatggtgctaagagccccttccttttgttttgtcaacaaaacttacaagacgattaactgcaccacatttacatataggtaaaaggacagctgacaaggcagctacctgttgcttcttcctaagaatgctatccttctccctgggttcaagccacatccatgattatacttactcagggctcaggtgggttgtagcagtgccaatgacagacaccatggcagccaacacctcatcctccaatagtacttttctcagaactgagggctccttctctgcaaaacacacacacatgcacacaatcacaagaccatgacgggttcaagaaatgaatgattgggttctgtcagcatcactgactctggggcttgactctagccacgacagcagttcttaatctggtctctggtagtgctatagtcctgagaatcagggcaccagaaacaggagtggtctgacctggggccacagagcgctcctgagaactctgcacagtctttagactaggccaacagtgggaaagagggatagctaagatgaacattcttaacataagaaatagaaatgttgtccctggtgtccctggagatgcaaggaaaaaaaaatagtaatgttggtctctgaaaaaattaaaaacatagatttatcttcatgggtccttattatttatagcaactatcatacactgagtacttcctatgtggcaggtactatacactaacttatttaatccttaccaactaccctgtgaaacagttttttttttttttttttttgagacaggaacaggatctcgctctgtcacccaggctcgagtgcagaggcacaatcatgcctcactgcagccttgaactcctgggctcaggtgatcctcccacctcagcctcttgagcagctgggactataggtgtgcaccactatgtctgactatttgtagaaacagggtcccctgtgttgcccaggctggtctcaaactcctggactcaagtgatcctcccatcttggcctcctgaagtgctgggattacaggtgtgaaccatggcgccagcctagacggtactctttatctccatcttacaagtgaggaaattgaagcgtggaaaggctgaatatcttcacctaagttagcaagtggtagagttgaggataaaacccaaccaggtgggcttgactccagagtccaattctaagtaaactaatcacatagcacttcatggggaaaaggtgtgcattcttttgaatgttgctaacactagtggattttggttcctgccactggtcagggtggcaccctttgctatgaagtgaaatctcactctgaggacaaaggattgaaaataaacctctgatggtacaaaatacagtaccaccaatacccagagggtggtgctgttcaacaccagcagagggcaaagttcccaaaggccaggaaggagaggtggaaagttacctggcatagaggcctgcacagccaaggcaagcaggcaaggtatagctgtctggtggaaataccagcaactctcagggtcctgctgacatttttctgccatctgtctgaggctctgacagacagcaataacgtcactggattgtgcaaccatattccctgttgatgagaaagtgttctctgtaaggtttgcttaaaagcactttcaggtgtttccaattacacagcagatgagaggaacaaagaagagtgactgaagggaccaagagtgccttattaaaaagctgagtcactttattctcctggctgttctttctgatctattcagacttcatagttgagacttgctctgtcccaggctctgcagcagaagcacttgtatatattctctccttatttttcataacaaccttagaagtatcatttccctcactctatagagaaggacatggaggcacaatgaaatacatgatcagtggcttttccagggtcacaggaagtgcaaagtcaggaatcaagcccaagttataatccaagtctagtattcattctactatgtaacagctgctggatcaaccacagtgggcctgaatctacccacagggcaggctgctgtcacttttgcattggagcagtgcttctcaaactcaacagtctacgagttaccagggtacactgtcaaaatgcagattctgatcagtgagggcctgagattctgcacttctaacaagctcccagatgtcacccatgctgctggttaacagaccatcttttgagcaccacggccttagggtgatgcctctcaattcagatcccacatgaaaattacctaggtaatttttttttttttttttggagacagggcttcactcctgttgcccaggtcaggctggagtgcaatggagcgatctcggcttgctccaacctctgcctcccgggctcaaagtgattctcctgccttagcctcccaagtagctgggactacaggtgcatgccactgctcctggctaatttttgtattttttgtagagatgcggtttcgccatgttgcatcggctggttaggtctcaaactcttgagctcaagtgatccatcagccttggcctcccaaagtgctgggattacaggcatgagccaccacacccagcccggcacttttttttttcttttttgagatggagtttcaccctgtttgcccaggtgtgagtgcaatggcatgatcttggctcactgcaacctccgcctcccaggttcaaacgattatcctgcctcagcctcctgagtagctgggattacaggcgcctgccaccatgaccagataatttttagtagagacgggattgcaccatgttggtcaggctggtctcaaactcctgaccttgtgatccacccgcctcagcctcccaaagtgctgggattataggcatgtgccactgcgcccaaccctttttttcttttgagatagagtttcactctattgcccaggctggccaggctggagtacagtggcgcaatctcagctcgctgcaacctccgccttgtgggttcaagagattctcctgcctcagcctccccagtagctgggattacaggcgcatgccaccatgcccagctaattttttgtatttttagtagagactgggtttctccatgttggctaagttggtctcaaattcctgacctcaagtgatctgctggcctcggcctcccaaagtgctgagattacaggcaagagcagcggccctggccgggtactcttaatagtactgttgcctaagtcccatccctcctcagagactgattcagttggacgcaggcatcagtattttttttttcttttaaaagagttgattctgttactcttatgtatagctacagctagaaccactgccttagagactacagctccctattcagcccagtccgttggtggttattcctagtagttacctctgttcacttgccagagatgctgcagcagcagaggcagtgtctccttgacgatgctgggatgtgttgatacagctgacaaggcttgcagacagcacagatgccgggagcattgggtgggctcatctccgttagtcaaatttgactcccctgaaagcaacccatgagacaaaggtttactgtgtgataggaagcacgaaggccccaaagccttgctggaaagggatgggccacagaggattagagacacatacctacacgcagctcctcagcgagcttgggtacgaggtggctgctgaaggccacagggtagagagcagccagggttcctgatgcttccagtgctgccaccctgctggaggcgcagagcagataagcattggctgagcctgggctcacagctctcttgcctacgtctgatattaggcagattcaggagtgtgagctcccaacgcctccttgctaaagagcagaactcaagtacctacaccactgagttggacagggcttcttaaagcctaagaagagagcagtcctacatctctccaactggttagcagccagagtctaacacagagctcacctcccctaaggagagccaagggtcagaagcacagagccctggtcctagcttgatcttttgctgccaatacagaggcagggaacagcttgctctatctcattgctttaaattctcaccaactctgggaatcctccttcaggaagctcagtctgtacaggtgacccactgccagctccaagtcctcataagataggagatctgtagttagaagggaacatgaatctcatctttcttcccctgcagccatcacaacccttctaagctcttattagaaatcccaaatcatccagagttgcagtaagaagaggatagtaaggctgcttttcaccaaggcagtcttacaagaaaaggaccaatattttcctcttctctttcccttaagatgtacctggctgggcacccaagactgtcagtgtacggatgccaacaagctgaagctgggtgctggggtctgttagagccatgaataccagtgagcacagctggtccttgaagccattcagaggcctttgatctagggaagagacagaggccaggttagaaggaagccactgcattccatatccctgactaagctgtgatacacagccaacctggggtagattttttttttgagacaaggcctctgttgcccaggctggagtgcagtggcgtaatctcggatcactgcagcctctgcctcccaggttcaagccattctcctgcctcagcctcccgagtagctggaattacaggcatgtgccaacaggcctggctaatttttgtatttttagtagagacagggtttcaccatattggccaggctggtctcgaactcctaacctcaagttttccgcctgccttagcctaccaaagtgctgggattataggtgtgagccaccatgccccgcctcctggggcagatttaaagagcttaatccattgggtatccagaaagcacactgagaaaaataaacagatctcatccatctcatctgttaagtgttctcttgtgctacaacctcagaataggaccactgttctagactacttttccacagcactctttgccctgctatcctttataggctgaagtgttcaacagtccccagagcactgcaatggaaggcaacctcacctttgtcttcatagctccatttctgctgcagcttcaagaaacccaggagcatttcaaggattgtccgccgctggctgctctgtaacgtttcaaggggtactagagtcaaagaatattttaaaggatttcaatcctgctactctggatatagggaaaattctttctttcttccaagagatgggggttttgctatgccacagccagg

SEQ ID NO: 2321 - DNA, 4598 bp, Homo sapiens
cagcacatttggttgtgtgtgtggcagggtggagatcaggatttctggagctgcttagctgagaggttttggttaagggtctcccaggaggttgccatgaaggtgcaggctggggtcacaggcactggaaggcatggctggagcaagcagaccatttccaagtggctcactctcatagctgccaagttggtgattgctgtttgtagatacatccagttccttccacatcaaccctgccataggctgcttgagtagtctcatgacatggcagctggctcaccccagaataaggaaatgacttactgcaaagaaccactcttccccacgagacttcgagaagacccgctgtcacggactgagttgtgtcctcttaaaattcagatgttggagtccaaacccccagtaactcagagtgtgaacgtatttgaagaggtctttaaagaggtgatgaaggtctttgtctctgacaatttgcctctgtgacgtggatgggactggaagtccatttggagccctgtcttctccacctagggagagagaccccatgagctcgtcaagctccttctgtgactgatcagagatcccaccgtgagtccagctcctggtcccatgctctggatatatcggtccctggcagcgtggtcttatttctacagcctcctttaattgctttatgttcacgggacactgtcttcaggataagattcaactccttagccaaagacgtggcaactgcgggtgaagtatctctgggcaggaaatcaatgcagaaatgcaactggggagagggggcttgggggccagttccagggagattggaactgctgtgttctcatcagcagaagtggcccctgcccacccccatcctaatcccttctcatgtgggagaaggtctgtgagccctctccctaccaggcaggttctatggcaatgtgggcacataccctggggcaggggccgagggacttaactcacttcatgagcgccaatggaggagcgaagggaatgcctgatgaaaacaacattctaccagtatgcactgttttctaacctacagagtgcctctgtgttcactgtcccatttgagaattctaagtagaattctgaacaggctggagcagattgcccaccccaagggacagatgttggctggtactgttggtattcatggaagattccttctgacactccctccttctttgtaattgccatgaactggagcactgggccaatataaatcatccaagggtgaacacgctgcacatggacggctcctctttgtttttgaagggattccatctctattttgccatgtgctccttcaccccactccccacccccgtctttcatttctttctctggaaaagatacttcaactcacaggactgcgatgttgaaacggacacccaagagcatcacagatgggccaggcctggacctctcgggacaacattcctcacgacttttagatagaagagattagagatttgggactggtggcaactggtaacgttttcagtgtttggtaaacagccagggtccggagctctgggaacagcctgatttagctctttgtttaagttttgtgttagaggctcccaagaagctgatgcaggggaaagaaattaacaaccatggctcattcacagccaggcagccaaatggacagctctataagactcaagccgacagcggagagagtgcaaccaaacagccttggcccagctttcagaggagaacgttattcaccccaactgctctgcatctgcctggatgtctgccaagatctgtgagcattacagcgttggtatgctttgggtgaggcctgtggctatggcaacaagttgggagcaacccggtccctgggaatgagaacagtgtctaaaatcaggcaggcgaggggcagggaggagaggtaaaggttggacttgcctgaagatggagccgttttattgttgtgggtaaagctgctaccattaggggctgtttacagagtgggtgcagctcaagctgggagcatgttagactcagcgactacgatcaacctattgacttgttcccatgagacagagtaaattaactgttgcagtactggtcatgtaccaccaacctcctgtgaaccagccctcagtgaaacatttatgtgaaaggccatggtgttcccataagagggtgcatgttctctcccttgactaactcttcagtatgcctcattctcacgcgctggtgtgcaggaaggagtccaacatgccccattgacagtcatgccctgtatgtggaaagtcttcaggtagagcactgggctcaggtttgaagatgtgagttctaatcctagcaaggccattacctcccagtgacctcatgtctcgatttcctcaaccacaaaacaaaggcattggtgagctgacctctaaggcctctccagttctcaccttctgtgtctctacagactggagactagaagattatgggcacttttattgagtcttcattttgtttccatttctttgtagtcatcagctggagttgaggacaagttttaacaatagataggtttctttttgtctctttttaaaaaattttatttaaaataaatgccaagtgtagtggctcatacctgtaatcccagcactttggggaggccaaggtgggaggattgcttttgagtttgagaccagcctgggcaacgtggtgagaccctgtttgtacaaaaaattttaaattagccaggcatggtggcgtgtgcctatagtcctagctactctggaggtagaggcaggaggatcccttgaacctgggaggttgaggccacagtgagctgtgattgtgctattgaactctagcctgggcaacagagcaagaccctgtctcttaaaaaagactattttttaagaacacttttaggttcacagcgaaatttggaggaaacttggcatatgtcatatgccccctgctcccatgcatgcacagcctctaccattagcaatgtccccactcaaatggtacctttgttgtaatcaacaaccctgtactgacacatcatcatcacccaaactccatagttcacattaggtttcactcttggtgtggtgtacattccatgggcttgaacaactgtataatgacattatccaccactgcaggatcatacagagtagtctcactgccctaaaactactctgtgctccacctgtttgtcccttctttcactctaaactcctggcaacaactgacctttttactgcctcgatagctttgccttcttcggaatgtcatgtagttgaaatcatacatcatgaagccttttcagattggcttcatataggtttccttccttccttcctcccaccaccttcctttctttctgtattcctaactcttggatgtattttccccagcatcatgacttgatgggacttttgctaagataggcaatcatagaaagtcataaatctcttgtcagccttattggctcacctccgagatggttccaacactctttaaggcccacttttccaatccacagattccccagcagaagtccaagctgctgagcctcacatcatcttttgcactagtaatctttaccactacttcactgtagcatttgaaaattttcatatgaagccatagttctgtgtctttttttttttttttttttttttggagacggagtcttaacctgttgcccaggctggagtgcagtggcacagtcttagctcactgcaagctccgcctcacgggttcaagtgattcttgcctcagcctcccaagtagctgggattacaggcgcgccaccatgcccagctaaatttgttggcatttttagtagagatggggtttcaccatgttggccaggctggtctcaaactccttacctcaggtgatctgcctgcctcagcctcccaaagtgctgggattaaaggtgtgagccaccgcacctggcctgaagccatagttcttaacctcagttgtgcaatagaattatctggggaatttaaaaattagaaaaaacccatgccctgaagattgtgatctaactggtcttgcgtagcgcctgggcattggtattttttaaatgtttcccaactgatactaatgtggccattctgcaagccacagttgaaaggcttattcaagcatcctgttgctgaatgcatgtcgtccttaccacatgactctggaggttttcttgtattctgatgtggctgccctgttgaggcctgccccttagagtggagattatcccctgcagtaggctgcctggaatatgatccccagtgatccctgcttcctggtattcaggccctggtgtgatccctttcccttgaagcctgggctggattagtgacttgcttctaaccaacagcatatggcaaaaataaatgtttattgttttaaacctctgttttagggtcatttattacacagcaaagataacgaatatactttctgaaagaaggggaggctctttagacaggaacatgttcctgtgggagccacaccttatgttgattttgaagaatggagggtctaataatgtgtccccaggggaagtgataggggggcccagactgcttggggctggaaaggcaggt

SEQ ID NO: 2322 - DNA, 1056 bp, Homo sapiens
agcaagaggacaaacctgggtagggatctctatgatgttttctgcgttgcccgtggacgttcatctttctgatttgttagctgaagatgaggatctggagcaggagctcggagtgccattgttccatgggcagatgtgcagcagagattagcattaggaagacaagcagggccttcagtaggcataaggtgatgaggttcatgccgttggatcccacgggtgccctggggaagagatggttgggaagtctgagaggaagcaggagagctttcggagcacatggatgccgtccagaatggagatggttgtggctcggaagaaaaagaaatcacccagctcggagtcaggatacatttggaggtccaggccgccgagtttgctggtggggaagataggcaccagaaaggaaagaggacatccagggcaatttcttctgccccccagccaatccgtacattgtccagagggtcttgctctgtcatccaggctggcgcgatctcggctcactttgacctctgcctcctgggttcaagcgattctcctgtcacagcctcctgagcagctgggattacaggcaggcaccaccatgctgagctaatttttgtatttttagtagagaccaggtttcgccatgttgcccaggctactctcgaactcctggcctcatgtgatccgcccacctcagcctcccaaagtgctgggattacaggcgtgagccactgcaaccagctggaacaatcttgatattagggtgaacaagtgatttcatagctttctctgaaggaggaaacactgggagcatccacccgagaatcaacactgtggatcattctggggagttaatagttttgagatgtgtcccaagataattgttagcttgaattaccacgtggatggaaccatgctgatcctaagagccaggccaagcctactgctgttagaaaacatatttagaaatcacttggttcttccttgcctgaacatcatctatttagttagcttgtgttgtttagatgtgcttcagatctcaaaaaaataaattatgttatttgaaag

SEQ ID NO: 2323 - DNA, 2382 bp, Homo sapiens
gtgatagccatgaggacactgggattctggacttcagctcactgctgaaaaagagagacagtttccggaccccgagggactcgaagctggaggcaccagcagaggaggacgtgtgggagatcctacggcaggcacccccatctgagtacgagcgcatcgccttccagtacggcgtcactgacctgcgcggcatgctaaagaggctcaagggcatgaggcgcgatgagaagaagagcacaggttagcccttcctcagaggggagaggagagggcacaggctagcccttccctacacaggagaggagagggcataggttagcccttccccacaggggagaggagagggcacaggttagccccccacctcgtccacatacatggaaagagcggagtccggcttagcacagagactcacaggaaagaagagcccaggttaacccctccttgtgtagaaaaagccaagaatgcccaggttagccccttaccacagagatagaagagaagagcaaaagttaggccaggacagccacaaggaaaaggacagagctcaggttaaccctcctcaccaaggaaaaatcaggctacactttctttctctaccctcttctgaaaagaaatgaagcccggttaaccctctccacacccaaaagaaaagggaagaggcccgctaagcctggagagccacacacaggcaaagaaaagagcctggctaatctttctctcaggcaaacaaagcaggagggcttgggttaactaccctcacccccaggcagatggaaagaggagagcccaggaatagcccttctccactgaggggttgacaagggcgggtgtgagccgggaaagcaggggtctcacatgccttctccccaccatgtctgggtctagcacagggcctggcacacacctcgagcgctctataaacaccgactgaatggaggggtcagcttccatgcaggatatgggagacaagcccctcccaaagcacacacacaaaacacacacgatcatggggacggggagaggagctggttagtccctccctgctgacctcccccaggccccttatccctctgccctgcctccctgttgtctcagcctcactgggtttcccatcaccccatcgctaggtggcctggcccttaccggcaccgtggccccatttaagccagggatcccctgaatgccaccaatgttcctctgggttaactcctgaactgctgagcccagagggcaccaagcaaaggactgtaggtgcccaaggaggaaaagatggaggctggcaaggcagatggggacctccgagggtaggggtgtcttccaggaatagcaacaacagtaaaaagagcaaattgctggccaggtgcagtggctcacgcctgtaatcccagcactttgggaggccgaggcaggtggatcacctgaggttaggcgttcaagaccagcctgaccaacatggtgaaaccccgtctctactaaaaatacaaaattacctgggcatggtggcaggcgcctgtaatcccagctactccggaggctgaggcaggagaatcacttgaacccgggaggcagaggttgcagtgagtcaggattgtgccattgcactccaacctgggtgacagaatgagactccatctcaaaaaaagtgagtgagttccttcctaagccagccactaggtgctttatgtaattatctcatttaattctcgaaacaacactatgatggaaggactattaccatttccatgttactgaggaaaccgaggcacagagggtttaaggaactagcgcaaggtcacagagcacccagcagtagatctctgcccctccgcagctgactccaggcccagccagagtatttgaggactcaggggtccttctctgctcggtggatggagcccccacttcctccctgggctcagcagcagcaacatgggcttttacaaacacggccgcaagaggaggcattgttgtggagcagggctgggctcaagacccagctctgccacacacctgctgggctggtggcattgggccagtcgcctctctgagccctatttcccccactgcagcagcatggggaccaccgcactggccctgggggctgagatgggagtgagagtgctgggcacagagggctgctaggtgggagcgcctgggaagagtacacaactcaggggttgctgagagaagagaaggcacagctgtcccagccccagttctcctgacaagcttctgtctttctggaagcccctaacccaatccctgagctgagcaggtggagaggaccccaaggaagacagaaggacaaggtcagacagacagagacaaggaggtgggttgacacatagacacagataaagaaatgaagacaccatgcct

SEQ ID NO: 2324 - DNA, 7227 bp, Homo sapiens
tgctattttaagtctactgtcttttcagatgaagcacagctttactattcttggtattagggtagtgtagtgtgtcaagtagatttgtccatatccgacattcaaaagatatgtccacagcctaatccgcagaacctgtaagtgtgaccttatttggaagaaagatctttgcagaagtaattaaattaagaatatcaagatgagattgtcctggattatctagatggaccttaaatccagtgataagtgtccttataagaggcacacagaagacagaactacagacagaagaggagaagtgaagacagaggcagagattagagttatgtggctgcaagtcaagggtcatctggatccacaagaaggtggaagaagaaagaaagtattctccttgaaatctttggagggagggtgctctttgatgtaacgccaaatggatctacaaaggatgtggagcagtatgtgtgatccttttattcattgaaaaggaaagggcagcacgaggtaaatgttggttgccattagcttgtaagctttatcccaggaaaagtttagggcagcatgaattatcataggatgtgcccttttttggattatctattgctaccatttacctaaaacactctccaaccagcatggttacctttttctttgtaatattttaaaattcaattgcatttaggacattttctcatcttttctaccatatctctttttctgtatgccttcctaaagtttataaagttagaggacaaaaataaaaagttgtcataaggggccatttttcaatatttgctgtgagtggaattatttaatatacgatggtgagaaaccatcgtatattaaaataaacatttagggcatgtatcttggctagaatatttgaataatgttctgtactgacaatgttcaataaatattatcactcagaaaataaaagcagcaaaaatttggtggtacagttttaatgtttaaatttagaagaaaatatcgaaggccagaaatcatctaatatctgcttccctatcaataagaaccaatgtaaactaaatattgcaatcttgttataaaaatgtggtttcctttactgactattgagggaacacattatggcaagcaatcttaatttaaaaagtcaaaatttgaaaacagcagtaatgccaatttcacattgcatttgaaggataaatatcaaaccctgtcgataaatttgtgcttagaaaaactgtttttgcaggttttctcttctaaaagatctacccttatcatttaaaaataggagcgcagtcttatctttcagtcctgcctttccagtgccctctactgggcactatagttgataaatatgtgtatctactcctccaggttcgcctctgattttatttctaaatcatagaataaaggggagggctgaaagaaatttgagaattccatccctgctttctactagggtcataaccaagccacctgagagatatgaaatctcttctgtttttcaagattgttaaaaaagaaaagtgactcaaacctattttgcttggtattttcacccaactggcctataccttagctgccttagtgagtgtttaggatgacttaaattactgcacctgccacaggtgccttctgggtgctgtaatatataacactgccttttattctttaaacacaaaagatgtggctttcattcttggctgatggaagtgatcagtacaacataaaaattgcaagtgagtttatctctgtttctttgctagctgtagtaatgggtgcatatgcactatagagatgacattatttctatctgttttaaatattttttcttagtaaatgtctataaaagaatacattcacaagcaagtaaccatggaggccttctaatgaaatttattttgctgcattttagtgaaaaggacaaaatatcctgtattattagactggaattcagtataaaatatccattaataattagcatttgtgcataatacaggctttgttagttttggtgtgtgcaattaatctgtaaaatatttttagcaagatttaaaacaaaataatgcaaaagccctggataaagagactctactagcttttcctcttattttttccctcctttggttatcaattttctaattgaaaaattatagaggatgacatttagtacatttaagagctattttgactgagtttttactccctgaatgttaaacacatatgaatatttacaacatatcagagcatggcacacctattctttcctttctgttttggaaatttgcttaggctgctcagctgtcccttctctatggccacataatagaaacatcattacctccagcaaccttccagtgggttagtagcataacattcctgatggatagaacatgtttctggtttttgaagttactcgaatgtttctaacagttgcagctaatcaactgctgcactgattaattaaaaagtgccccagcagtcattataaaatatcaatatacagtagctaaaatagtcttaaagaggccaataaggattattccatatttctgtagtcatattttgattgaaagtgtatagaatgtttgtatatattataaatactattgttctgtgtagctatttttgacaaataaatattctattgcaaaatgaaaataacccagaggaaaagtacaaggactttaattttaacttaaaaaaaaatcaaaccttcttcaaagctaacagaagaccgacatgctgatcatatctttcagaatctcttgaagtgtaaatttagtcagagtgccaaacatagaaagttgatctcaaccaaatcttcaaatggacaaaacattctcttggactcagcaaggactgagccagctgccagttgatatgtgggcagagagaagttaagtgcctgattctgggggcattcagcctctatgcttcaaggtagcatagtctcaacatcagattctgcattagagctttgaatatatgttaggagaaaaaaaaacctgttcaatttcggaaattactctagcttgcaatatttttgaccatctagttatgttcatacattttgtgataatatatgggaatatgtattaagctggaacctttgtcacccaactactgggtccagaattgtaatttttaacaattttgttgcattaggctaccaaccactgtttactaactgcatgtggaactaaaaattgctgatgaaagctttgtaatataatggaaaaggtgttggattggaaatcaagagagctatttttttttctattgctttcactacatgttacagtggccttggagcaaggtgtcttgttttactttttaaataacactttttacaaatactgacttctgcagggtggagtggctcatgcctgtaatcctagcactttgggaggctgaggcgggcagatcacttgaagcccggagtttgagaccagcctggccaacatggtgaaacgctgtctctactaaagatacaaaaattagctgggtgtggtgggggggcacctgtaatcccagctacttgggaggctgtggcagaagaattgcttgaatctgggaggtgaaggttgcagtgagcccagatcgcaccattgcactccagcctaagcaaaaaaacccaaatcaaaccaaaccaaaccaaacaaaaaaacctgactttttttttttttatctatcataagtattggttgaactaaggagattaggtcttctgcagctataaattttcataagccagacttgtgtaccaaaacactttatcaacatctctgcctagaaatcctaacagatttcaaggataacatgctaacatgttcaaaaacaaagttctgactttcctctacactcttctcagtcttcttaatttcagaaaatagtaattatttagattccaaatcctgaagtctttttaagtttcctttattctttataccccacatccaatttatcagcaaaatctgttggctctaccttcaaaatgatgccaatagtggccacttctctttgtctccagtatttatgctctggtccatccattatctttagactttactatttccatagtatactggtatggttgaattgcattcttccaaaaagatatatggaagccccaatccctagtgtctcagaatgtgaccttatttagaaattttgcctttgcagtcaaattaggatgaggtcctttgggtaggctctaatccagtatgactggtgtccttataaaaagggaaactttggatgcagagacagaagagcacacagagagaatgccatgagaagatgaaaatagaaatcagagtgatgcatctatgcctaagattgtctgcaaaccaccagaaagctaggcgagaggcatagaagagagtctccctcagagctgtcagaaggatccgactctgccaacaccttggtctcagacatctagcctccaggagtttgcaacaacaaatttctcttgtttaagccactcagactgtggtacgttgaagaaaactagtgcatatgttaagtggtctttctgctttccactcctccactatggcctattccccacacagcagttggaaacatatatatacacacatatacatatatatgtgtgtatatatataaaataaaggactgcattctctcctttttattctcccagtgggaaagaagaactgtcattaatggcaagtggcagttgaagcaacaccaagagctggcttcacatttaggaaagaatgctgtgccttctcgtcctcgtcgtggtttctggtgctctacacattcagagaaacttctcttgtaacaaactatagaaatgattcctgaaagtatagcctttagaaacaagtattttttaaagtaccagtaaaattgtattgcctctttattaaaaatcctcccatagttccccatgtgcacctgatctacaattctattctttctaccatttcttctatgacctgtcccctaaaatcagtctgctccaaccagagttcctggcatataataagtgcctaattagtatttgtgaactgatagaataattaaattttaaatcagcaaaactatttttgaagtttttttaaaagattaataatggagagaataagaccaagtgcataagtgttgattaaaccgaaatgaccttgcaaaatttcattcattcattcaacacacctcgttaatacatgctgttagccaagtgctgttctaggcacttgactttcaaatgtggagaggctgtagctcctatacatctggcataggtgaaggagcaactacaatacatgaaggtaaatcttaccatagaggtgagaacaaagttctatggtaccacaaatgagggagcaattacttctgtccaaagcagttatggggggtttcctaaaaaaggagacagttaagccaggcaatcaggcaatcttagaagtttggtggtggtggtaggagtgttaatggataggtgacacataggaaggtgaacatttcaaggtgctgacatagcatgtgcaaacacatggcagaatcatgcatctagaaaaggtgccatttgttaggcaaagctgtgtgtccctggctcactatttcactgctcagcagccaaccagctgcagaatcctataggaacactggaatctccgatcttagaaataggaaatcataggcgccttctgcatttaagaaaatccctgactctctttatttaaatgttccacaagccaataaaacaaaaagccaacaaagtgggagtggactctaactctgtcttcactttagcagcagagcggtatatccagctggatcctgctgctagatgattctatgtgactgaatcctagccccctctcccagcaggagacaaccaggaatggagtctggcctcatcatgagagatctgatatattttcatatttcagtgttttttcttctatttgtgtaaccctaaatgttttacaacattaatattttgttgccccatttcttatgctgcaagcacatgaggcagacatgcaaagagaacccacgtcttttgatggtctgtttactaccccttgtgaggtttggggttttaaaatatcaatttcttgccgatatttcatgtaatgctaactgtcacaactgctctgtctagcccagcaaaattggctttaatatgctaaagaaattagagaattgtattgcttctgggttctaatcctagctctataattaatcattgtatgtcataaaccaaggcatttaacctttctattagtacccacatctatctgacaaccagcttggactgtaacagttgctaagatttattattccctgatcctaggaagaaaaaaaaagtgaattggaaacagcttacaatcaccatcagtagttacttgaaagacattgagatttcttttttgtttgttttgttagtttgttttcaatattgacttttcagatgtgtgaatcctcatgcttccttgatccatgtgtctataacttagcaaccaagcagttatggtttgaatgctgaatttaaagaatttattatttttcatatagagttaatggtgtgtgtgtgtgtgtgtgtgtgtgtgtgtgtgtgtgtgtgtgtgttgtatttatccacctaatcttctcaggcaggggttatttaaattcctagaggctgctttacaaaaactcagagtaggtttgctctttcatcgtaactactacgagctatgtggtgtgagcatgacttaaatgggtagttggttttcatttcacatcattgctacatttatttgcttttatagatcttagaaagtattaataaaaaatccgttgtgcatgaaacaccattttttttctgtgcctgaaatgatacgtaatattgactaaacaacccacttttatttccttgacggaatcttgtgcctgtggatcccattttgatcccaaaaagtcttacatcacaaatgctggagcaaatgttagttccctcgtaatatactactgcttcacttccctgtggtacatatagctacattcaaggtttagcataacttaggaaatatttctatgggaagtatgcacaacagatcttcctagcaaaatagaagctattttaagagagagatattaaatagatcaggaaaaagtagggtaaaagaatatgtgtagaaagtcaatttttttaaaaaaagacattcttattaatttttttggtgttaccatctgtcataatgtatatagtag

SEQ ID NO: 2325 - DNA, 4377 bp, Homo sapiens
catgcacactgtgtccttgaccaccagcctcagaagcaggccatgcccagccagcagccagcctgcctgtcctcttcagccatgcatcaaatatttagtgggtgcctgctgtgtgtcaggcactgttccaggccctggctgtgggagccaggcagcagacccctcccctggaggatctgcaactctggcggagatgacacgtgtcacagcacgatggtcatatcagtgctggggagggacggaattcctaggatgcttgctagagggtcacagggttggggcactcctcaaccacggggctgaggcactccaagtgcagaggcttggaagagccacagtggatccaggccctgatgcctgagaaggagccagctaggcagagccggggaggagcactccagacagacagcaatgaaccatccaaaaatgaagtgaagaagacaatctcatttataatattggcaaaaagaacatacctagaaataaatgcaacaaaagatgcataaaacttgtgtactgaaaaatacaaaatatttttgaaaggaatcaaagagtatcgaattaaatggaaagatatcctgcagtcatggatcaggagacataatgttaagatggccaaactcccgaattcatctatagcttcacaatctctatcaaaatcccatctgtctttttacaagctgatcctcaaattcataaggaaatacaagggtttcagaatagccaaaacaatctagaaagagaagagcaaaaccggagggctcacatttcctgattcaaacttactgcaaagctacagtaatcaagacaatgtggtactggcataaggatagacctacagatcaatgcagtaaagttgagactccaagaacaaatccttgcatttatggtcaattgatttttttaaagactgttcaagtgcagcagtgagaaggcgggaaagagtagaacgaggtgttccatctgtaactgactgtgaacaatcaattgagataactcactaccttcagaccggccatcagttgatttttgacaagggtaccaagacaattcaatgggggaaggaatagtcttttcagaaaatggtgctgggacaactagatatccatgtgcaaaagaatgaagttggacccctacctcatgctgtgcacaaaaattaactcaaaatggatcgtagacctaaatgtaagcactaaaattatgatatccttaggaaggccaggcgcagtggctcacacctgtaatcccagcagtttgggaggccgaggcgagtggatcacctgagatcaggagtttgagtccagcctggccaacatggtgaaaccatgtctctgctaaaaacacaaaaattagctgggcatggtggtgggcgcctgtaatcccagctactcgggaggctgaggcagaagaatcgcttgaacccaggaggcaggggttgcagtgagctgagattgtgccgttgcactccagctttggcgacagagagagactttgtctcaaaaaaaagaaaaaaaaagaaaagaaaaaataaaatccttaggaaagaacataggaataaatcttggtgaccttgtgttaaacaatggtttttaatatacactaccaaaagcacaggcaacaaaagaaaaaatagataaattggacttggccaaagctaaaaacatttgtgcgtgaaaagacaccatcaaggaagtggaaagacaacccaagaaatgacagcaaacatttgtgaatcatctatttgataagggactagtatctaaacatgtaaagaactctaacttatcaacaagaagacaaaccacctacctttaatgatgggcaaaggattagaatagagcttgctccaaagaagatgtacatatgaccgataagctcatgaaaagatgtccccatcattagtcatcagggaaatgcaaatcaaaacacagcgagataccacgatgcacccatcaagatggctataaataaaagagacagacaataacaagtgttggcagaggtatggagaaattggaaccctccttcattgctggtgggaatgcaaaatagtgcagccacttcggaaaacagactggccgtttctcaaaatgctaaatatagagtttccataaaaatcagcaattccagtcctagatatacgtgtgtgtgtgtgtgtgtgtgtgtgtgtgtgtgtgtgtgtgtgtgtatccaagagaaatgaaagcatatgtctgtataacaatatgcacatgcatgttcatagcagtactggtttgttttgttttgttttgttttgttttttgagacagagtcttggtctgttgcccaggctggagtgcagtggcgcgatcttggctcactgcaacctctgccccccggattcaagagattcccctgcctcagcctcctgagtagctgagattacaggcacgcatgaccgtgtctggctaattgttgtatttttattagagatgggggtttcaccatgttggccaggctggtctcaaactcttggcctcaagtgatccgcctgcctcatcctcccaaagtgctaggattacaggcatgagcaactgcacgcagccagcactagttttaatagctaaaaagtgggaacaattcaaatgttcatcaatgaataaataaataaacaaaatatcggtctatccatacagtggaatattattcagccataaaaatgaatgaagtaccgatacgagctacaacatggatgaactttgagggtatgatgctgagggaaagaagccaaacccaaaagaccattgtgataccatttttttcaagtgtttagaatgggcaaattaatggaaagtagattggtgagtggctgcctggggcttcgtggactgggtggggagtggctgctaacaggtgcctacggggttctgtctttgggatgttgaaaatgttctaaaagtaggcagtggtgatggttgcacaattctgagactactctaaagtcacaccaactaagtctacagtttatgctaagttttatgtcataagaattttatctcaataaaggtataaaagaccttccaaaggccaggtgcagtggctcacgcctgtaatcccagcactttgggaggccgagatggccagatcatgaggtcaggagatcaagaccatcatggctaacatggtgaaaccccgtctctactaaaaatacaaaaaaatcagcctggcacggtggcgggtgcctgtagtcccagctactcgggaggctgagacaggagaatggcttgaacccaggaggcggagcttgcagtgagccgagatcgcgccactgcactccagcctgggggacagagcgaggctccatctcataacaaaaaacaaacaatcttccaaaataccaataaaaccaaccaacagagaaggcttcagatgtgtgttgctggaggcagtgggctggggaggctgaggctctgggctggggaggctggaggcggccacccttcgtcagggacatatttgccttcctccagttggtcttgagttgggggcaaaaataggtgaactggcagccgttagccgtggcctgagtctgtggcgtgattgctacagaggtgtggtttggcttccaggcttctcaggggtcagagttctactgacatacgtgatccggccgctgcccgctggcatggttagtctttcctccttgtgtagaaagccaggataaaaactgccctatgtccagcattgacaggcagggctgagtgccatctggggcctggggcacatgtgtagctatcttctccaggggctcctggctggcactattcttgcccagggggccctgcccttgtagggctcccagtgtagagggggaaaacatgaaatagttggacacgtcagtcaattcaagaatttggggtagtgaccccagctacagagaaaccaagaggtaatgggaaaaggaatgatttggggcctagcagtcaggaccaagcacgccgggcagggacagtgctctgagacctttgcctgacacttgggggatgagggggcccttccaggccccgggtatagcaaaggcccaaggccagagagtgttggaggggaccctggggcgaggcggggctgggagcctccgttactgcgcgggtgctcagaggtgtggagccctggggagcagggcacgcagggcccgagttgtgctttcaaacctctctggtcgaagggcaagaacagaccttggggccagatgggaaacagggagaccagtgattgcttcctgcaggggccaggccagagctgacagcagctgggagtggaggcagagatggcggagaggtcccaagaaaagggccctctctgctttcaggacagaaatagttcccccttgtgaggtttgcagggggatgcaaggct

SEQ ID NO: 2326 - DNA, 542 bp, Homo sapiens
ccatgacagtccttcaagagaggttctgctgtctgagagattatgtgacacgcctaaggtcacaggatcagcaaatactagggctgagatttaaacccagaactgtctactgccaaagcttttgcgctctccctcgtgccacgttgcttctcattttgggcttggtctccacttcccagtccttgaaggagttctccaggtctgccccattagcactgcatctcagaaggaagctgcagctgcgccgccaatctcccggtggtaggtgcttaataaacattatgaagtgcatgaacaaatgaatagcccctgatggacagacatgcttgagaaacactatttttcacattcctatctacactcaagattttacctatgatagcaggctgaagattcccaggatcttacatcctagcaggcaatgcctctgcatcctcatcagcgaaaccggattgatcttgcctgcttccctggctttgatggatgcaacagaagaatatatgcagaagtccctaatgcagtgcctgatgcatgataaatgc

SEQ ID NO: 2327 - DNA, 14642 bp, Homo sapiens
ttttgcggtttgggagggaggctgcgaggaggggcgcggtgcccgccgccgccaccgcagcaccgcacagcgtctctcctgggggtgcgacctacgccggggacccagcgctcgggcaccggaggccggcctcgcaccggtgcggaggccggctctcgcgagaaagcataaaggatgttattggcagaaagataaaaatttcagtgaagaagaaagtaaagttggaagttaagggagacaaagttgaaaacaaagtgctggtaagtattgctgtttatttttattaaatgtttggaaatgaaagtgtgttttcattgtttagattgcttaattttcatgcagcattacttctgtgttttatatattgttcaaaagttctgatgaccattttgtcttaggttaattggaatatttctttgtcaaaagttaaaaatagggtaatttgaattttaaagatcaaaggcttttagattgtatttctcaaagttgtaattgctgcctatatttaggtaatctcttagagcctgttttcataatattcagagtttgatgttaaatggaacttttttatttggtgtgtggtgggtgatcctatgactttattcataaagtcttatggaggagtttaaaaagttcatctcatgttggtttaattacttaattagattttctcagatgttatatatgagtccatctaaggggtgatgagctaacaaaacattgtcattttacttagggtgttggtgctttggagggaaactcctgctgaaggcagtatctgctagtgttgcgactggacttggggttccttctagtttgtgagaggagatgctgagggattgggccctgctgcagaaaacttcttagagaggtgtcagtgacagagttgtacctttagagaggtgaaaacattttgtgatattttaatggtttctaggttgagattgtggcaaatctaaatttaagcttaggtggaaagaatattttgatggagagaatactgtttaactttttatcatggatattttcaaacatatgcaaaaagcagataatagtatatcgaactctgtgtacctgtccttcccagcttcaaccattttcagcattgtactaatattaaatatcttccccatggtgtttgtttgttgttgctgttttttttttcctctggagaattttaaaacaaatcccaggtatgttattgaaagagtataatttcttaattttttaaagtctttttgagacaggatttcagtctgttgcccaggctggagtgcaatggtgtgatcttggctcattgtagcctcaacctcccaggctcaagcgatcctcccacctcagcctcctgagtagctgggactacaggtgtgagccatcatgcccagctaattttgtttattttttgtagagacagggtctccctgtattcccgaggctggtctcaaactcctggactcaagcgatctgcctgcctcggcctcccgaagtgctgggattacaggcatgagccactgtgcgtggcctgaaaaagaatatttttaatattccattgcttcagttaaagttgccaaagaatttgaagtgtctttctgatcacatctgtcttgagaatcttctaaaatatctaactccaggatatgtgattgtcttttcttgttagtaaggattatgcttgtgatggatgacttctgtttctatgttgtctatatatacaagtcgggatggtaaaggcattgaatgggaaaacttgaatggcttttgcccagcaacaaaatgtgcttatgtaaactgcatgattaagttatcagtagaagaaatgattggtgccattgttctgttgtatttaacttcagtaaaggtgagatttccttaagttatgtttttcttgatgttgttcaacaatgattgtgctattttttggaagtggtagtgtagagaagaaatattgtttctgtcatttgcttttttacaaatttaaagtaagtttttaataatgtagtaactttataagatgaatcaacttctctacaacttaaatataaggtagtggttgctatgacagtctaaaaaattggggcttggtattatttgatatggaaattattattatgctaagaacaaacccacatcatgagtgcaatttaccatgttaaaatttcaaagacaaatttaaatgtccagtataaaattagcactatttaaacatgcttatgattagtacttaattgtaagtttttttggcctcatctaacagctggaattgattaaagttgtaaccaaattaaaaatgtatttgagtttaagcatttatctccccaaatatggaatctaagcagtttctagaagcatggccggaactcattgtggctgttacttacttgcatgggcaggaattattaatagaaatactcaaggtctggctttctttgacaggcttcaagttagaacaagaagatgtatgaagtaacctcaaagttgtggatttctgagtttctgagtttagagaaatttaattgcttaatccattgttagcctactaaaatggttcataaatgagttggctgaatatctacagtacgctttttgagttgtgcttttgttacttcccccattgcccaccattcactccttttcttcttataaaagtaggagtgtgctgtattttacgtggttctttcttcttacacttgagactttatactatttctagcttatcttttgtagagggcttatcttcatcttcctataatcataatagctaatatttctaaaaatctgtttttgaagtctagtcaagtgaagcaatgggattggaggaagagcaaagaaatctataatgagttgtgatcaattagttgtaaacacccctacactcagaccagccatgatcataatagctaatatttattaaacactggccaagtgccagagactgtgctgagtacttaattacgcattgccttgttatatccccactacaacgctatgaggtaggcactttttacatctccattttacagatgaggaaattgagatttggcgaggccaaagtaaattgcttcacatcatttggctagttaataacagctgggattcgaacccagctctgcctcactcagagcctatctgctttgcctttgtggtcaaaaagaaggcagctgttactttgttccatggttgctgacttcaaacaatgataggggagatttggactttagagtctctctgtctttgattgattgatttatacactagttttatatttattgagaacctgctgtgtcccaggcacatggtgtatacaaaatagtcctagtctttgacttcatgggactcgaagcttacagtctagttggggaggtaaacatgtagccaggcagtggtttcagatgtgctatgagtggatgaatcggggcttcaggagcacggagaggaactcccaactcaggcctgagaatcagggaagacttcagaaggaagataagcttaagctggcgttcactggatgagtaggagttagccaagcgaagagagtggagacatgttctggacaaagggaacagaatacgtctggaagcctgagagagcttatgttagagaaacatactaaggtacagctggggtaaggcatatacagggtagagaatgggcaggtgtaaagcctgagtcctgtccttgcagttgggatgtcaggtgaaagttaggactggttaaacaggtctcttcttgccacctgtgtataatgaaatattaaggctcagtggttaagggcccagattttgggttcacactgttgctcagtaactttgtgacaatgttaagaatcaggttttttttttttttttttccgtatggaaaaaatcttatgttataacagtatctattggtatgtggttgctttgcatatcaagtggaatttatttaaatactgcatagcacagtggctgcatgcagcaaacacccaaaaaatgataaggcaagaggaacaaaggggtcctgcattctgttttctccgtggtgcggaaagtgccattccttctgaagcccaagtatctgctgcctccattgacaggttgaggtcagttcaccataaggccaagagggtttattcacagtttgtggcaccttattagcaggatagagggcaacaagctggatctaaaattcctaaggtatgctctcctcaagtgaaatcagaaatgctagatgttctggggcaggagtgttctattctcaaataaatttggcagagtgttaaagataaatcagtttctttactgcatgagttttcagagccattaatacagccctgtgcattgtaaatttctaagaattggataaagtatgctgttttttccaaacttatttagccagagaccctaatgaccatgggctaagaaggaacaggccagagatgatgcctcttgggacagttaagaaaagatagaacaggcttgaataggctctccatcattaggagtgttctcctgaggaatggtcctttagccatgttttttaaaatctacattgtgagtagttccactctgggctacgttggcttgacatgtcatatgttgttgaaatacctttctctgttgtctttaggggatgtcattagaaagtgattctatgtttatttgactctaattcccttctcccatttgctaaatgaatcttcacccaatttttatagtacttggagtgtaaaaaatgtattttaacttatgtattttttaaaattaaactttttcatttttaaataattgtagatttgtctgcagttatatcagataattcagagaggttatcttatgccctttatttagttttccctttttgcaaaattacagtataatgtcacaaccaggatactgacattgattgacactgtaaaatgcagatttccatcaccacaaggacccctaacattgcctttttatagccatacctagcattccccacttctctgatccctggtagccactaatctgttctccatttctataaatttgtcattttaagaacattatataaatgtactcatacagtatcccctttttgggattggttgttcttgctcagcataattccctggaccttcatccaagttgtatcaatttagctaaggagtacttcatggtatggatgtaccacgtttggtttagccattggctagttgatggacatctgagttgttttcagtttttgtctattaggaataaaactggtgtaaacatttgtgtacagatttttgagtgaacatacttttccttgctctgtgataaatgccaaggagtgcaattgctggtttgcatgggaattgcgtgtttacttttataagaaactggcaaactgtttcccagagtggctgtaccattatatggttttaccagcaatgtatgagtggtctagtttctctaaatccttggcagcatttgtcattgtctggacttcttttttttctgagacagggtctcactttatcacccaagctggagcacagtgacatgaacacagctccctgcagcctcaatctcccaggcttaagtgatcctcccacctcagcctcccaagtagctgggactacaggcgtgtgccaccacacccggctaatttttgtactttttgtagagatgggtttcaccacgttgtccagctgcttcttgaactcctgggttcaagcaagctttctgccttggcctcccaaagtgctgggattctttttttttttttttttttttttgagaactaagttgaaggaaaaacaatgtctggcaggagcaagagccctgatgacctcttgtttcccacagttctgctgttgcctgtttgggggagaggaatgtggcactcctctctccaggatggtggccttaaagtgtatgaaaagtcattcctagtctccactttggtttcttctgtttgatttggaatttgggttacatcatctttgccaaccccttcttcttccacaccctttgtaaaatgggtcagaagcaggacttcttttcttcttaaactgagcaagtaggggaagtggcatacaaatcgaactattctgttttgtttacctattctctttaaaactgcccatctgttgtccatttgttttcttttgaaaagttaatctgaaatccacccccccggcccctgaacgacagggtctcactgtgttgcacaagctggagtgcagtggcactatcacaatcacgagccttgctcaagtgattgcctcttgcaatcacttgaactgagccttgcccagttcagcctcttgagtagctgggactacaggcacatgccaccatgcctgcctaattaaatttttttattaattaattttttttagagacagtctcattattttgcccaggctggtcttgaacttctggactcaagcgattctcccacgtcggcctcccaaagtgctgggattataggcatgagccaatgcaccaggcctgaaatccctttaacatatttttttccccttggctatttatttatggcttttgaacatcttaattagactggattggagtaactataagttaacttaaaaaaatgtcgaaaggcataggggtattattttgggtaacgtatccctaaaatattttggtggcagtgctgtatttcattaacataaagtataaactctattccacctgctttttttttaagaggacatgaaaaaagaaatatctctcatatagaagttttggaagtatttgacccacttagtcacaaattatcttcaactcagatattctgcaatatggaaactattgttcttttgcagtaggccatactcattttgcatgaccagtctgtttaatgcttttctagtttgccagtctctagtacctaacttgattcagcagtatgacctgtgccatagtcacttttcagacggatattcatgctgaaatttgtgttcagcttcttaaggcaacatcagccttggccagtggttttcagacttagtgcctgtttaaaacaattttttttttcatggaacccataatgtagtaatgttttgggattgtattttgggagttcatagttaaacctataatagtgtaaacctaatcactgatttcagtgaggctgttttgatgaacacaaattagaaatagtaggggagatttggtttttgctctggttgcatggaatagagagactcccgattcaccagttaagcagtacacatatcacagtttttaaaataactagtcttgcaatctcaggatgctttccaagtaaatagagacggtaggggaagctttattctgagatctgcacaaaagtgggttatcctggcagcacagtgtacctcgtagttgttctctgatgtgtaaaacttggtgtaacacatctgagtgtgtgtgttggtgttttattccagtagttaaaatagacataagacaaattcatataaaatgtttgtagactgcaatgtcttctgaagaatgctgtcagaaaatcattattctaggtccccaggtttacatccctctgtgagacgctcttgtaccagttgttgggtaatttgaacagttgcctttgtggtaccattaggagtctcaacttttaaggatcacttacagttctgtgcataggtgattttcaaagcacctgggtgaagttacatggctctagaaaattgagctttagaaaacagcaataacactgaaacaatctttgggagtgagttatcagagaacgtgcattgttgccaaggatgctggcataaattctgggaacctcaaaataaaagaatccatatttaagcacttcacaatttacctgaaccgaacactggagtcagttcctacctgtttccactaatctctgggtaggggctgggggcaggctctggccctgggtgtgcgttttcaggaggcagttctggctgacttgaacttgttacctgagctgcatttacattctactctctcctcatctgcaactgccccagtttcttctgtagttaggataggcgagtcaaatgaccttaggcaaagaagctgttgaacatacaccaggctcggtgtaacttttcattgttctaaaaagatactctttttccagtctctgggatttagccacccttggaccagggcaattaggtatataccctggagaggggaggaaggtaagtgatgggggggagtaggagagtagcatgaaagggacattgtggacattaagaagccaggaaatctaatcaaaatatggaatgaatagggagaactcttctttttttcatagttataaaatagttacagagaaaaataaagactttagtaaaaggttactgtaaaaactttaggtttcatttcattggaaacgctgttaatatctttgttaaaatagatgaaaaatgtagctacaatctgaaggataaaagatttttgttccctctcttatcccctctgctttctaaaatgctttttttttttaatagaatataagaatttggattggtatatatggggtatatcattgtctaaatctttacgttactgtgttttatttatttttttccctcttgatagaccactttccccagctctttgaggaaagaggggcaaagaggggaaagaaggatgcttggtgtgtgtgtgtgtgtgtgtgtgtgtgtgtgtgtgtgtgttttgtagcagtagtagtagtggcagtaggtaaaagagtgttcactgggttattttcctcatcttgtttcttaggagaaggtttttcttatttatttttgagacagtgtcttgctctgtcatccaagctggagtgcagtggttcaaacacagctcaccgcagcctcgatatcctgggctcaagagatcctcctgtgtcagcctctcgggagctgggactacaatcacatgccaccatgccgaatttttttttttcctagagatggggtctcactttgttgcctaggccagtcttaaactcctgggctcaagcagttcttccaccttagcctccccaagtagtggggttacatatgcgagctggtcttcccttcccttcctctcctttcccttcctttcccccttcccttccctcttcccttcccccttcctcttcccttttgacagggcctcactttgtcaggctgatgtgcagtggcatgatctcaactcattgcaacctgtgccacccaggctcaagtgatcctcccacctcagcctcccaagtggctaagactacaggcatgggctgccccacctggctaatttctgtattttttgtagagatggggtttcaccatgttgcccaggctggtcttgaactcctgagctcaagtcatccacctgccttggcctcccaaagtgctggaattatgggtgtgaaccactgtgcccaacccaaggtttttctttttttgaaagcattatcacttggtgaacattggccagcaagtgtcttggtttctttagatatgtgtagatgcacaggacgtcctcttagaggtaggaagcaggcatgtacacatgtcctgagctgtacttacagcctcaccagcctttggcaagggtttgagacagatgtgcttagttcctgctaagaaggcaaatgtgtctatttctgctgatccctgggccctggagtctcaggagacatttatggacattgactgggattagtaggtatatccaccagacaggatctggtgtagacagattgactcaaacagactctggggaaatttattgagaccttgccctcattgattgctgcctagaggatcttggggctggaggactcttggcagccatctaaccatgtgtcctaacctaggagaagtttcttctgtagcacctccgacagctaggtatctactttttgcttcactattcccagtgatgagaaaagcaaaagcccccaaaagccctgtcttcttttgaactgggatctgcttctcactctccatttcttcttgcatagtctactggaatatcacagaacaatttttctccctcctatccatgagtgcagttcaagtatttgaagaaggttatcatacttttctttggtcttatagtcctcaggctaaataggctcacatcctggagtctcagtccttggaagatgttgttttcagacttatcactattctgatcaccttgctttggaatcaccctactttgtccatgaaccttttaaacaactgttggtgtttggggatcacacatgcttggcgaacacccttgaactgaattaaacagactttctcagtctttaatgggctcctgtggattgtgccttttgaagagggtatggagcctgtggcatcacagcatctgtgttcctccaggcagggtggggaacatcaagctaagtgcaacctgcctggtgaagaatgctacctatgcattgcttggacaaaaggttttgttattgttgttttttaaattttggaagtatccctgatatttgcattactaaaacaataataaaacataggaaagaaaaagcgaacatcacctaatcctatcaatttagatataatcattggaaaaaaaatcagtatttttcatatttttctgtgctaacttacataaaatatatgatatattttaaaaaatggaatcatgaatactattttgtggtatacttttaaaatttaatttttgaggtcaaagctttctagggcagtagaaagcatgatactccatttacccactgtagaggagtactgtagtttatctaaccatgtcccttattgtcagataatttaggttatttccaatattttgccttataactgtccatgtcctcatatttatttctcttggataaattcgtggaagtggaatcattgccatcattgcctaataggcattttgaaggatgctttttttttcacctgattgttatttaggaagtctcaatagagaataaatcctccaccttgtcaatttcattgtcttaaacaagagtctacttggcagaatggcttgttctctttgcttggatccgtgtatttcttagaccagtgctccttggaccctagctcctgaggcaaacctttttcatgcaatttagggttctttcagatctccctgtgtggaagtgttgtcttctactacagtatgtttgctggaatgagaaagtcctgtgacttcacttgtggtttcagagtcacagcttccaagtatcattgtcttggcagaatcagccatagctttttccttggctgaatcctaggtaggtgtgagcctgtattatatgattcagatctttgcccttgtcgtgggactttcttaccttgggcctttgaatgctctcataaatggtagttgagtagattcacaaatgataaggcacatggcactttcattagatgaaatgtaattaacaagaaccataagctaatatgcatgtagaactagtccaatgtcttagaagataatttagtatcataatgaaaggagacattgtttttcttcccagacagttctgaaggcagttgattttatctgtatagccaacaacaatttcttaagtctcatggtccttccccactccactagaagctgcagagtagtccttctcattctcatttactgtcccaatttcctgaccctttcactatctccctgtcctgggagaggggtgtccaggtgatgaggacctatggcctcttttctgccatgaggagctccttgtggagccctgtcctccttgctgaggccctcaagagtgcagcctgcttttctgtgtcctttcaaagctaccattgtgtactatgttgcttgtggctgtcttttctttcaagcctggcagataggatgatattcctcagggacctccttatttgctgtctcagaaaacaagcacagaggactttcttagttaccctgtagaacagacaaagaaaatcaagacgcccagatgcggggaagtgactgagaaccttgcaaggttcttttaaggcaatctctctgctctttgatgcctaaccttatggggcacagccacactcacttgcagaatctgagctaaggtgtggccaggagaagtccaggccagtgaatgttatcagtggtcatttcttggtttcctgaatccatctgtcttaaatcagctgtcactagcaaccaaaaaaagatcttatcatctgtcataggcatgacctgaagagaagcagctgtgctttgttttttgctaagtcttgggcagttcagtttggcacttagagtattccagctccttttcttataagaatatctatctttatctatctatctatctatctatctatctatctatctatctttaactaactaactaactaactaactaactaaagcattttaaaacgtggcatctcgctttgttgctcaggctggtctccaactgttggactcaagcactcctcctatcttggcctcctgagtgtctgagactacaggcacaggccaccatgcccagcctcagctccttttcttttaaatctcttggtccaatttatattctttgccagcatccttgggacagcacaaatgttgaagtttggggaaacattttgtacaactttgttcactgaatcacagtcactgcttgtgctgttgataatcaaaactaggctgcacagagtgacgtagtcacatatttggcttgggtgtacagatgtttcccttcaagcatcttggatgtcttgctccttatcagaattttatctcccccaaattcattgtttgtgaattaactgtaaagttctgggagcgatttccttttcaacagtttgcctttctagaaaaaaacttttggagtttaaatagcacttaaccctctatcattttactctctctgaagtggtctctgtggagaacatgttgggtcttctctgttcaatatctctctctctctttcttggcaaagcctggatgcgagaagttggtccaatctttcctgtccagggttgcttgttaatacagcatctggagcaaaggaaaggctattagcaccttgtcacttggagtttcttaagcattgttccatttatgtgttctttctgcagagatttaatgaaagtggcatctgtctttacacctgacatatgcaggttgtccgcagaactgaacaagtggtgtcagcaacactgtatatgcaggaaggcttcatgctcacgtcgttttttctgtgttctctgggagtagccaacttctttattcatcagagtagggctttacattttaatattctagagagagatgcttgtggtgatatatttagccttaaattcaggaatggcttcttttttcaatgtctttacattttacgcctcccattttctgtgttaataggtaagtgtgcctacatttaaattctgaaatggcatttgctaacatttaatcttggccaagttatttaacttctctgtgccttactttcttcatctgtaaaatgggtgtaataacaaaaaactacattgtagctttgttttgaaaattaagtgggatattacatataaaatatttcataatagtgcctggcacatagtaagtcatgagtaagtcttagctgttattgttaggggtagtgtcgtgataatgctaaatgctttgattaaaagaatctaattgtatatttgagtcacagattattcagatatattttatataaatatttcaaaagaaatacctcaactttgcatgtcttcctggccctgtacaaggtacatgttgttatgttttctctgctcagagctattttaagccagtacagactgtctacagaaatgggtttagaatgttttttcactctgctgttcttaaagagggtacactgcttttgagaaatcttttttaaagaaagggttcaagttcagtgttgagaaatttgtctctgaggacaacgctgtgcatttccaatacgtatctgtttttcatcttgctttcattgcagatctgcatgtatttagatatatgctcaagtccctctttcacttcccagttacttagagtgaaaaaaagaaaacatcagtagttggtgcctgttcattcacttagggctttcttggtcctttcagggcactgctgtctgttgctgttgcctcactcagtttgcttcctcttggatttcagttatgattgcttttttttttttttttgagacggagttttgctcttgttgcctgggctggagtgcaatggcgcgatctcggctcaccgcaacctccgcctcctgggttcaagcgattctcctgcttcaaattcccgagtagctagtattacaggtgtgtgccaccatgcccagcttattttgtatttttagtggagacagggtttctccatgtttcagggtggtctcgaactcctgacctcaggtgatctgcccgcctcagcctcccaaagtgctgggattacaggtgtgagccactgcgcttggccgattgcttttattttatagccggtccttgatcgggggtgcagggtgcattatctgagttcattggtgtgtgtggctctgtgtctccatagtcagaaggattcctgggcatgctggattcttttttttttttttttttgggaaagagtctcactctgttgtccaggctggagtgcagtggtgcaatcttagctcactgcaacttctgcctcccgggctcaagggattctcctgcctcagcc

SEQ ID NO: 2328 - DNA, 1878 bp, Homo sapiens
ggggaatctgagaactctggggctggtgctagctcctctaggttcagcatgacccacagctaagcagaggagcggaaggatggttatggagagtggaagtcctagacaagaatgaacagtttacagccacttgtagaactgtctgtctctttccagtatctgaactttgacgatctcaaagggcatctctgggaatttttgagtgtcagcgtgccactcaaagggtggcgggaggggcacctagcagtcagtgcagcaaggcagacaggacccgcatgccagcaccctgcctgtctgatgacactgattccgaaagggcactttctcatctatttcctgctttggaaaagggcactccggtcattccagtcaccgaaacaagagattttggaaattcatgccgggcagagtgctgggcatggggaatttggtggctggcaagacaagccgcttctgtcctcaaggcctgactctgaggccaaaccatcactgagtcagggcccccagagccctgcatgttgaccaccgtgtggatggacaccatgtggatggcctctttcaacatcttctaactcagctttctcctgcagccagtgagctctctccagagataagtgcagtcatgcccttaccatctaatacacagcagtttttcatcactgacagaaaatgtacaaccttaacccatcatgacttacagccctccatgtctgatcgtagccccaaacacaccatacctttcacatccgcactgcatccctgcattgtaccaccagccagccaccttcctcctcccttacccgctgggggatttgcacagtcgctgtagaccccagcctctgtgtgaccactactttgaagacttcctccttcaccctcttaggaatttagcctttctcacctaatatttgtctccgctcattgaacatgaagtcatggtttctatgctggttgttattctttctgttatttacagtgttttttttgttgttgttgtttttttttaagaaaagagtgtgttagaaatactttatacacaccacataaacttgaagtctctctgaagaaacgtttatggtttagaaatttatgatacgaggtttaagatagtctatttcatctgatgttttgcctttttctcatgtcaagtgttacctcactgttatgaatgttgccacactggctttatatagccaccatctatcactcttctgtttgtttagtaaacatctatctccatctatctgttatctatactctatgaatctattgcctatctgccagtcacctctcatctacctatccatctcaatgtttgttttgactcatttgaaaataagttgtcaacctcacaaccacaagaaaaagaaatcttgcttccatctcaatcccttttgtaaccattgttattgatctcatgtatcttagcaataattctttttttgcaataataagcaaatttgttttctaattacttcactgattcttctcataccttcctctgttgttattattattgcctggtttcctttctttgcagttgaccttagggaaagaagatctctgcatccttgaacatgcttacaaatcacctaggcaattataaaattataattataaaactaaacagatcatcatagataaaggaaatatatagttcagaagaaaatgtaataaagaaaaataagtacaaatataataaagaaaattaaatacacaaagacaataaataccctttagtacacagttatgaaaattgacttggtagcaacagatgggtgggttgaatacttttttacattacaacaatttccataaaggtgcagacccacaaataaagcaatgttttggcccaaacgagttatcgaatttctgctg

SEQ ID NO: 2329 - DNA, 2460 bp, Homo sapiens
cgcatatcaaccaatatcccccaaaaagaaagttgcatgaaaaaagttgcatgaaaaaaacagaaaagttgcattaaaaaaacagaattcccaccgtgtcccagattttccaaataatcctgccattcggaagcctgttcatagccccaaagtactgaaaggccttgcaaaatgctcataggtggaacagcaggaagcatctagagccatctcagagggagccttctgcttccagaaataaattcacacattcacaggtgcttcctgttttttcaaacaccttgcccaccttctgcacaccaagcgtggattctgcaaaacgtgagcccaacaggaagctgcctgcaatttcaggtagcttttctgactcttaaagagatctcaagtataccttcagagaaatgccagcaaaaactgtagtcatttgggaaggaataagcctggaagaaaaagatacaacgaactagcacaacgaggagtttgaaaagttcatgacagctcacagctgatgatggtggcaatcttaaggatacagaaagctcattcctcatgcagggaagaagaaaatattctaaagaagagataagcatattccatgaaatcaaaaaagcgtaaaacgctggaggagaagtcagtagcaagcagctaagacaacatggtacatgtggctagaagcccaccaactgctaacaaccagctggagggcctccccggaagctgagcagatgccagcaccataattccagtacagcctatcaaactgtgagccaattaaaacttttatttattttatttattttaaaaaaattttaatttatttataaattacccagtctcaggtatttctttatagcaatgggagaactgactaatacagctatcataatgcattcaagaagaaacagaagacactaaatagccctgcatctattaaggaaattaagtttatttttaaaaattcaatttataaagaagtatatgaatgaaaatactttccacgaagtaaatcctaggcctgaattatttcatctgtgaatgctaacaaacacttaagcatgatataatactcattctatgtgaactcttctaagaagttgaagaggagtgaatacttcccaactcattccacaaggctagcattactctgataccaaaatcaaagacataagtaatgaaaaccatggaccaatttcccttgtgagcacagacgaaaaatccttagcaaaattttagcaagttgaatgtgacaatacctaaaagaagaccaagtagagtttatcccaagagtgcagtgttggaggaaaaatggggacattgtggctaggctggaatgagccagggaagtgaaatgagatttgagaactaaagagaactagatcatgtgggccagaggatttgttcctgatcatcatgaccgtgaactcaaacaattaatactagtagtgtgaattttaggcctctctactggagaacagagaaaattgaggggtggtggggactggtaaataccacagagagaattgtcagcctcattgcaaggccttgatttttaatctgagtgagatataggaaaaccattgaagagttttgagcagaggagtgatatcatcattttactgcattttagtgatctattttattgagaacatattttagtggagtgagactggaatcaggaagaccaaataataatatgtaagtcaaagtattcagtaaattataaatgattcacataccaataattactcaaatattgcaataacttcatcattctctgtcatagtttagtgcaccatttctgacaagctgctttatatatacttacttttttatagataacagtcttttgataaaatacattttgctagagaggactctcagaagaatgtggggaactttgcttggttataggttgatcattgaagcccagtggaattttgcccaactcttttattatacatccctcagttttattgtcagaaataaaatgttatgctgaatggtaagagcctaaaataatacaacattcctttatacaatgtacttggtcccaacttgattgtgatgtcagaaataaacaatatttaatcattttccaaggagctggtctcccttgaaccagccccttgcagtcattgttctcctgactgatgttatcagagatcctatgcaggatctaattcctactcatgccagagcaagccaggagaagctctaccaactcctgggagctacaaagcgataggttcccagagtctaaaactattggaaatgatgtttgtctaaaatggccagagacaacttttataagcttccaggaagtggagaaccagaaaaactgagaaaaaaaaaaaaaaagccaaaacacacaaggtcaagggagctgagaatcaaagactgtgatgacaggcaaggctgtggatatggagtgcacccaagagttctctttcataagggatt

SEQ ID NO: 2330 - DNA, 2042 bp, Homo sapiens
cagaaacatgtgacagctgtggtctaaaaagggaagcctaaagggtcaccaaagggaccaaaggggctatggcagctgggactgagaaccagggaggtgagtgcaaaaatagtaggtccaggggttggtttagaacatgtgttgcctgtggctcactctggtgggccagctgggcgtggtgggagtgtggatctgctaaatttaaagggccagaacagacaccactgtgcaggagactgtgcatgtgttttagcctgggaacctcttatgatagctcaggctgagtccaagaaggtctaagcatggtttgccctgaacctggagctgggaaagcagaccaagtctaaatgggaggggcaggcagtgttggagataaggacaagccgtgatgggtgcttgggtggagggacaagtctgggcgctgggccctgggcaccgtggggcttacatgctcaggcctgcaggagtgagtgaatagtgctgggggagacagaggcagatgagtcacaatcccagatgtgagcagatgctctgggcagatttgggctgcttgtcagcaaatttgaccacagcctggatgggctgtcaggctcaggccaccggccccactcccagcacagagaaagcctaagaacgcactcctctggatcactctttgaaatgtttcatagccctatatggaaccacatctgggagagtaaatgtattttctgagccaggctttacaagttgattttatgacgcatctaggcagaagatgaaacgccccagtcattaactcacttccccttgtgggtgaattccacaatacgtctgtggaacaagtttctctagcacacacagacctgtctgtcagtggctgctcagataaatccttcgctcttcagaggctgtccctggttcacccctcaggccacgtgctctctcttgcaggcaactttgctggctcttcctggaacaggccaaaacacagggatgaagttaaggctgcctgtgtcagaggggccttgagcacacattcggattcttaaccaccagcttaccagatagcttgctgtgtccgtgtgtgtgtgtgtgtgtgtgtgtgtgtgtgtgtgtcctttaaaattctagcttaatggccacatgttttaggccacttctgtcctcctaaaatagggctctgagcacgtctccaaaggagggcccctgaagcacaagcagtgggccggctgccagggctggcagaatgagacacagtacttgaaataaatgcagggtgtttgcttacagattctttaccacatcatggatgagtcagatgacttctcaccccagattctgtttttaccctttttcctactcagagctaggggtgggaggattgtgtaaagtttaaaatatatccccaaattatatacttctgtgttttaacatacaatagggatcctttcattcttcgacgcggtcgagaattatgtttaacttttcctgtttcattctgttttaattcatacctggttgtggaaagagcgttggaagttgagagacctaggatcaagtctctgctagttagtagctctgggatttggggcaagtcagtccacctgtctgagctgcggtttctcagttcccagcttgcactgggaaggaacagctttgtggccctggttttctgagcccctgcccttcacttggggttgcttgtcatgacagcaagttagatcactcatggaagtgttttgaaaactaacatgctacattcttgtgagggataattattactatgtgccatgccaaaaacaaaacaaaaaaaatccttttcttttcttcagccttcttcacactcaacttagcctcatctgtggctagagcttcttcagtattccaggcaaatcccttctctctggctttctgaggctgacctaacccccaactccactcataacacctctgcgtctgcttctgctacttcttttttttttttttcagggtcgtccgtatgttcttttattatttatttattcatttcatagtagtaacatataagaatataaaactta

SEQ ID NO: 2331 - DNA, 2773 bp, Homo sapiens
ctttgtctcttgctccagccagagctcgaggttagctcttcactgccctgtgtcttctttccaagggtctcggtgattcggccacagcctcagcctccatcacgcggtgaactgatggtgctggaagattcatagactccaggacattcctgaagccgagaaaaggttaagtagggtctggcctggaatactctcctagatgaagatagcccaaccatgagccaccttcgaagcagatgagatgaaattaaagctcttcaactcctaaaggcccagagactatcacaaaagaggtgggcatgtgagattgtaagaactgattttgagagataaaataagttcagtttttctatacattaatcattaatgtcaaaggcacactaatgcaagaccagaataggggccccagtgttagattaacaaggttttcttgaagcattaactgactccttaataaaggcttatagaagttatatctcatggtcaagattagaattttatagattgttcataacattttgaaaaacaaatttaattggctttatgctgttttattgaagattattgtttggaaaattaagtcttgtctcccaaagaatgaaggttttttctttttttgtttttgaaatctttattactttggtcaaattaatgacttattttacaatgacctgtgacatcaggtgttttaaatctttgatatttgactgagattctttctgtggaacaaagttccatcaaactttccaaaatcaaattataaattatgtatttttcttacctaatcctttaaaatattatgttccctaaagtttaaaaatgacataattttgcttatttcttataaaaattatacagagaacgttgttgaatatgaaatggtgtttggtttttttgggctgtgtttgtataagtatattattggtatttgttctaaaattatgggaaactcctataattcttatatgacttagtgtacattattagcagtaattataattgctatattgccacagaggtaacaaatttccttgtcaattgtatctttgactttggttgccttaaaactttttgtcattcacagacaattgtattgttttggtcctctttagaaggtggttttataatcagctataaaactcttaacaggtggtcttgaatgcaagtttctgataactttggagatggtgacatcagagtagaggaaaaaaattcagaactcatggagagctgaaatgttcatgaatattaagcagaacaaggattaagtgcatgcattgaactattagaagactgaagtaatctttttttctttttttgagtcggggtttcactcggtcttccaggctggagtccagtggtgtgatctcagctgaattacagatgcatgccaccacacctggctaagttttgtatttttagtagagacggggtttcaccatgttggtcaggctggtccaaactcctgacctcatgatctgcctgcttggcctcccaaagtgttgggattataggcgtgagccaccgagaccagctgatctttttgactttttacttaaaatgttgctgatcctttcttttgttttctgagtcaaggaaacctaccttttgatctatttacagcttttaacaagttagtatactcctgtgaacaaaatttaaagcatatttaattctctctacttgatttctctagaatttggaaactatttgtgagtattcttaacttatggcaatacatttatttgcataagtgcattaagaatgtttttttttgtttgttttgttgtgttatttatttattttttgagacagagtctcactctgttgccaggctagagtgtggtggcccgatcttggctcactgcaacctctgcctcctgggttcaagcaatcctcctgccttggcctcccaggtagctgggactacaggcgagcgccaccatgcccagctgattttttatatttttagtagagatagggtttcaccatgctggccactatggtcttgatctcttgacctcatgattcacccatcttgacctcccaaagtgctgtgattacaggcatgagccaccacgccctgccaagaatctggtttttataagtaacaggacacaattggagaaactggttattttaccaacactttgactggaatggtgttccttttttaaggaatcaaacttgatttatggagccaattaaaagcccctcgggaaaactggattcaaatcttgtctacatattccctgtactatgacatttttacttaccacaggtcagaaatcctgaaggtcactttctgacaaactcaggaaccccaggtttatcttggagcctcaagaggagataaattcacccaactcagtaaaatacggatgccaagccgaggctggactgtgctgccgccatctcggctcactgcaacatccctgcctgattctcctgcctcagcctgccgagtgcctgggattgcaggcgcatgccgccacgcctgactggtttttgtattttttggtggagacggggtttcgccatgttggccaggctggtctccagctcctgaccgcgagtgatctgcctgcccgggcgtcccgaggtgccgggattgcagacggagtctcgctcactcagtgctcaatcttgcccaggctggagtgcagtggcgtgatctcagctcgctacaacctccacctcccagccacctgccttggcctcccaaaatgcccagattgcagcctctgcccggctgccaccctgtctgggaagt

SEQ ID NO: 2332 - DNA, 1927 bp, Homo sapiens
agcaagaggacaaacctgggtagggatctctatgatgttttctgcgttgcccgtggacgttcatctttctgatttgttagctgaagatgaggatctggagcaggagctcggagtgccattgttccatgggcagatgtgcagcagagattatagaaacgcttacccatatcatagcatcagtattttgctgaagccctggagtgtcaggcaccgtgttaggaactgaatacaaaaataagatgtaaaccagtccctcaaggaatctatgggactggtaagattagctaaccgtgcacctggagggaatatacttagaaataactgcaaattctgcagaaatgctgaggggttcccaaactcgtttctgtgaggcctgttaattgctgagttgttttgtctctggtctgtggaaccccgatagtgtgccctaggtctttaatttcttcatctctaaagaatagtgtcaatggagtcattgcatgtgtttattcatacttctcaatgtggaagagaactctctagggtgtaaaaccctatccaggaagcacatgacaagttggaatcctcaatgacatggcattgctatagttgctatcggaacaatcttttcttttttttctttttttgaaacagggtcttgctctgtcatccaggctggcgcgatctcggctcactttgacctctgcctcctgggttcaagcgattctcctgtcacagcctcctgagcagctgggattacaggcaggcaccaccatgctgagctaatttttgtatttttagtagagaccaggtttcgccatgttgcccaggctactctcgaactcctggcctcatgtgatccgcccacctcagcctcccaaagtgctgggattacaggcgtgagccactgcaaccagctggaacaatcttgatattagggtgaacaagtgatttcatagctttctctgaaggaggaaacactgggagcatccacccgagaatcaacactgtggatcattctggggagttaatagttttgagatgtgtcccaagataattgttagcttgaattaccacgtggatggaaccatgctgatcctaagagccaggtaatggccaaaggtgccattcaggtgaaatccccaggtggaaaattcttccacttccaatgatagaattctattactctgcctatagtttggtgaaacaagactttacaaatagaggacaagatccattttgccaagaacaaccatatggatttaactgctgctaacaaccgttaggaaggaacatcaataaaaagcaagcctgtgagacaactccttccccaaggggcgcttgttacagagcgcgggccccagcaggcctggtccatcctccacattctttcctctctgacttatttttactttctgtttgaattggcttggttttattttgccctaaactgtgtctgtagtcatcccccgacagagttttgagagtgaaagtccgatctgcccacgcttcacagaactcaatgcggagccttctcaggagtcacttgacgtcaaggctgacttttaaatttgccaaaaaggcattctttggggagcggtcggcaccatcactttccctctttagagagctgctactggctgctggaattcaaaacccacaaattgcatttctaaacttaattcgatacatagatgagcggaaagatcagacattgatgctattgttttcaaccaagatgttttactatatcatttatattttgtttttttcttcccccagtttttaaactttttgtttgtttgttttacaggccaagcctactgctgttagaaaacatatttagaaatcacttggttcttccttgcctgaacatcatctatttagttagcttgtgttgtttagatgtgcttcagatctcaaaaaaataaattatgttatttgaaag

SEQ ID NO: 2333 - DNA, 1578 bp, Homo sapiens
cataaatctctgactcatcacttctagccagattgccatgcctaaaccactttctttgaagtttatggaagcaccactgcatttatgccagaaggtgaaagtccagaacaggtgctttttggtttgagaatgagtgttctacatactggcctgtaaggcagtgctactccaagtgtggtccacaggctggcagcaacatcataggggagtatgttaacaatgctgattctccagccccagctccggactctgttttaacggtctatccaggcatgaattctactcaagtggcctgcccctcagcagaagttggacaggtgcttatgttgcaattaacaaaaaggatacatgctgggtcctgcagtaaatgtctcccttggatcatgaagtctttttaccatgttactggaacacagaagggtactattgagaaccaactaacttggagccgtgtatgagccactgggaatagactaaatgagataatcaacgtcttgatctcatattctttcattctacagaaggaagcaggcaacaggttgcaatacgaagtggagttaaagcaactagaaggaagtgtcagtaaccaagctgagagaggctggaaggaaaacaattcatgcagcagaaaagaaagccttttgagcactgtgatgtcagaaggtgacttggaagatgatctaaatgttaaactggcagtgaagatgcgcagaggttgtagttctgctcccctccccgtcagagtgccacatcattgttattcccccaagatcctggattccagacagcccagtggagcaccatagaaagaactttcaggaagcagagaatggttcagggattctgattttcctgaacttcctcctccctatccacctccaattaggaaaaaagaagaaaaaaaagattaaacacgtccagaatgttaaaaatccagtagggattttaaatgttcactattacagcacatacatttatacacaaggaggtctgaaggctttctggtttcaattaagattattatctcctttgagtgatggtttctccttttttcccccagaattccctttggctgatctattttaaaagagtatgagctagggataactaggcttatttgtattgagtctactttcccctccaggtctctttgtcttaaattctgaagtcccttttcctatcctgctaaaggttagcagcttgaaatcaaggacatgagtcattgttacttttcatgtggaagataagctctgtggcttttatagcaaaaagtatatacaattctaaaattaaagtgcaagtcagaaaggccattggggctgtgaaaagtccttatctaaatcagaagaccaaggtcaagtttgtatcatgcctattagtacatgggtttcattggttaagttaccaaacctctgagcctcagtttccttatcagtcaaatgagtgcaataattcccgccctatcatctgacaaattattgagaaattctaattacatgcctataattttcaggtctttgtttttcaggtctttgttaagcatcatgcacataaacgtttgtattacactttctttag

SEQ ID NO: 2334 - DNA, 13987 bp, Homo sapiens
cacgtaatcagtgctaatcacacccttggccactacatgaagtctgtatgcccttccacaggatgtctttgaaaagcttcagctgatgtctcattctgtttgctgctggctgggcacaactggaagcaagaagttgaccgggggctcccatgacagtgtctgatacagaggggacagtgaaaaaagaatcagaacaaagcttctttcacacctgcctttacaggtgctgcccatgactctacaaagataaaggaagacaccagatgtcacagcagctgcctgggtcacttagagcagtagatattgatgctcttcaatgtctcaagcctcttcaatcatagccccaaagaggacataaggaaggtgggcaaaggtggagggggaatggaaaggatactccaggacgtggtgcctgttttctacactcccagctgcccaatcaagctcagagatccgaggacaagagttcaacctcttcacccacttctacttccaccccaacactgcaggtcagaagcagctcagaggccacagttttggagcagacaagagactgcagagaggcttgctgaagctcactccacggctggattcctggcaggatgagaaatggagttctagtaaactagaaggaatgctgctggcaggagacagacctctcgagagggctttaaatggaaatatgagagcacgagaggaactctaagtgtagaaaatgcactgggcaaacaagcgtgtcgcagatgtgggcgccccagaagggaaggagctctggagtcacaggggacccaaaggacagaatgtcaggtggccctccaagcccgcaggtggcaatgggaacaaggcgggaaatgaactggagagctgaaggcgggggcctaggaggaggccgcagagctgtgatgaagggctgctcatcagaggcacatgcacgggtcagataaagaagctccgctgcgaagacagggggcaatgcaaggccacagccgaagattccatgcatgctcttcacggtggcaaattcaaaagccttggagggcagcatgcttctatgataatagggaatgggggccggggggaatatgtagaccccatatcaatgctctcaaaacctctctctctctctctctctctgtctctctccctccctctctcttgctcactctctctctctctctctctctctctctgtctctctccctccctctctcttgctcactctctctctctctctttgtcgtgctctctctctccctctctctcccactccccacctctggcctaatatacctgcatgtccacagaggcaccaatctgcaatgatgatggactctctcacccaccctgctactaggaaacttcttccatatatcataaacagagaccagtattacaatacttcacccactgcgccaatttggctttcatgtctgtttcctgtgtcgatcacaacatcctagacagcccaaacaaggctttattcacctctagtccccggtccctggaacagcagacaataaataaggaatcaacaagtgtccttcactgccgcacacattggctgtgaatatccttttgcaaagtgcagaacatctgaaagattctcacattgactaaacaacagtgtgacctgaagttaagagaaccataaaggtaaatgattgctagaagtttaattccaaacaaggaagagcaatttgatgcaatgggcagaagacaaacattgggagaatgagaacgtatcctcttgagttgtgatgtgaacaaacagagattccaagatcttgcaaaagcgaacagtcagcaaccagcatggtgcttagagtagtccctgggcaacagaaaaaaaacagataaatgaagaaacatggacaatcaccctacctgggtctcagcgtgaggaggagaactaggacttccagacagaaaagaggagaagcatgaggagggggctgggaaagacatttccctgtgggcatgtggtgccctccactggggccagaattcccaacctgcctcactctccccatctgtgaaattggctgattccctgaggtccctcccagcactgactatcaagtgacagagaacctagaaactccaggagctccatcagagccctgactacctgtccaagtgagactgtgggagcctcactcttctcacacctgtaaactgagggtgctgcagtgtcagctatatcaacactcccaagtatgcctttgccaaaacctctatggatgagaaaggaaaagagcatgtatggaattggccagggcttagaaccatcttgaacatgacacacttatgcacatcgtcacatcttcccagcatccctgtcccacctcgggcagcaactgtcaaagttctgcccccaggatgacctcccagagtcctcagggcagctccatctctccagccctcattcctttccagctctttggtgtttccctgtaataaaaacactgtgcacttctcttttcatgttttaaccatgaagtgccttcctccagacaagtactttaatccttactccagtcagaataggtaacatcagcataattaccatcattactcccattttacagaggagagggctgaggctcacgtaagacctaatcttcatcttcccagggatcctccaactcctagccaggcctctcccagctcctaaatcaatcatgaaagactacagcaatcacatccagtacttttctgatctagtgtctttgccgctaaataaaggcagaaatcaaggtggcaggatcaatcctgtattcaaatcactgtactgtctgccaccctcctatgctggtccagggagcagaactgaaaatgtgcctcaaggccccaatccaaaacagatgccatcaccctggacagattctccaaccatgctccaagactggtatccatctcacttcaaccagccctccttcccaggcctgggtctgtctactggcacagggggaccctgccatgaaaatgagggcatctctactggattgcaggcgatcccctcgctgggctggcccacccattcaaccatcactggaccacccccaggcctgctaccccttcagacactcagcctcatactgcctagctctttctaccaggtctctccctcagatcaattccacctcagccccaaacttgccatctcctaagcagatttatacttcttcccaatttctatccttcctctagctcattactgctttcctgttgcttaagctaagtctatttcaaattatagctcagagagggcaggtgacttgttcaagactacacagccatttagtggcaaagctggggcttgaacccagctctcccaattctaagccttgtgtttttccactaaatctcagctgtctctctctatcatactgctcaagaagccactggtgcatgagagggtgcagaccacatcttattctctttagtaatgtgtacactaagggccaggtatatgttcagtgacttcttgcagtcctaggaggtatgactgtctttgtttacagatgagaaaatgttttcagactactgcactgctataccactagtctaaatacagttgtgaacacacagcactggtcaataaatgtgggttaactgatttttttttttttaattagctgaagagagcctaatggaaagacctgaaaaacaagtttgtggccagatcaggcaaagggggtaagatccagttatcattctgcagtagaactaaacataatattgttgcaggacaatctctgatggcaatgtgaagcagtctgtgagtcggggtgcctgattttgactctacctgacctgacagtgtgtgtgactctaggcaaatcttttctatttccaggcctcatttccccatcttcaaaaactcttttttaaatttatttatttattttttttacaaaagaaagaaagcaagaaatcccagaagttgaactagatcataggttctcttcaacattagtagcacctgtgagcttcttagaaatgaaaattcaggggtcccgcctgatttacagcatcagaacctctgagacggggcccagtaaactctccaggatgaccctaatgttccttcgagtttgagaaccattagactagatgacctttatgatccttccagctctatcactctgagaaccttatgctttctcaattcaacagcatcaactcctcccaattttgccattctgattttgatctggcatgaacttgggtcatctggctctctcatctggtcatgtctgatgcttcctcctgtgattaatagaaaaggccccaagaaacagacagtatactccactgcacttattttttccatttaccacctcagtggtatgcattctgtcactatatttaaaaaaaaaaaaattaacatgtacaaaaaagcccaactatgagcacagtggcatcctggtactatccttttaaaaattggaaaaggagtttactcctgaggcaagtcagtaaggaactgctgtattatctgaaaaataggacctttctgagcccagtgatctctttttagtataaagccagttgaaggaataagagagcatttgcattctacaccagaaatactcgtagattagcaaaccttttctttcttggtccttacatatcaaaacaaacaaacaaatccagatcgaccttacaagtataaaaacacatcccaatgagtactattttctctgtgttaactatcaacaaatggactgtttactgctgaaatagtgcctgaaactttattgtgaaatgaatgaatgtgcaccttctcagtgccagcatgggagatgtaaagataagcaagttaaaattctactctaggtggggcgtggtggctcacgcctgtaatcccagcactttgggaggccaagcaggcggctcacttgaggtcaggggtttcacaccagcctgggcaacatggcaaaatgtcatctctactaaaaatacaaagaaaactagccaggcatggtgggaggcacctgtaatcccagctacttgggaggctgaggtaggagaatcgcctgaacccaggaggtggagttgcagtgagccaagaacccacgactgcactccaggctgagcgacagagcgagactctgactcaaaaaatataaaataaaataaaattctactctaaagaaactaaatttgagtctagtgtcagcagtgtcaaacctgtccatccatccaacaaatgttcactgtttgccaagttccaggcagacgagaaggtcctaaagaagtaaaagcccaaaataagacgagcatattgataactacaagagaaggtaagaagtgatcagtgccatgcaagcagtacagacaaagggccatggaaccataagaggaagtgatgatttcctgcttaggggggatgggcagaaatcaaggcatgcttcatggaagaggtggtattaatatgctggaccttgaagatcaattggattcaaacaggtaatgatggcagggcagggtaatccaaatgcagaaagtgctgcaacaaagacaagagtgagggaaagcaatggagatgaggtttcagaagtcagctggcccccttcaataagaccataaatggcaggataaggaagatatacagggtatttatgtctccagggttcagctccttcacccagcctcccagctagagatgtccctcctcccccatctctccaggctccagggacagaactgtgcacctgctgcctcacccagcatgctgtgccttccctgctgcctcatgcgtgcgttcctcgggtatcaatgcctgcgcacgcttcgctgcacttgctatgccatgtctttacactactgttttctgtaatttataaaacacatactgcccacgagtttgtatttttaattcctgtaagaagttttgggatccaatttgtgtgaaagtcagactgtaacataatgtagtattgtatgataaaagcctccaagaataaaaacagacagtatatcctgcttatcagatactcaaacactggttccattcctgagtgtcacagatttcctcatgaataactcttctttgttttgcaccagcttgtcccaatcttcttgaaataagttctaaggggagaatttcctgattttcaaggcttctttttcaaacattgattgagaacctactacgttccaggctgtgctaaaagtgggcacaacggtttgcttaactttcacagggtaaaactgtggcattttgtgagggttaagtcctatgagacattactgatcagtgaacccactttacagataaggaaaaatgaggggaaaggtggaggagcctggatccaaaccctaatttttgggagtccccgatagttgctcactcatttattcaacaaggacaggatcaaggtatcttgaagatccttttctgatcttctctgggcttccagcttctcccagcattgtcacttcacttttgggggcctcagtctcttcccctaagaacaaggagactcaatgcagtgacttttaagccctgctttgctggagcccttcagggagataaatcaggggaagaaaaaaaggtgggtcccatcctgctcgacttcatccgcagctgctccagattacatgattacaacattatacgtcatagtaggcttttctttcttactttttttttgagatggagtcactctgctgcccaggttggttttttttgtttgttttttttgtttttgttttttttgagacggagtcactctgttgcccaggctggagtacaatggcacaatctcagctcactgcaacctctgcctctcaggttcaagtgattttccttcctcagcctcctgagtagctggtactacaggcgtgagccaccacacccggctaatttttgtatttttttaaatagagatgggctttctccatgttagccacgctggcctcgaactcctgacctcaggtgatctgcctgcctcagcctcccaaagtgctgggattacaggcatgagccaccgcgcctgacctgtaataggcttttctataaggaatccttctctaaatattaaggaatatgggccaggcgtggtggcttacacctgtaatcccagcagtttaaaaggctgaggcaggaggatggctagagcccaagggtttgaaaccagcctgggcaacacagtgagaccctgtcgctacaaaaaatacaaaaatttatctgggtgtggtggcatgcacctgttgtcccagctaccccagaggctgaggtgggaggattgcttgaacccagaaggtcaaagctgcagtgagctatgatcacacaagtgggggaccccagcctaggggacagagcaagaccttgtctcaaaaaaataagtaaataaatattaaagaagatgaaagttttaaaatgatcctaaactgggtatcctggactagatcttggaacagaaagaggaacttagtggaaaagctggtgaaatctaaatagtttggagtttagttcacagtaatgtaccaacatcagtttcttagttttgacaaacgttccatagtaatgtaagacatcaaaaatgaggacaagtgggtgagtagtatatgaaaattccctgtacaatttttacttttctatcaacctaaaattactccaaaattaaaagtttatttaaaaagacaacaataacaaaaaaaacacaatcatttagataatctctattatcttttccaaatcgccattttgtgacttaataagggtaacacataataacagtggctaatatttaatgggcacttatcacatgtcaggctctgttctaagggctttatatgtattaactcatttaatcctcacaacaagataagtaattttcttattattattttatggatgaggcaacagaggcctaaaaatactgagcaacaagttgaggtatttttggcaggccagaatgcaaatccaggcagtgtagctccagagctctggcccttaagcactacatacttagagcagagttttccagatgcttctggaattgggcctatctaaccaggaatagccaaaggactaaaggcaaagactgagaggtgagtagtttgtttaatacaaaagaagaggaagcaaaaaggactctcaaggtgaattcttagcttctgaaaatctctactggagaagaaccaaacctcgccgaggttaccaatggcctctccacatgggaatgacatccttggccttgtcctaactgtgttctgccctctctggcatatcatccttgaagagttgcaccaccagcccacatcatgccctctagtcggctacttgctggctgtctgctgacattttcatccctgaagtgtcagttcgggtagagagtgaaatgaaacatgcaggctgtcttttcaaggcctgcaaaataagcttaagctttccacatgaccagttttcctagatactcaagaatccacgctgagaacctagtagtgcattgcccaatcctagaaagcaaaaaccccacctttccaattgataatatacctcatggactgttgtttccactaagtgtcaaaaagaaagcatctcacctccattatgggatccttgaggataagacttggtctcactcatggaacaacaatatgattccataaagaaatggtgctaatctcttggaaagatttgtagctggccaggaccaccacccggcaatctgtgcctccattgcaatcatttgtctttgggaggtttcagagtggacagcatccataggcatagcctgaagggaaaaaggtgaggagagaggaagctatccagatggagaatgagaaaggaagatttacagcattgagggtgtagacaagaaagagataagcttgggtgactaaaaagcaatggcaataaaaagaaaatgaatccagaagcagtcaggatggaagagaaccaatattcatggaatgcctactttgtgtaggcatgaactatgctcactgcaggagtttcctcatactgccaggctcaaaagtacatggaggatcaagcaatccagggtgactgcagcttgtgttgacttagtaaacattcaaattcaacattttctagttaaaaggccctgagagtacacatagcgtaaccctaacgtttcatacacagataaactgagactcagactcagaaaaattcaagcccaaaatggaatgagaaatacaacccaggtttgccagtgttccttttgatacagatatgaaaaacaaggaaggtattgctgagaggctctgaaagaattcactgttacgtgaaatctcccatgatatggcagaccagatttgtagattatcctctacctcatctagcatgttccatctgctggttgctaccagaggggaggaaattggtagcattattttaaatgaagtagatgtctttccaggaagatataaaagggtaccttgccttagatgaagaagatgattcagatgaataagaatgaaaaatgaagacacaggtgattcaccagaataagagaagctggggggaaggtaagttggaggaagtggtagatgacaaggtaaacggaaactagactgactagaatgatgctgttgatgaagaagctgagactccctcggctgggcatggtggctcacacctgtaatctcagcactttgtgagatcgaggcgggcagatcacaaggttggaagtttgagaccagcctggccaacgtggtgaaaccccatctctactaaaaatacaaaaaaattagctgggcatggtgggacacacctgtaatcccagctactcaggaggctgaggcagtggaattgcttgagcctgggaggcggaggttgcagtcagccgaaatcataccactgcactccagcctgggcaatagagcgagactccctctcaaaaaaaaaaaaaaaaaaagaaaagaaaagaaaagaaactgagactccctctcataagagtgattcacaaggcagaggctctgccccaaacaaagcatgagaatgaaaatgtcttacagacgtgaatcaacaatcacttctgcagatgggcagtcacgcagttggaacaaagccgaaggcagaaagttctgcgccaaaaaattcattgcctcttacctctccatattcaggctataataaaaattggtctacattatatcaatgtgttagggagtctccaccaaatcagccatgtcagaatttcactgttattctgttcccgatgatgctctggcaaccctccaggcctctctgcctacacagtctatctcccgctagacccagcgctcctccatgaggaaaggctgtcctggttacataccctccactccagttaaaagactctatgtctaaaatcacccactctatgtgcacaactttcagacaaagtagaattctgaccctgtatcatagttactagggtgaatgtctgagtaccccttctgggctgtgggaggttcgtggccagggtccacggcccacagcagctttccccaaagcatattacatcactgaacccaggaaatgctctggtacaaagggtagtagtggggtgcaggggttctatgatcaaataactttgggaaacaaaccttccgggaggtcagaatgcgcattcgtttattaaagtctcaaaatcccatggtaaagatacacaatactgaaatttccttaattttgtttaacttggacttttccaaacttacttggctacaggacccttttcttaataaaacagccttaacactttgggaaatactgtcttacagaatcacagcattctaaaggaccttcatgttcctacagctgaactttgcagctttcacactggtctgtgtcctctttaagagcaggggccttgtctgaatcaaggtgtatccaaacactcagctaagtgccttacacactgcaagccaataatacgtgttacacggataaactaaacccaatcctctcatttctaggatgagaaaataaaaccaaatatgtcagaatgacctcttttatagcttccttagggtttaaaagaagcctctcacagagaatgtgctcaataccttttgaaaaacgaaatgttaatagaataggattgaagaaaaaagaaaagattgaaaaagtttctcagttatactacgagcccaaagtttctataacatgatggactgctgcctcttctcctctttcacccaagtgaagtcttaagtagaagaaaataaaaatgatgaatcaaaaaaggaaaactgtaggaaaaccaaaggccccttgggatgggaggtgggggaggtggtgtttgcaaactgatggggataaacaagacttgtctgtatctaatttagacttaataagatagtttgctgaatgttaattaaatactcagtggttgttaccaactgtggtgattaacttaattttgaattaaataagcaataaatgcttaactgaagttctattaaattttacccagcaagtgagaaatatgaggctcttaattgactttaaacaagatagttatggcaagttagttgaatttttattacctgaagataactgccttattaaatctaaattgtctattttatttgatagggaaatatgtcatcagttcttctcatttaccaaaaacatgtcaaaagaggttcacaactggtctgaaatgcttggcttgggatttacttcctgatcttattttaatattaagtttattcatttaagaatgaatttagacttaagcattagagaggtctaggaaggaattatatttacaactgaagaaccaggtgaccatgttttctaaaccaaaaatcaggactctgatttttcaacgtagacacagtttagagatgttctttaacatcacaatactgaaatttccaggatgtcgccatggtttaaaaggctatggacacaaaacatttaaaatcattactgttcaaataaatggttggctctgctactgaacaagctgtacggccctgggtaattaacctcacttttctagacttcaactatcacacatgttaaatgaagaggttggaagtcactgttttcattcatttatttttttcttcatagtatgtgcagcacgtgcctggcacggagtaggtagctcaataaagactgagagaatgaatgaatgcacaaataaataaatttaagcagctcaaaacattaaacatttttagcccttttatatcaagcgtcttcagcccagactatttctaaatattgtcatatgacaatccatataaagagaaacacaaacaataaaccactacttgggaaatttttttagtaatcaaagaaattcaaattaaaacaataataagatatttcttacatattaatttagcaaagacaaatgcaagttataaaattaaatcctggtaagtgcacagagaaacaagtagattcacatactgctaatgactgtgcaagtcaatagtctttctggaggctgactggcaactgatctgaaaagtcatagaaatagttgggacttttgtgctataattcttctctgaaagaacttaaaacatatttagccagtcagcaaacactgggtctaccataggtcataatttggagaaataaaaggaaaaatacagtgagtgcattattagctaatgggttgacagagaatcctaaaaaaaaaaaaaaacaacacacacacaaagataacatttttcagtggcactgcatggcaggcctttgttttgttttgttttgttttgttttgttttgttttgtggtggtggagtcttgctccgttgcccaggctagagtacagtggtggcacaatctcagctcactgcaacctctgcctcctgggttcaagcaattctactgcctcagcttcccaagtagctgggactaaaggcacatgccaccatgcccagctaatttttgtatttttagtagagacagcattttgctttgttggctaggttggtctcgagctcctgacctcaggtgacctgcccgcctcggcctcccaaagtgctaggattacaggcctgagccaccgtgcccggccaacatggcaggctttgaggctttactacactgaccatagaataccttccacaatcatgttatgtgaaagatactattacactcttttagagatgaggaattggaagttcagagaggctaagtaaccagtacacgattatatggctaacaattagcagagctataatttaaatccaaaccttctaactctccaaaccatccatgtagtttctactacatccctcagcgataaccacgtaatgcaagacacaaaaactgtaacctctataaggaaaagtcaaagtgccaagaaggtactcaattaggtggtggtggtttttttaatttcttaagctattcttaaaactcaagtcatcatttattacttcatatatattattcattcattcattcattcatatgttcattcaataaacatttattaaattatttataacatcccaggatttgcagcagatgctgtggatatgaatatgaacaaaagctagagccggactcagagatctgcacaggcagggaacaggaagaatctggcattgcgataatagaaaacttaagtcctggttcaatgtttaacttgcttgggttctgggcaaatcatttaacctttcccaggttcaagcttctgattaaacttggacaataataataaccatccgcaggactactggtatgatttacctgtaatttgtaggaaaacacatgtttccataaagccctataagaaatggcaacagcaagataagtattatgctatgtggatggtccattttgaccaggatcctgcaagctgagccagctaccaatatctcccacatgagtgagcattaatttattggcaacgaaatggttgttccatcactactctgaatgaactacaggccaccattcttagagctcaatcatccatttttaactctctctgccttttgtctaaaataatcctgaggagccaaatggataaagcattcccag

SEQ ID NO: 2335 - DNA, 1666 bp, Homo sapiens
agaagcccgaggaggcggagcatggaactcgacagttaaaacatttaagagagaaaacctagtgtcttgctggcctgaaatcgagtacgcagcccggggtgatcagggtctcccggcccggatgtgtgagacttgcttcccctgggcaataggcgatacgatgctttaggaggaaggtatctctccctcctaagccccggaggggagaacttccaaagacagaaaaccacagggttcctggcacagagctttccctttatcagctaaagcagaatcttttctggccttaacctggccccttcctctaactgtaggcagagaggcagacagaaaagcacttgctgaaacacaaagttttgttctgtcctcaacgaactgtctagagttgattgctgatagtcgtggtgcattatgccttcctggttttcatttaattgggcaccacgctgcctttcaagacgccttaaaggaaccaacaaccaaatccaagagagctggacagaccattgaacacacagtaggctgtgtctcgtggctttcgttgtctggtgcctcaaagaaaacaccagaaagattgtttctaagctagagccaccccagattgcttaaagtgcaaagctcactgctgttgggggtacccttgtgagacactggaaagctggttttaccgtggccctatgaagaggaagactgaaatttagacagtaatacctttactaggattggaaaagatttggttaatgacagccctgttatttctaaaacccattatcactgtatgagagattcctttgcgctgcatcctcgacagtgcttcctaaggctctgccgacttccagttctggaacaagatggttaaactcatttttccctgctctgctcctctaaatacaactaagtaccttggaaactattcagcagacaatgataaagggctctgaaagctagaagaaaaggtgtacttgcaagaaacctcaggacttgagtaacagcaacatgtttgactttgaaggatcactttcccctgtcattgcgcccaaaaaagccttccgagactggatctgatgatgactgggaatatttactaaattcagactaccaccagagtgttgagtctcatcttttgaacagatctttatgtctgagtccttcagaagcttcacagatgaaggatgaggatttttcacagaatctcagtctggattcttctacacttctctttactcacatacctgcaatttttttcgttcttcgccttgtgtatgaggagcttaagttgaatactctaatgggagaaggaatttgttcactcttgaacttctcgttcagttggcaaggtcaaacaggatttatgcatcatccatcattttttacgtctgagccaccaagtatttatcagtgggtgagttcttgtctgaagggcgaaggaatgccgccttatccttacctccctggaatctgtgaaagaagcagacttgtagtcttgagtattgcactgtacatacttggtgatgagagctcagtttctgatgaatcctcacagtatttaaccagaataactgtagccccccagaagttgcaagcagaacaagaggaaaacaggtttagtttcaggcattctacgtctgtttctagtctagctgaaagattggttggctggatgact

SEQ ID NO: 2336 - DNA, 2157 bp, Homo sapiens
agtccatgggatgtcttgatgcaggtcatcatctcacccttgttcattattggatggagaaaccagggtcccagagacactggccggctggggcaagatcaccactcattcctatcaacagctgggttaaaggtgcagaagacatgcttattcgatttgcaggtgacccaaaactagatgcagtggctggtattttaaatgaccaaacaagagcccaaaatcccctaaagcggatgagatgatggactaacccctctacggatggatgtaaaattaaaattttttgcatgaaagagattttggctgaaggttcattgcacattgagatggttgccccaaatgattgtggtctcaggctgagtctgtagaggtacaggttgacgatgagggaggtgatagctggagggttgtgctcaactctggttgtcgtacatttgaggagacagggagagaccagagtccagtttgtggagggtaaaggttagtgaggaactggggatactgatcttgcagaagagaagactcaaaagggcagaggcaggaacagtggtataaccctgcctggctccaagggcagaactggcacccatggagataacaggggcctgagaaccagctctgtggctatcagaactttcccacagtgaatcagagtgccttcagaggtggtgagctccccatcaccaatggtatgcaagcagagtgaggaaaggattcctgtttccagctctcagatggttttatcaacagcaaaaaaactagaccctactgataaaaatttctgttggctatatatacacatatagttaacaaatatgtaatccatatttcccctattttaaggtttattttattttatttttgagacagggtctcactctgtcacgcaggctaaagtgtagtgcaggatcttggctcacagcagcctctacctcccggtttaagccattctcccacctcagcctcctgagtagctgggactacaggctcctgccactacacacctggctaatttttgtattttttgtagagacgaagtttcgccatgttgcccaggctgatctcaagctcttgggctcaagcaatccacctgccttggcctcccgaagtgctgggattacagggtgagaacctacttcttcataaagagaatttggagggagctttttgttctgcggggacaacatctggatttgaatacatccatgctcaaaaggagatttctcataatggacccaactgaaagcactcagagtacaaggaccggtgagctttcaaaaggagacacttcgggagactcgccaggggccctcgtatccccggcagcgcgagttttggaggtcagtggagggctctcgcatcatgcatgtaactttcatactcaaaaacttaccttcatcctgcatccctcacccccctgcagaaacttggggcttgaattcatttaaaaacatttgcggtttcagaagccttctttttattatgaagctgccaaggagatcttagaatgaaaggcatttttagagatgagaaagaaggaagccaggccaaggctgggccggctctcagccgtgggtctgtaaaggtgacacgtgggacatggccacctgcagaccctgcaggcggctgggcagaggcacccacagggacctgggtttgaatccctgctctgccagtcatttccacagcgatcttgggggaagttgtgtaacctctgggccctgcgacgccctttcctggagcctggagctggaacgaagccccttggagccctgacatcagaggtgacgttagtcttcgcaggcaatgactcggcggaatgtgatgccactccctaacccgtgtccggactggcagagtgtgtgccgcctcccaccaggtggtctggctgctttgatggatctcctaacttctctgcaccccagagccctcagtgctggccagaccttcactcactcctgggtgacaaccccgttctcagatagtgggtcccacaggctggcctgtggcgccccctgctggtgactgcagggagaaggatgccctaagccaaaggaagtccttcctggggtctaatctctaccttttgcatgatgaggcagctgaggtggctcgctttctcctccaccccagaaaataaagtcatatggagtccaa

SEQ ID NO: 2337 - DNA, 2884 bp, Homo sapiens
tggaaatcagcccatatccattaagttcattatttctgctttaattagccagagtttatttttttgcttacagttaagacctgacttatgataattatgataatataatttcaatgatgacaatggtgatgataagaactgtgttgtaggaagcaaaacaatcactcagtttgtaatgtggaaaatagataagagaggagtgagatgggaaactgagataagtgtgagactaattatattacaaatgatgtatggtggcaagagatggcatggctgatggttagtatctaactgtgtagatggacagaaaggaatagattcaagagagacattggaggtgagatgaacttgagttttttcagctgttggaccattcacagtacagaaactttgagagttgttggccttaggtgctaatgttctttgttcaaccagagatatttgggctgcagagagtacagctcagcttcacatcatttaaactgagtcaaagaacaactaggcgtcatgttcagattgggttccctcaactgggtagaaagactcagccgtttccatttttgtctttgcaagaaggtgagatttctcctggactcccatatgctgatgacatccaatattttgcaaatgctaaatatgcaagaaaggtgctcatgaatagataatgaacactgctcatcatgattttctgtggagctttctcgttgtcccaactgctgtttttaaggccagcctaatgagcctcttgtgaccacaggaggaacatggttcagagagggtcttatttaaacggttcatccatgcaggaggggcaatgcattttcccaagtctcatggaagggtttcacagcttagagctcagcctcagagtggactagcacacagctgtttcggagactggaggatagcctgctgggatagaggtttccctggaagatacagagctggtaaggctatcaaggtaaattgggcacaaatggtggagtccatggagttcagaaaggttttcaggcaacagggagattttggagttttttgttgtgtttgttttgttttggaacagagaagtaacagaatcagatctgtgctccttgataaaatgtaaagaatgaatttgaagaccagagattgaaggatagaaggcaagttaggagatccaggtaaggagtacagaaggccagaaagcagggcagtagaaatggaaaggaggagacagagtttgaaaatgtgttggagtggaatatgtaggatttagtgagggataggatggagatagagaaacccagaggctttaggtctgggtaactagaacagtgaggccagcagtcaagatagggaggcatcaaaaacacagaacattcccagagtctgagacaatggatttggttttagataaaataggtagtgctgattttaaagatgataggctttgggggagaataatctgaatctcctgtaaagcagacactgactggtcagacttataaacttttgacccaggcagaggtatatgaaatttataataaataaatgaagctgactggaattgagggccactagatttagagaacatgacccatgtgaaggccacttagctcctctgagttgctgatgcgccagaatgggggccagtattgccaaatcatccgattcctaaagacaggccagaaatcagaatgttacctgaagtctcctgattcttaaatgttggcaaccaattctttctttgctgaaacttgaagtgagccaatcccaggcaattctgcagagcatcccatctgatcccacacatttgagaatggatggactaacctgaagtattacagagcagcagtgcagaagtggggacacaagtaaaggaggatcaccaaggaagtgtttttgagcaactgcaacattgctggcccatgctagatgctgtgggagatataagctatggctgctgctctcaagaagctgacagcatcgctgcatcagagaaaaaggcagcacactgtgtgattatgggtggtaagtctcaagaaagggagaaatcagcatgcaacagacaagtgaagagaggcaatataaaagctctgggtcttaaatagctttaaagaggaggcagaaggtgcacaaagaactagagattttcctccaaattcaatttccaagtcaatagctgcagttcaacaggttttgtgatttctgcaggaagataggcatgaggtttccgagagcaggtggaaatgagtaaattataggtagaacctgctttcacactaatgatcactaacagaaaagtttgtgctatttattttattttttaaacagttttctctgttccaattgctaggcccttggcatctaacttaagaattatcaataaataataaaaatcctgacagtttatattcggagatgacacatctctgtaaaatagtgagataatccccaaagctggagcatcttattcaaggttggtttatttagggttgcccatggagtgggaaaagaggttaagagaacactgaaattctcaggataggggagggtagtacaaaagagaggatttgtcatgttgtttataactaggctttggggatgcagcagaaagtcaaacagagttttgcttgataatatactctatttgcttcttgatttcttgtctttcttctttttttcttttctattttttccccaaatctctgatgttaacagtgaggagtgatttatttgttgggggataaagaaaatagtgtctctgtcctgagtttgtatctatcattgtatttaaatgaactttttttctgataggcagaatcaatttgtgaaccacatttgatcccctcagtccaattattgcagaagctgcttcctggctcaggtggtgcatgatttgtcc

SEQ ID NO: 2338 - DNA, 8150 bp, Homo sapiens
agtcaagtatgactgccacagagaaatggtcccatccaggaaatcagatattgagtcctacctgagtttccagcaagaaggtacggacttgctgttaggatgggaattatggatcaggaattgccctgagatggggtcctggtaacagatagactctaggataggattccctcctggggattgcggcagagtgtacttgcaagtggagccttgaaggtgtctttgctcagttcaaaagccacagaagaagttctggacgatgtgggccttcaatcttctaagatgggaatagaaagaagaggatctacccagaccaggaccctgctgcccaatctcagctctggctttctggatctgtgcttctctggtagaggaaccctgaggactgatctactcttgcagttctaaaaccatggcccatgcctcgctattccctgggacacaacaatattgaacgtaggctagttaatagccctacaatctcctctaagtgttcgagtgaaaggaagagtcacatgtgtctcactttaaaccaaaagctagaaatgattaaacttagtgaggaaagcatgttgaaagtccagacaggctggaagcgaggtctcctgtgccaaacagcaggccaagttgcacatgcaaaggaaatgttctcgaagcaaattaaaagtattactccagtgaacacacaatgacaagaaagcgaaacagttttattgctgatgtggagaaagttttagtggtctggatagaagatcaaaccagccacaacgttctgttaagcctaaacctaatccagagcaaggccctaatgctcttcaattctatggaggctgagagttgaggaagctgtggaagaaaagtttgaagctagcagagaataattcatgaggttgaaagaaagaagctgtctccagaacataaaagtgcaaggtgaagcagcaagtgctgatggagaacctccagcatgtgatccagaagacctagctgaaataactgatgagggtgactgcattaaataacaaattttcattgtagacaaaacagccttctattcaaagaagatgccatctaggactttcatggctagagaggagtcaatggccggcttcaaagcttcaaaggaaatgccatgtctcctgttaggggctaatgcacctagtaactttaagtcaaagctcatgtgtatttaccgtaatgaaagtcctaggatcctaaagaagggtgctaaatctactctgcttgtgctctataagtagaagaacaaagcctagatgacagcacatctctttatagcatagttcactgaagattttaagcccaatattgagacccactgccaagaaagatagatcattttcaaaatattactgctcactgacaatgtgcctcatcacccaagagatgtgatggagatgtataaggagattaatgtggttttcatgcctattaacacaacatccattcttcagccaatgaatcaaggattaattttgactttcaagtcttatttaagaaacacattttgtatggcaatagctgccatagatagcagttcttctcatggatctagggaaagtaaactgaaaaccttgtggaaaagattcagcattctagatgcaattaagaatacctgtgattcatgggaagaagtcaggtatcaacatgaacagaagtttggaagaagttaattccaaccctcacggatgactttcagaggttcaagacttcagtggaggaagtaactgctgcagttacttgtggtggaaataacaagagaaatagaattagaagtggagcttgatgatgtgactgaattgctgcaacctcatgatcaaacttgaatggattaagaatctactcctggtgaagatgctttgaacattgctgaaaggacaaggatattaaaatattacattaatttagttgatacagcagtggcagggtttgagaagattgactctagttttgaaagaagttctatttgagtaaaatgctatcaaacagcaccacatgctacagagacatctttcatgaaagggagagtgaactgatgcagcaaacttctttgtcttattttaataaaatgttatacccacctcaacctttagcacccaccagtcagcagctatcaatatcaaggcaagaccattcaccaacaacaaaaaaaatgacaactcgctgaaggctcagatgatcattagcaattttcagcaataaagtgtttttaattaaggtatctgcattgatttttttttaagatgaaattttgctcttgtcacccaggctggagtgcagtgctgcaatctcagctcactgcagcctccgcctcccgggttcaagtgattcttctgcctcagcctccttagtggctgggattacaggtgcctagcaccacgcccagctaatttttatatttttggtagagacggggtttcaccatgttggccaggctggtcttgaactcctgacctcaggtgatatgcccgcctcggcctcccaaagtgctgggattacaagtgtgagccaccacgcccagcctgtgcattgattttttagatataatgctactgcacacttaatagactacagtcgagggtaaatataacttttatatgcactgggaaactaaaaaatccatgtaacttgctttactgcagtattcactttattgcagtggtctggaaccaaacccacaatatctccaaaatatgcctgtagtcagtgggacacatgatgcttctttggttgggagatttgtggacatgagtcttgaggaatcttgagaaattgaagaaatgatggaaagacaggctagtcagtggtcagaaggaaaggggtaggtgctgggtaaaagagcaaattgaaacaaagaacaaagagggaggaagagaatttatttatttttatttttatttttttgagactgagtctcactctgttgcccaggttagagtgcagtggcaccatctcagcttgccgcaacatccgcctcccgggttcaagcgattcttgggcctcagcctcccaagtagctgggactacaggcatgcaccaccacacccggctaatttttgtatttttaataaagacagggtttcactatgttggccaggctggtctcgaactcctgacctcgggtgacctgcccgccttggcctcccaaagtgctgggattacaggcatgagccactgtgcctggaaggaatagaatttaaaaagcatttttgaaatgggaagaaacagattttggaggataggagatggaaggaaccagaagaggagaaggtcaccatccaacttactgcattttctggagagtttcgtgtttcttcagcaggtgtaccagcctggtcttggtttggatgcctgtgactcttaccataaggtataaggccttagcctgcacattctcatcactgtccatcaatcccatagccagtggaatagcaaaatgatggttcatgaggcctagcctatccagcgcctcccagggtagttcacggatacgtggattggaatggattgtgtcttgtaggaggcgatgggcagtcttagaaaccaactctgaagatatctggcaagtggcaaaaatacgtttaagtaccctaaaatatctcttgtattcctctacagagcagtaaattgtgaggttgaggatggcctctattaaatcatccataagccttccactatattttcttctcatccaattttggtttgccatgctttcaagaatatcaagggaagttccttttcgcaccttggatttatccttttgttgactccttgaaattttctcttctactagagtcatagatgacaagtcccagtccttaacttggtaggatgaatacagatcacagcataggaagactggggtaccctcaggccaagggcgagcacggatcactgagttggggatggccatcaggagcaaagggccattgccgcccttgaccaaagaagcactgtggcatttggtaggcattgaatccatcccagccagccagctgcaacggagcaggaacctcatgtcggggacgattatacttggaatcaagagtagagaaatcaatatccttatcctccaaaagaggaaatttggtcttttgaatcacaagggacatgcttctctcttcttctacaacatgaggcacagtattgtcaaaagcaatgaaccgtttgttgacaagggtctctagcccctgtaattcctgccgcccttttccaaggtagacaaatctgggtacaaatactgtttcaaacataaagaagaagctaggaaggaagggtttagggacttcttgtatttcatctgcattttttaggatacgcaggtgaaccagctgagctggagggagcagctttaagcaagatactatgtagatacgctggttgaaagtcaacaacaggtcacttcgattactggcaaagcagagtggtccaaaatgcagggctgagtcgaactcggttacaagtctaccgtggaagtcccagatccggactgagccatcaatgccacctgtgacaaaaagtttcaggggaaggcagacatcaaatgaagtgatgtcacactcatgcaggcattttgtctctctccacacaaagctctgttttgattctgaagatgtcagaaagccttcatagtgccagagacaccagcagtagctttcagtgatggcacccacagaacctggcaagagtatcacacgttttagggggcagccacagaggattttgctgacaggctgaaggactaccttgttcacctgaagcacggcctctgtcaagtgtatgatgttatccgtgccataggaacagagcaaggcgtttccctgagggccttccagggtagacaatgccaatactgccccagagtgaacagtcttctctattcgggcacaactatagtgggaaagggttctcacaatgccactctcatgcccacagaacatcaatcctcctaggcctttttgcagatgggacctcccataggccaagcatcttactgtatccttacggtctgctgaagtgcacacaagatacttggctgtacaaggagagcgtgttgcatcaaacaccagcacctctgaactgcctattgccacaaagagttcctctctctctgagtcataggcccaagccaaagccttatccataacaagtagaggccaagtgataaccaggagatcccctgttactggagacaagaagcgcaataaaccatcctcagtggcacatagaatccgagtccagttatggccgcagcagacccgctgcacttgctggggagcagaaccacagacattgaagaggctataaaagtagggcaggtgatgcaatgaaaaactgtaggtggtctggcagaaaaaagtggtattatcaataaactgcagtctctgaagatcctcgtcaatattcagctgccgcagcaagttcccataagtgagattccattccctcactatgccttcactgcctgctgttagtaaggtgtggatctctggccggctatggatacatatcactgatgaggaatgggcttgaaagctgtggaggaagttaccttggtctaaaccccaagcgtggatctctccagccctgtttccagcatagaaattgccctgagagacacaagtaaaggagcaagtgatggaagagccactggcgacaggagtgaacttcacttcttccagctggccctgaccccggtgaatgaagaccctcactgtatcctcacacagagccaacagggatccctgggggccattcagggaaaatccctgtacaagctcatgatcagccataggtactatttgagccatctcgatgcccatgccatttggtaagataaaccaggtaaccacagcccccagggtaccagagagcagcaactcagcttctggatcatagaagaggcagctggtggagaaatgacagggcactgtacccagaaatctgaacgttcgacggtgatctccaaaaagcctcaggcgcatgtcaccacagtaagcaattaacatgtggtaggaacctgtgtggaccattgcttgaatgggcggccactgatccatcatgcgaagcctcatcttctctaccattcctttcatttctgtaccctttttttgtatccaaagtactgcctagaagaggatgagagatgaaagcctgactgtggaggtggatcattttccaaagtgtggggtagggaaggctgaatattcagatccctgttccctctggtgtgactaaggaaagactagacagcttgactttaggaatctcctagtacagcagctcccacttacccatggtttccctttctgtggtttcaactacctgtgtggtcaactgcagtccaaaaatatcaaaagaaaaattccagaaataaacaattcataagttttaaatggcatgctgttctgagtagcaggatgaaatctcaggcagtcccattccatcctgcctgggacttgaattatccctctgtccagcctatctacactacataccctatctgcctgttacgtcacttagtagccattgcagttatcagattaactgtcgcagtatcgctgtgcatgtgttcaagaaaccctcattttatttcataatggtcccaaagcacaagaatagtaatactggcaattcagatatgccacagagatgccacaaaatgcttcctttaagtgaaaaggtgaaggttcttgacttaataaggaaagcaattgtatgctgaggttgctaccatctatagtaagaatgaatcttcttggccgggtgcagtggctcacgcctgtaatcccagcactttgggaggccaaggcgggcggatcacgaggtcaggagttcgagaccagcctgaataacatggtgaaaccctgtctctactaaaaatacaaaaattaatcgggcatggtggtgcgtgcctgtaatcccagctactcaggaggctgaggcaggagaatcactggaacctgggaggcggaggttgcagtgagccaagatcgtgccactgcactccagcctgggcagcagagtgagactctgtctcaaaaataaaaaaaaaaaaaagaatgaatcttctgtgaaattgtgaaggaggaaagacaaattcatgctagttttgctgttgcacctcaagtgcacgcattatggacatagtgcatgatagcacttagttatgagggaaaaagcacaaaatttgtaggtgagccacatgaacacaaacatgttccaattgatggcagtcaggtttggtactatctgcaatttccgatgtccactgggggcttggaatgtatcccccatgaattcgtggggactattatactaggaattgggtatgtgatagaagcaccatgttcaaggcccttttcttggccttcagtctacttgatggagaatatgaattctgagggcctgataacatgaggtgaagaaggatcactgcatccagtcaaactgggatatggagatgggtactaaaatgagctaattcacagtcactaccatcattctaaaatgagggcagttcaggtgtgatgcatgtaaattgaattaagaaggagagggggaaaaacgaggtggctttacctgcatttttccacagggttccatccagtttaaggagacaaaacagttgaccttgatggagtagtagaagcagacaaaaggcttgttctgtggatggtgagactcccggtatagagtctcaggccagtcactcagtagaaccacatcattctttggttcttcatcattctgagagagaagaatgacctgagttaagagttctgagtccccactcattcactcatttcagaaatatttactggccaggtgtggtggcttgcacctgtaatctcaacactttgggaggccaaggcaagcagatagcttgagcctaggagtttgagaccaatctgggcaacacagcaaagccccatctctacaaaaaatacaaaaattagctgggcatggtggtgcatgactgtagtcccagctactcggaaggctaagtaagacaggaggatcgcttgagcccaggaggtcaggccacagtgagccatgactgtagcactgcacgccagcatgggtgacacagcgagaccctgtctcaataagtttaataaataaataaatattta

SEQ ID NO: 2339 - DNA, 10833 bp, Homo sapiens
gcctgggccctgcggctcatgttctgtcggctgcctgtgacgaggtgctcaggaattccactctcctattggcaaccccttctccctatctctagaactctcattctccccaagccaccttcaactcatggctaaatccacccatcaggcacccgtgctgtccatacacttgagaggctgagctctgctgtggagagaggccccgctcctaggacacgcagctgggcctcacaagggaactgtgtatgtacaaaggccgacttctgacagccaacctgatgtgccaagggctcagggttcagcagtgctgcctctgaatccctggtgagtaaactgagacacagatctgagaaaggatgcattcctctttgagctgctggggaggagaaagggttaaggtgaggtagctcggagctgacagcccctttacagaccctaatggtccacagtcctgttttgcaggcattatctgaggtcccccagccagctgagcgcctctgttcaggtggagaggccggaggaagccagggaggggagaaggaactcccagcgtagcttcccttgctttccctctgactcaagagctcgctccaggggaggtcagtgtgcgggtcccaggggatcaagtgaatggttggcagaggagaggagggtacagagtgccaaaggatgattcccgtcaccccccgcaaccgtcctcagaaacctgagcctgttgctctccaggataaatcggggcctgactcaggccccagcagccagtgacactcagcctgacccaggcgcgggctggtgactcagccctcaatatagcccatgagcccaggccctgggcctggccagccaggctggaacagaccgtgcacaatgctgggcccggcctgccaagtagggccccctccccgaggagcgctgacatgctcctccccaagccaggcaggggcacacagggggttacaaggggtttcatcagctgagtatctgggcagtgctggctggggccacaggctgtttatagccccctgactcaccacctgctgacctatctcaggagaccaggttgcctggctcttcacctggtcctgcctctgccgtcaaggggctctgctcatcagccaccaatactggccatatttatcttgggctgagctgaatccaagtgagcggatacaatgagccatgtttgaaaatcctgtttttctggaaccagggacatttccacagtcacctgtgatgatactgggctggccaggtcataacaggcactttcagtgatactgatactgactgtggctctgacccaggttccagggacagtgtggtagagtggaatgatccatgggctgaattccagcctctctacttctagctctgcaaccttgggcaagtaatgtagctcttttgggcctgttttctcgtctttttttttttttaatgtgtgaaaatggaaggaaatcacaagaaagatgattagcatggtgcctggcatctaataggtgatccaaaacaattagtttgcttcctctgattatcttggagactaaggggttctggtgagagaggccttcccctgcagctctgtgtccacacctccgtggggaccactgcctggatctccaggctgttcccctctccccttccctgcaacccaacattccctctgccacaatcagaaccggcagtacctgtcatctttagaaccacccaccctgccccaaaagcagctggtccttgacaggagtggcagcgggtggctgctctacctcttggcctgggaagggaaaccagacagggctaggctgcagggagctcacagaaaggaggcagttatgcagagggcagcagcggggagagatggaggctcctgaaggtgctttgagtccctggttctagcacacctaggcccaagtgcacgcctgcctgtggcttccaaggcatacccctccagacttaagatcaatccctcctgtcttttttttttttggtataaatttagagggtgcaagtgcagttttgatacatggatatattgcttagtgtgaagtctgggcttctagtgtaacatcacccaaataatgtacattgtacccattaagtaatttctcatccctcccctcgccccatgccccgaccgcccccctacccctcgccgctccaaagtctccaatgtccatcagttcacattctatgtccctgtgtgcacattatacacattctttaactccacattttttttttaaagacggagtcttgctctgtcacccaggctggagtgcagtggcacaatcttggctcactgcaacctccacctcctaggttcaagcgattctcctgcctcagcctcccgagtagctaggattacaggcacctgccaccacgcccagctaatttttgtatttttagtagagacggggtttcctcatgttgaccaggcttgtcttgaactcctgaccttgtgatccacccaccttggcctctcaaagtgctgggattacaggcgtgaaccactgcgcccggctttaactccacttataaatgagaatatcctactgccttttttttaagctagctcaagtgaatgtttcacattcaacaaaaaagattcctcttaaaaaaaaaaagattcctctttaatacgcctgggtaacagtgtatcattaagacaaggagacagtccaaaccaaatgaagagaatgggattctaaaatgaacggagggccgggtgcagtggctcacacctgtaatcccagcactttgggaggccgaggcgggcgattcacttgagctcaggagtttggagcagcctgggcaacatggcaaaaccccatttctgcaaaaaatacaaaaattagctgtgcgcggtggtgagcacctgtagtcccagctactctggaaactgaggtgggaggatggcttgagcctggaaggtggaggttgcagtgagccgaaattgcacgagtgcactccagcctgggcaacaaagccagaccctgtctcaatcaatcaatcaattaatcaatgaaatgaacagagaaggacatgtcctaaagggaggggttttgtagtctaagcaaaaaagtgggaaaagcaggcccacattcctgtcattaggcagggtctaggttcaggtcccctagctggggaccaccctactagaacctgacctctatcctggcttgtaattccaggttaaatcagtgatctttgctgtcttagtccatttgggctgctgtaacaaaacactatagaccgggtggcttataaacaacaagaatttatgtcttacaattctggaggctaggaagtctgagatcaagatgcctgcagattccatgtctggcgaggggcctactccctcacagatggctgtagtttgttttgttttgttttgttttgttttctttttgagatggagtttcactcttgttgcccaggctagagtgcaatggcatgatctcggctcaccacaacctctgcctcccaggttcaagcgattctcctgcctcagtctcccgagtagctgggattacaggcatgtgccaccacgcccggctaattttttgtatttttagtagagatggggtttctccatgttggtcaggctggtctcgaactcctgacctcaggtgatccgcccgcctcggcctcccaaagtgctggcattacaggcatgagccactgcgcccggcctggctgtagtcttactataaacttacgtggcagaaagggtgagggatctctctgaagtctctttaataagggctctgatcccactcctgaggcctttggtctcatgacctaatcacctcccaaagcccccctcctaatattatcactttaggggttagggtttcaacatatgaatttgcaggatagggggcagacacaaacatgcttaccatagcatttggctataagtcctttccaccacccatacccatgttcttcagtcaactggtggcggcagtaaagtgggtaaatagcagtctcactatactgaaaagcaagcagccagtggcaccaggtcagttgtgaaataatttctttaggttacaactgagaacatacaatctaatataattgactagggtggtgcttctcaaatgttaccgtgcatacgaatcaactgggcatcttgttggaaatgcagattctgcatcagtaggtctgggttggggcctgagatctgcctttcaaataagctcccgggcaatgctgatgctgcagatctgtgggtcacatggactagcaagaagctagaccagcctaggtcagaactgtcttcaaagaggagtcacttagagctggggtgcacaatccccaggccatggaccgatactgtcaggaacttggccacacagcattaggtgagtggtggctaggcaagcattaccacctgagctctgcctcttgtcagatcagtggcagcattagattctcataaggagcaggaaccctattgtgaactgcgcatgtgagggatctaggttgcacactccttacgagaatctagctaatgcctgatgctctgaggtgggacagtttcatcccgaaaccatccccatcccctctccatctgtggaaaaattgtcttccatgaaaccggtccccggtgccaaaaaggttggggaccgctgatttagacaaaggcaaaagaggcatatggcactgtcctcagtttgcctagttgcagtcacgtttctaggaggctagtcacaatttcagcactagccccatgtctgccaaaatggacttttgattcagccgtgtcacttctctgggctgaatacaacttgaaaatatcctaattctaaatgtccttgctactccctgtaggtaagagctagagaaggaaagaattcatttagcttggcagtgctaccacagtatacactctgtacatgtgtttctttggatgtttgattgaatggaacaaagtccttttgggtgggagggaggaagaaagaggggtccaaagaaagccaggagtcatggggtcattgtttccactatggtttaagaatatgcttggggctgggcaatatgcctcatgcctgtaatcccagcactttgggcaggctgaggcaggaggattgcttgagcccaggaatttgagaccagcctgggcaaaatggtgaaactctgtctctacagaaaatataaaaattagctgggcatggtggtgtatgcctgtggtcccagctacttgggaggctgaagtgggaggcacttgagctcaggaggtggaggttgcagtgagccaagatggtgccactgcactccagcctgggtgacagagtgagaccctgtctcaaaaaaaaaaaaagaaaaagaaaaaaagaaagaaataaaaagaatacgcttggggtcttctttcgtaaggaaacattcatgatgataaactccaatcacaaaggttccacaggaatgaaggtaaacaggaacacacataaactatcctcatcattctacttgtcccaattagatccatcttcaggcctctgtcctgctctaagctccaggaggctgagcttgaaagattacatcacctgggcacctctgcgctttgtcttcccattgagttcagctgataaggtaccagtagaatactggcaggtgggaggagaaggtaggggaatatatatcccacttcctcacggctctggcgggggctgcaccccatgtggctgccactcctgcctggggcccattttcagagctccagctcttgcttcctttccttcctgcttcagcctgggatgctaacagctttacactgttgctagtgcctggtacttcactattttttgttgcttctcctaactctgcctttggtacatagtctcttcattaaactctcttcatgtaaagctttgagtgtgccacctgtttactgccaggaccctggctgattaaagtcatctctgagggcgaatcccttgagaagtcacaaaggctaagtcacgaaggcacacacgtggatcttcttagggcggccttctcatgtagataggtgtgggcacagaaccttaggggaggtctccccagccctcagtcactccatttctccatgctcaggagagcacctcaggatggggttaataagcacagactaacccctctgtgagtcagtcgacagcacaaggggctagcctcatttctgaggccatctgcaaggtgagaagccgcatttaggagtcagacccttatgtgaggtacttggttaaagggggactgctctgttctggttgtgttgtgaggcatttagcaaataaaaatccacagtctcatgtaattcagttgatatttaattacaaggaactcaggttcttacacaaggcaggagatggaagtcagccgctccccacaagccttttcagcctgggtgactgaggctgaggagatggggacacatggaacatatggggagggttctggcacagtgtgtcctgcccaaagctgagggtggtggccactggggatctgccctcgcgctggccaaggtctgccatcactccatgaggcagaactctgactcctgctgtcgcatgttgggtaacacatacagagccacagctgcaatagccaagaataccataggcttccacaacccaaacatgttctgtggggaccaaagagaaactgtgagtgcccagcctcctgaaccctgccctaagccagaagtcacctgcctatgggtgcccaagacacctcaggaacattgtggatcagtctctgttacctcctgggtaaccggtggaggtaagtgatctctcagtcctggcaccactagacatgtggcccaacactgtacgcaccaccttaggtgaccgcctgtattcaggcctccgtttctccccatgggctgagaatactagctcccatgtgaagaagcaggctcaggggccagacttccaagtggttgcaatgagaaaggactggatgccatggcaagaaagaggaggggaaatctggggctttgagaaaagcagcagcacctcattagtttcactgcagtgaagtgaactcagagtcaagaggatggggaagggggaataaggctgaggggaaatgaagaaagtgcaccacggagtgcaggtaagtaggaggttcttaggcagacaaactttgacagagaatgacattggttcaaggaaatttaaggaaacctgtcactgggcctaggtcattagaacactcctaatcaccaggtatgttgactgacttcctggtgcatgtgctagagtatgctgaggcttccagacactgccggccactagggaaccctgctgattcatgggacaagtggcaccatcgaagatatccaaaaagcatccattaggtaatatgaaaatcttagacaagaaaatacatacttggggaaataggttttatttttattacttttttactctactaactgaaaggtagaatttggattttgagtcataagctatggcataggtaacagaaggatggtttcaagtaaaaatggaatatagcccattaatgctaagaacacattttctcagatgataattgatctaaaaagaggactttaagcctgctaaagagcaaagaaaatctcctgagcttatagaaatagctactaagaacaacagaaggtatgaaatggaaagccaagcaatgttacaggtggatatacagagtaactcatgtaagaaaaccaagagatccggaggctgagggaggaggatcgcttgagaccgggagttcaaagttacagtgagccatgatcatgccgctgcactctagcctcggtgacagagcgagaccctgtctctaaaaccaaaaacaaaaactaagaagggagctagctagaaaaaaatatttatatgctcagatgcctctatcctaatgtgcattgctaagaatgttagtctggtgttcttaaaggagggaggagctgaaatccttaaatgtgacccgtgcacctcacactgggcaaaggcaagcttctacatgggatggggaaagggctggtgtgggtgtcccaaaggggaagtcgtgtcaaactctccttttaaactaggtgacctaagtgacaaatcaccggaatcatgtttttggacgttgagttgtttgacagaattttctatgatctttgcagataatatgcagaaataagggtaggatgacagtacagtttgttgaatggcaggtaagtgaccaatgagctgaataaaagaaccccaagagacgacactctagaggctctgtcctcactctgtcctctgtagatgaagacagggaaggagggcttgccacccctgtagatgatgtgaaggtggcagaggaagtgaatattttaaaaccacagggtcaagattaaaaacacatacacacaaaaccttataaggtaagaacaatgaactataatagggaagaatggaaaattctgcctttgaagcctcaaaatcaaatgcaggtacagaatggggagaggacgcttagcatacacaatctgcagaggggcttataaaaaatacatgaaataaataaataatatattagttacctaaagagctaatgtgatctgaggttgcctaaacacaagtatggtgtcttcctacttgggaccaatgaagagaaactgctcaaaatgaggagagacaataaagggaagcaagactggaatcttatttgttgctaatattgagtccttataatctgactcgcagcttcctggctgttttacttaacttctctatgccttagtttaatcatatataaaaaaaaataggagtagcttcttcatggggttgttgcaaggattaaatcagttaatatacgtaagtgattagaacagtgcctgacacataagactgcattttgtaagtgcgtgctctttttattaatgatggggtattttataatttatagaatactttcatctacttcaacccatctggtcctgacaaaaacctgtgaggagggcagaggttcgatcatcctttgcttacatttgaagaaactagagctcagagtgtgcattttgctccctgggacaacgcctgtcagtagagacagactcaaccaagttcttctgaccgcctggcagccacgctttctaccacactgtgctccctcaggtcctggctgcacaggtgcatgttggggcctcctggagctctggggataacaggccccaccaggagaacccttcaccagcagttcttcctctccctctgattgggccgggctgggtctgaggtagtggaaggctgtggctgaactctttgggtttcacccgtagtgccttaagacttctggggggtgacaggggagaaacagtcatagagaggggccccgtcactaaagcagttgtggaccagggagtaaagggaatacctaaagtcaagaagaaaagtggaggcttgaagatgagtaacaggaaagctggggagggagcaggaggaaggacagaaaaggaaatggagagaagtgccaccaacaaatcctccagttgccaccctgtgcattaagctacattccgttcacaggaatgtgagaagagaggggagtggagggggaggcagggaaagcatgagagaggagccaatgcaggactagagagaataccttatgggttccagaaggcaggtggaaccccaggcttctaccttaggccgtaagaccacattctgcctcctgaatttggtatcctgttgacagtgtacattacatgtgtgggagctgacaggaaagtggccagaatatatcagtcttgatttcctgagaacacacatctctggctagtagaaacttttcactaatacctcattctctccagaaaacctagctggggaagccaattaccatggaatctggcccacaaaatagataaatagataactaataaaatttcccggcattctgttctgacttttccggagactggaagtccagaagcagagaactgttcagtagaaagagcagaatacagtaggggttcggttccatttcaccaagcttgatggaccagcttaggttgccctcctaccaatgcccctgggaggatcatgaggatcagagctcttcagagctcctctctctcccaacagaagagggattccttattttgccatcttgggtagcaacagtagtgagaacttggctccggagttaaaccaagacaaagagagtccaggccagccttgcaaatatcagctcatcagaagtggtcaggctagccatcacacagaggatgagcggggataaagaagtagtgaggcagctttgacagcagcaaccaagctgggcttatccaagtttttcccagccaaggattgaaacaaaccatgtctctggcaagcattccaacctcctatgcattacgaagacatgctcagagatgtcagaggctttgcagtagcccaaggaaaagtcagaactaaaactcagacctgagcatcacctattataaaatggcacaagcaagaagcaagcagctgggagaaaagggaaagaggagaggccagggcaacctgcaccctccctctatccctcagaaggagaggaagcaataccagtacctgcattaggacgacgtctcagcccaccagcaccagagcaaagccgagatgaccaccaggcctacaagaggcaaggagaagatggggggattgggggtaggggatgactgcaacacaccaaaatgagaaagaagcacgaggagagaccaggagatgtgagacataaacgcatggatccaacagataatgaagatgagaaaacaaagggaaaagagaaaggaatcaagaggttaaaaaacaggccccaccttcatgtcctgtgatatacagaatccag

SEQ ID NO: 2340 - DNA, 2086 bp, Homo sapiens
gtttgacatgagaacctgcatttaaaaccacagattgggctctgcttgctggaccccagtggttggactgagtcccatgaagccagatcacttctgactgcaaggagcttggaaaagcaagtatctggatcttttaccagctaaatttggagaattattgatcaaatttggatctctgtgtgctgtcctccaatttaatactttctgtgttgctgttttattttctttcttctggaacctggcaaagtgcgtcaagcgatgaggcttcctctttgaagatcacaggtgagaagattaggtgctttctcagaagcccagcaacctgatgggagtgtggagtgagcaagacccaaatcggagcttcatccctgcatggttcattttgcttatttggcaaacttgccctgcagaatctactcaagcttcctcagtttctcaaatcattcttgggcaacaaatgaacaagaaagaggacgtcttattatctggtgtctggcttgctgatttaataacctaggagacagtgtttgaagaacacaaactctaaagtccttcacttaaaaaaaaaaaaaaactttcccaaattgcttaccatttggaaaaattgccttaccttcttcagtcatctctgatgttgtcatcctcagagtaagaagtacgcattcataaggaaccataacgtccttcaggaaatccagtacaccctacaattttacctaaaactttgatgttgttttttctgagcattttaccttctagggaaatggatctcatgctgtttatcagtttctgaaagttgttattaatctcccctcatcccaaaattgaagaactttgcttaaatcttagaatcagaactttggctccagtaataaagacttttcaatatctttatctgccattgagtcttacctaacgaaataaagcctccaaagtgggaatttgaaatgttttagaatctttttttttccttttgacatagtgattggtgggatgctacaggcagttagtggttagggtccagaaatgccagacatcttgcagtgagagggatagtctgtacaaggaagaattctcacatgttctgactaacactggatattattacaggtgaaaacattggaatcttgtgaacctcaacctgtgttttacatatgtatacatgaagtgagttttgtatgctttattttttcactatttgaaaaatgtaactgcttattttctattgttgtgtaacaaatcactatgcacttagcagcttaaaaaatattatttattatctcacagtttatgagtcataggccactagtttggacacacttagctgagtcctctgctcaaggtctcacatagctgctgttaagatattgaccagagatatggcctcatctaaaggttaggttctcttctgagttcacgtggttggtggtggaattcatatccttgcagctgtagaactcatagcaacttgcttcttcaaggccagcaatagagataactctgctgcttccagtctctctgatctctagactctcatttaaagggctggcctgatgaggccaggtcaagtcaagatcgcatctttcttaatgaactcaaaatcaactttgagaaaccctaatgacatgtattaaatcccttcatttttggcacctggtgtgcaataatcactggattgatatctcatcaagtttgtcatagtctattggttagaagcaagccacaggcttcatctacactcaaggggaggggattgtaaagagctataactaattgggagtcacacttgagtgtgcctgcagtaacaaccattgcataaatcaaggaaacattgaattctgctttgtatgaactctacttaggttgttcaccattttgaagaatgagtttaccagcagcacttctcataatagtctacacttacagatattctagtcaccatgattccacatagaagtgcaaacatctgactacttcactatgtcttctagagtacagagctttacatagagaaaagtttaattttatataaatgactcttcttattttctttatattatagttaatacattgcacttgaaatcac

SEQ ID NO: 2341 - DNA, 1789 bp, Homo sapiens
atggcttccaggcccccctgtcatgagcctgctaagggtcagcactgctgcaattagtctctttgccagcaagttttattcaactcttcgttcctccatgtccctgactgggaattgactcgaatgcccagagttaaaagaccaaaagttacgtaacgtctcccagggatgatggcagcttatgagcaaacatgttgattaaacactgcggcaagttgagactcggtgattgcctccgtagctaaataacagctctagtgcgggtgaggaggagccttttgacacgtgtggcagttaactttgttgaagaagtgagcaaggtgacttatctgtaggaagaaaaataaaagtgcttgtgagcaaaatagggcagaaataatgaggtttatgatggcagaaaaatgtgagaatcagaattgcggaaaaccgtgtatcgagcacttactacctgcctgctgggtctctgctagctctttcacacgtaaatatcgcgttcaaatttcggagcaacccttcagggtggtggttattagtctcataaggaaactgagagagggtaagcccaggtcacccagagggaagggtcacattagatgcagacctggatttggccaaaagctaaagcatcccagacccagagaagggagtggaggagcccgagagagaatcccagctcccaggaccaccagcatttgctgaatgcccactaggttctagacactcagctaggctctatataggtgattcccattgattcctcatgactgtcttcgtatttgatgttctgtggttgtaagcaacagaaacacactggagcaagctgaagtagaaaagggaactctttatttcgaggacaaagtggtgtctcctaaacccacgaacaggagacagcaaggctgccagggttgccggaaaggagaactgaagggaaccaaggagttgtgagtcgggtaggctttagtcctacttaacttttaaaggtaagtacctttatccccattttacacataaggaattgagattcccatgagtcaaatgtccttgtccaaggtcacatggctaatcttggtggaggggtaggaagggtttggaccaaatcgatctgactcaaaacccatgtttgtaatcatcatatagaactgctgtagaggaccattagtcttaaatttaccctttaatcaagctagaaaagaaaccaggatggtttagcctgagaagatcaacctgagggtctgtatgatatccagtccatcttgattttaaaatcctttttggaggatggtgatcaactagcccttctctacagccaagaagcaggcctccgataacaatgtccccatgctcgagcccggacagacgtgaggacaagctggtgctacagcgagggccagcccttcttgaaggccaggggctggggcacagggctgctgttggttccatccggtcctcaagctgaaatctgtcctgacaaactgcccctggcagaaaattgggacacctcggaggtttagatgttctcatctgaccctttcacaatccccaagcagatggatccatgtgttttctttggctgtcctgttgcactggagagtgagtgttcattcttcgatatttcagtttacccatggggtggagaggatggggtttgtttataaatgaatgttttggtgtagacctgacttgacaccaacttagctacttcagggattcttggccctaaacgaacattcatttctgtctaaaaaacttggccatgatagtccaaactttaaatgatgttaatttaccg

SEQ ID NO: 2342 - DNA, 2005 bp, Homo sapiens
aaatggtatgcagcccggccaagccccagagactgcagctcaggatcacaccaccatctgcaaagccaggccacagctgccaaagagatctctttcctccccgtcattctgctgatggtcattttgtccttggctacaacgtcccactgggcccgagacactgcaaggattttatgagatttctttgcttcaagctaggggaaggcaaacagaagagaattcagcaactgccactttgaaacaattttggggcaagacatgaagattcacaaaatgcagtttctagaagcggctggaatgtaagctgcaaggaagggagcagaaacgtcatctgtctcaccatggctgtctccctaccatccagagtggtatctcacacagaaaatgcaatcaataaatatctgttaaatggccaggtgtggtggctcatgactgtaaccccagcactacaggaggctgaggcaggtggatcgcctgaggttaggagtttgagaccagcctgtgccccgtctctactaaaaatacaaaaatcagctaggcatggtggtgcacacctgtagtcccagctactcgggaggttgaggcaggagaatcacttgaacccgggaggtggaggttgcaatgagccgagatcacgccactgcactccagcctgggcgacagagccagactccatctcaataaataaataaataaataaataaataaataaataaatatctgttgaatggataataaattttaaaacaaaaatctggcccagagcgctcatcttacagataagttagctgaagccatggaggggcatgtcttgcccaaggtcacacagcttaagttgtggcagtgatggaaccagcagccaagtctcccaacatacctagactcataacactccacagccatttgacaaatatttcttgcattctgactgtgtgccaggcactgaactaggcactgggagcatataaatgagtaagacatagaacgactgggatcatgaaattaagttcttcatattgctattttcccaagcacggaggcaacttctctgtgctttaagtccggctccaacagtggttgtaatcatgaaccctgaagtcagacggtccagccctacatcctgtgatcctggctctgtgactttgggcaagtcattggacttcctctaagcctctgcctcctcatctatgaaatgaatgtgataataatacaggttcaaaggcgaaaaagcacgtaaatagttagaatagtgcctggcacacactgatcactcaatgattcctgctatgagggttgttaagggaaaaatgctccctctgctctggaccttcctacacaaccaaataagtggagatttccacttcatttttctcctctccaggatctctactacctgcttcacgcccacacactcattcatttcctccctcagtgttccatttggtcctgcctgaaaaacagatacccactaaccatgaggatgatgaaaaatgaggttcttcccagagcagcaagcacatcactgccctgtctttccaggcaaacacgttcacggctgggctttgagctcaccagagacacagaccattagtctcccccctgcatgccttctgctaatggaagaaagagttcactatcaaatctactaagaatcacacaaggtaattatcttgcctcaaggaccactgagagcttctaaggtttgctggcatctgtcttaattgatactgagaaagccaaggctgcctaacggatgtgtttgatagaaagtaataaaattctgagagattaaagaagaaaaataaatacaacaagaaatcagtctccttaaaaggaccagcaaggagggataaatgtggaccacaaagactgaagatcttcaaatgtcagggttagatgcacattctagaatcaagaggtgggtgaactcaacggggcaatatcttactccctgttgcctcccccagtgcctagcacagtgctatttgaataaatatttttaaac

SEQ ID NO: 2343 - DNA, 303 bp, Homo sapiens
gctgggattccaggtgtgagccaccgcgccaggacccaaggcccttaagttttaacgcctcattcttcagtcaggttttccttgctcccgcgtgttcagccaattggtttcaagtttgtgttgaaggagaaactaacaatgaaaacggagtcgttgatggaagaaaagttggaatgcagcctctggtgctgtttgagtgatccctctccccaggggctggctgcgcactgctgtgttctggaaaggcgcattgtatggtagatgccgcagaaactactctcaattgtctacaggataaagcac

SEQ ID NO: 2344 - DNA, 2106 bp, Homo sapiens
agcagcggcgcggggtgggtggggcgggagtgccgggcctccgccccctccgcctgcctttccttcctccctccctcggtccccggggccggcggacccgcgggcaggcactgcccgggctggacgacgtctggccggctcccggcgaagggcagcggaggagcggcccagagcgcgcagctagggcactggcgaaaccccgggacagtccctctccgtgcgggggcggcgcagagcagtcccatccccggggtcccgggcgcggctgactgccggctggttccctgcgcgcagtagctccccgagccgggctgcaccggaggcggcgagatggtcgcgcgcgtcggcctcctgctgcgcgccctgcagctgctactgtggggccacctggacgcccagcccgcggagcgcggaggccaggagctgcgcaaggaggcggaggtacgccgtgtgtacctggcggagagcggtgcgtgtgcttgagacctgtcagaactcggcagtcaggccacccggcagtcccctgtgagcagacaatctgcgttaccctacccctgtcctccgcccccttcgcacttgaacataaagagccgggcagttttttccccgtgccaggctggaaccacacaggcacgcggatccgcactgatgggctggggtgggtgcagagacgagaccggacagacgggcaagagcccagaggggacatcctaccctagtttggcacggggccactctccctcaccacctaggctggggagaatgaggttcattcgtcggatgcccccgaaccgtgtggaagcctcagtttggtgctgtggagagggtaccgctggctggccgggacgcgggacacagcgctggcttcctggccggggaccgccgctgacctgcttgggcaagccatttaaactgctcagaactagtttttctgtctgtaaaatgggcaagagtagtatactctcaagagttgcttctaaggagctttaaacggggcttcaggactgaacttaagggggcaggaaggtgaaccttagagagctccctttccattttcttgctttggactcaacttgcttgttgtaggttgcgcaaggggaatttttttgtgaggtaggggtggggatcaatataaggcatctattttctagataaaagcgtgagccactgcatccagctggaatatgaacaggttctgaattactgagcccaatgctctgccctgagactcttgctcctctaagagcttctttcctgccctcaaactgcccgttgagagcttctcagtatcctccctactccccttccctcgaagggcaagctgaatttggggaaactgcagaatgaagagggccctctccgaatgcctcatccttccatcacccagctcccatcactactggggaatatttggaaatgaccctgcttcaacaagggatcatctctcattgccttccacccctccccttcctagcactgggctcttgctctgtgctctctggtttctctgcatattcagagaagcactttgtttctctgaattgagactcttacaacatcaagtacagagtctttgcagccccaggagaaggcttctgtctgccaagccaagtcttgttaagagtcccaccccacctccctgcaagtgcgggtcccaggcaatccctcgcaagggaacagaggcatatctctgctgcccatgcctgtggtggccccagatggagagaatttcatcttggggtatgcttgggaaacttaatatccagcagattgagtttctttcagtctatttaacataaatttggggaaggggatttttaactctgagaacaagaaaatattttaaaagcataaaaactctggaaatgtgtaatgggtgtgtacgtgtctctatatgcctatgcaagcacacgtgtgtgtgtatatatacatatattacatatatacacacacaactggggatgtgtctatgtctatatgtgtttttgtatgtggttaattgcatgagcttcagtgccagacaaacccatacgtaaaccatggataactcatttaacctctataaacctcagttttcttctccatacaatgggggttaataatgcc

SEQ ID NO: 2345 - DNA, 3472 bp, Homo sapiens
ggcgagagaggaggaaccgagaacccgacctccctacctggccgactccttagttctacttccctccgtgtggagatacgaactaggtcgaatgtgggtgtggcggaagactgtggggtcaccacagagcccctcttgtccccatttttggcttagcccctcccttcttctactagactcttcatcctccgtcagctccgcactggccaccttagctgcggagcccagggactcccgagccgcaaacacattggggaacttgctcctccaagggaaggctgggccggaaattggaccctgcgcgcagcccagaggagcgaaaacttgtggaaatcggaccttgccctcggagtcctgagtcaaggacacgagtccccaagcggcacggaaaacaggtggcattcagcaaatacgtcacggcgacgacggatgcggccctcctcttggggcggccacaaggtggagctacagtgcaaccctgcaccgcgcgcccggcctccggacgcccccgaggtggctgctctcctgcgggcctcccgcgagcctcccgcgagtccttcattgccgcaggattgaagttgacacttctgggccaggcattcggagctcttcaaggccaagcctctgctccctaccactcccatgaattgtctctctcagttacattcagccacattttattcctggaaacaccctttttcagacttctgggctttacgtgtcctcttccctctgaaggagttcctgttccctgctttgtgcatcttagaagaagactttcatcctctcctgtatgaatccactcctgattctctcccaggcaggaaaatgtttttattgctctgggtttcctgaatcgtctgctgcctaggctctctactaggtggaagtgacttgagagcacagactatgttcttattgcctagcacagggctgagcaaatgcttatcaacagaatgaactctgccctctctgagtgtccctgcagatggctgcctctttgcagaggctgtcctcacctctaggaaccaggatccagcattgagtctcttcagttcagtccaggagaagtcactgctgtgggctgtgattcgggttgggaatacagaggctacattcgtggtcctgctgaggtgctcatcatgcatgaggaaggggaccccatcggagctgagggcacaaggggtgtcagagggccaagctctggggctggtcatcatgtccttcagccccccagatcccctaagccccagcttccctcacctgaccatcacatcagtctcaaacacagtagctccgcattcagctgtcttccgcaaggacatcagggtgttctcgggagccagctgggaaagggaataggtgatgaggtagcagggaagggtgggagactgggaacccacaggcctggtcgctatggtgcaaacgagcagaccctccccaccctcccagcattctgtccaacactcaccatgggggcccctcggtgtcccaccagcccaggcttgggtggtaagtctctgggttccatgatgcagggtgaggagatgcataggggggccaagtagatgaccaggacaactccaaaaaataggagcagtagcagaatcttgggacctgtggggagtgggggacaggctttcaagaatgggcaaggggagagctctggggatggaaggcagagtgcaggtggcagagcatgagtggccagcaagggtgagtggggcagcagcgttggcacctcttcggtggatacggtagaaggtatcagccacaggccaggccaggagggcaattccagcggctgctccaatatgaaggaatggggctgtggcctgtggacaagagctggtgaggtgggctcttctccagtgcccctccccgctttcctcttagggcctgactgctggagttcagagctacctgcagtcttgggggaacaggagcgagatatgttctagggttggctgcaagccaaggctcccgtctagacactggaggttggccactcacctgcagtgacacacgcaagctatgccactcctgctgccattggatgtccagtcccacaaggccagccgccacaagcagcataatgaggagcagcagcacctggggggccagggatgaatgaggcctcttggtcaatttgggctcatggttggtgagctgctccttcactctatagagatgggacccgacccttcccttcccctgacacatctgctttcctcctttcactcaacacttactgggcttcaggtcctgggcttgaccccccgggggtataaaagtgaggtcctcagcaaatagccagccaagtgctgagcccagtggccccctctcccatgcactcccatccctactgtaccttgtggaggctgtgcagatgcaggggctgtctacaaagccgcaggagcagggccaggacctagaggaagagagcagtgggacttatggggtgccaagaggggagcaaggttactgaggtgggcttcccaggctggtacttccctcctacccaagaattagccccctccctcagtggccaggatgagaatagggagctaaaactaagcaggaaggaaggctgaggtggggttaggccagcggcctccggacccaccaatagcaaggatgcatatgtgaccagtagagagatgaccagcaggaatgccagggaccagtccatccagtgtccccagcggcggaagaggaatctgtgggaggggagagggaggtgtccaagtgggggaaggggtgtcaatagtggcctgaggggaggtggggtgggtggatccaggaagactagaagggagtgaggagaaagcccctcgtggccaggggctccaaggattgaggagattttgtggagggattttctaaggagattgggtagcagcagagctgggtttgagcagctgggcagggctgggggatgactgacagtgggccacccccgggtcccagggtggggagcaggttgacaggtatgctggggaagcagggggaatccatgacacactcattgaagttgtgcaggtcattgagaaggacgagcccgatgtacagccagctcagggaaaggaggaaggtgaggaagagcaggccaaaccagatacagtcgcactgcaaaggggcaggagagaaactcacaaccaatacctacttcaaactcagagtccccaacgggtggcagctaaagggagctgcctgccccgtgttgggctgctctgctcggggggcagctctttccatatttgagggagattttcttcctgggagagagagccccttcccccaagctgtctatgagcacaattggcctccttatcccctccagtgagcctctgccttctgacttccagcctcccccctccatccctactccaccttgctggtttgcatcctctctctggggcatttcctccagtggcagctatacaggcagtggaggcagcgggcccagacg

SEQ ID NO: 2346 - DNA, 1030 bp, Homo sapiens
ggcttgtgctccatccagagctgcctgaccccgtcccaccccacagtgagacagtacgccgacatctgcctcttcagcaccgcccagtacaagtgtcctgtggctcaactcgaacaagatgaccaggtatctcccagctccacattctgtaaggtgtacaccataaccccactgctcagcgacaaccgggagaagcggggtctcgccctggatgggaaactcaagcacgaggacaccaacctggcttccagcaccatcgtgaaggagggtgccaacaaggaggtgctgggaatcctggtgtcctacagggtcaaggtgaagctggtggtgtctcgaggcggggatgtctctgtggagctgccttttgttcttatgcaccccaagccccacgaccacatccccctccccagaccccagtcagccgctccggagacagatgtccctgtggacaccaacctcattgaatttgataccaactatgccacagatgatgacattgtgtttgaggactttgcccggcttcggctgaaggggatgaaggatgacgactatgatgatcaactctgctaggaagcggggtgggaagaagggaggggatggggttgggagaggtgagggcaggattaagatccccactgtcaatgggggattgtcccagcccctcttcccttcccctcacctggaagcttcttcaaccaatcccttcacactctctcccccatccccccaagatacacactggaccctctcttgctgaatgtgggcattaattttttgactgcagctctgcttctccagccccgccgtgggtggcaagctgtgttcatacctaaattttctggaaggggacagtgaaaagaggagtgacaggagggaaagggggagacaaaactcctactctcaacctcacaccaacacctcccattatcactctctctgcccccattccttcaagaggagaccctttggggacaaggccgtttctttgtttctgagcataaagaagaaaataaatcttttactaagcatg

SEQ ID NO: 2347 - DNA, 2624 bp, Homo sapiens
agatgctcagccgcagacctttgggagagtaaagggggcacacccacccaccttgcctccaggctctttccttcctattcctgttctatggtggggctccattgcgagacttcagattgagaaatcagatgaagtttcaagaaaaggaaactggcaggtgacagagatgggtggagggactggggaaaggctgtttactccctcctgtctagtcggcttggtccctttagggctccggatatctttggtgacttgtccactccagtgtggcatcatgtggcagctgctcctcccaactgctctgctacttctagtttcagctggcatgcggactggtgagtcagcttcatggtcttggattgacccagtggggcacatatggggacaatggccataagatattgggaaatgcttgttgaatgggaaaatgctgatgtggggttagcagggatagttcctccaacacagcagaacttggccctgtgcttctctggccagctttccttaagatactgaacaggccaaaaatggggccaagatgctctaagactgagccaccaagcatgggtttgcaatgagctcattctggctttgaggctccctgggaatggcagtgtagagcctgctcctctccctgtcctcaccccacattatcttggctcctcagaagatctcccaaaggctgtggtgttcctggagcctcaatggtacagcgtgcttgagaaggacagtgtgactctgaagtgccagggagcctactcccctgaggacaattccacacagtggtttcacaatgagaacctcatctcaagccaggcctcgagctacttcattgacgctgccacagtcaacgacagtggagagtacaggtgccagacaaacctctccaccctcagtgacccggtgcagctagaagtccatatcggctggctgttgctccaggcccctcggtgggtgttcaaggaggaagaccctattcacctgaggtgtcacagctggaagaacactgctctgcataaggtcacatatttacagaatggcaaagacaggaagtattttcatcataattctgacttccacattccaaaagccacactcaaagatagcggctcctacttctgcagggggcttgttgggagtaaaaatgtgtcttcagagactgtgaacatcaccatcactcaaggtttggcagtgtcaaccatctcatcattctttccacctgggtaccaagtctctttctgcttggtgatggtactcctttttgcagtggacacaggactatatttctctgtgaagacaaacattcgaagctcaacaagagactggaaggaccataaatttaaatggagaaaggaccctcaagacaaatgacccccatcccatgggggtaataagagcagtagcagcagcatctctgaacatttctctggatttgcaaccccatcatcctcaggcctctctacaagcagcaggaaacatagaactcagagccagatcccttatccaactctcgacttttccttggtctccagtggaagggaaaagcccatgatcttcaagcagggaagccccagtgagtagctgcattcctagaaattgaagtttcagagctacacaaacactttttctgtcccaaccgttccctcacagcaaagcaacaatacaggctagggatggtaatcctttaaacatacaaaaattgctcgtgttataaattacccagtttagaggggaaaaaaaaacaattattcctaaataaatggataagtagaattaatggttgaggcaggaccatacagagtgtgggaactgctggggatctagggaattcagtgggaccaatgaaagcatggctgagaaatagcaggtagtccaggatagtctaagggaggtgttcccatctgagcccagagataagggtgtcttcctagaacattagccgtagtggaattaacaggaaatcatgagggtgacgtagaattgagtcttccaggggactctatcagaactggaccatctccaagtatataacgatgagtcctcttaatgctaggagtagaaaatggtcctaggaaggggactgaggattgcggtggggggtggggtggaaaagaaagtacagaacaaaccctgtgtcactgtcccaagttgctaagtgaacagaactatctcagcatcagaatgagaaagcctgagaagaaagaaccaaccacaagcacacaggaaggaaagcgcaggaggtgaaaatgctttcttggccagggtagtaagaattagaggttaatgcagggactgtaaaaccaccttttctgcttcaatatctaattcctgtgtagctttgttcattgcatttattaaacaaatgttgtataaccaatactaaatgtactactgagcttcgctgagttaagttatgaaactttcaaatccttcatcatgtcagttccaatgaggtggggatggagaagacaattgttgcttatgaaagaaagctttagctgtctctgttttgtaagctttaagcgcaacatttcttggttccaataaagcattttacaagatcttgcatgctactcttagatagaagatgggaaaaccatggtaataaaatatgaatgataaaa

SEQ ID NO: 2348 - DNA, 543 bp, Homo sapiens
ttttcaaattcagatggtgagaactggtctgaatgtacaattcagtcttactgttttccatcaaggtgtcaccaatcttccagtctcccaggcagaagtttttgagagacaaatggatggaaaaactttttggccctcttccttaggatcagaaggtcacagaacgttttcctgaatcggattctgggttaaagctgccagtaggaagaattcacatgagatttcaaaggtggaagagaaggagaaggtgtttttttcttgcaacagtttggctggggagctgagatcttcactgagggcttcctttggctccgggttcccgtggacaggcagccgatgtcatcagtggtggcttctctgtgatcactataccaccaggtctcctaaagtggccttcttgacctttgcctccccagctctttcaatggttatgtgaaactctaattatgtacattaaatatctttcagctcataatacatagagtcatttccctccccacatatggagtaattctgaatgacataaaggcttaagcacgaagg

SEQ ID NO: 2349 - DNA, 15115 bp, Homo sapiens
ggtcactccggggtggccaggaccaaatgtgcctccttctggcttttgcaccgcaccaactaatccgcgccaggccgcacagctgctctggccttcggggaggactcctggagcgcggtgtacactgctccggagtccctccgcaggagttgaggcagcgagttccgagggcggggtggggcggaatccggaggcacgcggacccggtggaacgcactgcgcagacggcgccggcgcctgcactcagctgttgacgagtctttcttccagctctaccctgaaagtcctccaggcaccggtcttttttttctgccttttgtttccctcccggcgagtcggcgcgacagtgaatttccgtttcccgcggtgtccaagcggacctgaggagttgcagctgtgagcaggttagagttacttgttattggtaaatagccactatggagactaaggaccagaagaaacaaagaaagaaaaacagtggacccaaagatgaaaagaaaaagaagcggcatctgcaggatctccagctaggagacgaagaagatgcccagaagagaaatcccaaagcttttgcagttcagtctgctgtgtggatggctcgatcctttcacaggactcaggatttgaagacaaaaaagcatcgtattccagtggttgatcgaactccactagagcccccaccaatagtggtagtggtgacggggcctccaaagttggaaagagcactttgatataatgcctcattcagaacttcattggcagaagttgactgagatcagaggccctgtgatgatcgtgtcaggtaggggatgccaccacagacatagagttggcatggctgttgtcatctgagggacatgcgtgtgtttgttgttttcttgagtggaacatgttaaattttgtcatatcatgttacttctcttatgcttttactaagttagctataacttcagaaaagggtaagttcccagagataaggatgtgatacatatcttatcctgactgctgtatggctttgccaagcatgttccttggaagggcgtagcaggcctggtcactgtgaacatatcatttaacaaatagcacgtacctcctatgtgccaggtgcacatgcttgcccttacgaagccacatgctggtggaagtgcgcgttttctctttttcctgtgagaatttgtctgctttgggagatggcgacctttccgagtgtgagggaagatgaaacaaacttccagtggtagaatggcaatgtacactctgaaatctcttgttattgcaataatatagttggattgaggcttttctttatctttggagcttccatattttcttttcctttttttttttttttgaggcagaggcttactttttatgaaaaaaagttcataaatatgtattgatttttgtacacatggcacctctcttctttttttttttttttttgagatggagtctcactctgtcacccaggctggagcgcagtggcatgatctcggctcactgcaagctctgcctcccaggttgacaccattctcctgcctcagcctcccaagtagctgggactacaggcgcctgccaccacgcccggctaattttttatatttttagtaaagacgggctttcaccatgttagccaggatggtcttgatctcctgacctcttgatccacctgcctcagcctcccaaagtgctgggattacaggcgtgagccaccatacccggctggatgttggtttttatcaaaagccttttctgcatctattgagataattatgtggtttttgtctttagttctctttatgtgacaaatcacatttattgatttctgtatgttgaaccaaccttgcatcccagggataaagcctacttaactgtgatggataagctttttgatgtgctgctggattcagttgctgagttttgttgagaattttttcatcaatgttcatcaaggatatttgcctgaagtttcctttttttattgtgtctctgccaggttttggtatcagaatgattctggcctcacataatgaggtatgaaggagaaggagtccctcctcctcaattttttggaatagtttcagcaggaacggtactagctcttctttgttcatctggtagaattcagctgtgaatctgtctagtcttgggcttttatttttttttattttttttattttttggtaggctatttgttactgattcagtttcagagctcattcactattggcctcttcagggattcaaaatttcttcctggctcagtcttgggagggtgtatgtgtccaggaatgtatccatttcttctagattttcttgtgtgtgcatagaggtattcataatattctctgatagttatttgtatttctttggagtcagtggtaatatctcctccattgtttctgattgtgttatatatggattttctctcttattagtctagctggcagtgtttctattttattgatttttttgcaaaaagccaactcctggattcattgatcttttgaatacttttgtgtttcaatctccttcagttcagctctgattttggttatttactgtcttctgctggctttggggctggttttttgttggttcttttgttattttagttgtgatgttaggttgttaaattgaaatatttctaactttttgttgtgagtatttagtgctgtaaatttccatcttgacaccgccttggttgtgtcccagagattctggtatgttgtatcttttttctcattcgtttcaaagaacttcttaattttggccttaagttcattatttacctaaaagtcatttagcagcaggttattctattttgaattgaacgtttatgaaatgcttaaacattttaactagccttttttaaagtgcaatgagaactattaacaaagagataatagatacatgaaatgatgcttatcaatttacctaactttgcatttttctgtcactactattttgtgggagtctaagtctctttgaaggtctctaagaacttgctttatgaatctgggtgttcctgttttggatgcataaatattaatgtttagaatagtgaagttttcttgttcaatcaacactttatcattatgtaatgcccttctttgtgggccagtcccagagaaagcctgttatatttcactcaattttcttggaaacctctcttgtttaaagtgtattgggacccaggtgctatgaggtatattcttattccccacctcaaaatatgtaaattattgatactgttaaaagaaaaactttagacaaatttaagagagtttacttgagaaaagaaaaaaaatgatttgcaaatcagcccttagaatcaaagaaatttcagaaagactttggcactgtcacatggtcaaatatctatgggaaaaaaatgtaatgtgcagaaaccgaaactgaggtacagaaatagctggattggttacagctcagcatttgccttatttaaacaaggtttaaccagttggccgcctatgagtggttaaagtatagctactgggattggctgagactaagctgttgttacggggacacatactactaaacttagacttttagtttgtttacctgctaagtatgtgagtatggagatttttcaggctagattttagttttatttagtaatacattatgggatctgaaggacacttttgtaaaggttgaaacaaacatattttatgcacatttccatttccgacaaaagaaaaatgctcctttagctctgctaagtgtgacagtttctaaattaaaagaacattatttacatctcaattgttaattctaatattaatttcaagtattaataatataatcatttttcactaagccttcccttttatgcccgtttacactttcaaatctaattatattccattttcattttaaaggtcaagccccaactgtttcatggtgtgccttctttctaatcaagtatttgagaccagtgggagtcaggctggaactgtatcatgtcaattttcacaagctgacattcacagtaaaagtagttcttgattacttccctaacacctttgatgttaagggaaaaaaaaacaacaacaacactgagctgtgtatattccctcctcatgctcctgggtgagaaatcatagttagtagctgctgatcttggaaatcagagtttcggctacattgctagcaataacctaaatcaatacagaataacaacacaagccagtatgtggtaagtcatgaaaaatagatcggtagtgatatcaattgaaaatgatacagaaaaaccatattatctagaaagaaaaatacaattttataacactcttggtcctgaatagttttaactatggtacacaaagcaagcaagcagcaaattacagataaagatgactgttactttctttctactgttaacaccctctggtaatagattgtaacagaatgactatttggagggttaagcattgggagatgtccctaattacatagcatgtttggtaacatcatcacattttaatttgcatagttttgctgtttttgaaactgcatttatgagattttggggaacagggttaaatggtgacagaatagtgtcctttgtgagtatgtgaaatggaataattgggataaataaatagggtttatgtttcatcttcacttcatctccaagaagtgaagcattatttgtaccattccttacattttatatattttaggaatttataaggttcttgtttaaggtagggtagtaattggaacatgtttaatatgagcaattttgaccaactctcttatttttacatatattatatatatatataacgttgtgagaattatgtagacatttaagacttcttttttcaggctttgatactgatttctgaaataaatatgctccataaaaattcttgcaatttttaatagttatggactttcaaatcagttcccaaatacttagtattctcactatacttttttagaaagtatatatatatatatatatatatatagagagagagagagagagagagagagagagagagagagagagagagaaaatcattacagctgtgaagtattttatttccctctgttgagattttgagagctattgtagcctttcagagcttagatgagctacctgaggaattatttgcaaagggattgcaatcctaatttcagacaaaacaaactttacaaaccaacaaagatcaaaaaaacaaataagaaaccgtatactcaagtgatggaaatggaatatctcaatttatcaaatcttatagaacttttcataagaaaaatatattttctttagaaatgcgtacttgggaccaaattgtatcacttaatattatttaatattttaactatgagatttttctaggacttgactttaatccttagtgtatcattgattactaattcttgctacagtatgatgagggcaataacatgtttgaaaatttaaccttaaatttttgctaattctagtggtagcaaaatatttatatacccctaaataaattttgaggaatcaaaggattgatacataagtgaatacatataaaatgttgattgcaaacaaaagaaagatgattgtctgagagaatataatttgtcagggcattttatttgcaggacgtaataaaactggacaataatatctatctcatacagtccttgtgagtattagatatattaatcttataaagcatatgaaagaatgcttagcacatagtatttgctatatgagtgttatttattatcaatagtattcttaagtatctagatttagagctaccctgaggctctactgaatacagtatgtaagaaatttctcattgtaactttcccttttctgttttgcacacatttcttgtgggattacttgaagaaatattctcagtattgttccacatcaagatggccactagtagcactgagcttatgtcttactagctaagctactttttcagaaaatgaacattgttttcctcaataatttcaacaaaatttctagttaagtttctcaatacactaggttggatcatgagcatattacaaaataaaccatatggttaatctttattttggacaggttgagacatattatgaccactgcccatgatgattaggtccattgctctcacatggtgtgaactagaagtgaaagagaggtagaaattcaaaaaagattgaaatgctgctacagaagaaaaagaaaatactgaggtctctgtaatcacagatatttatgttataagaaatcaatacagattaaaaattaggtaagaaaattgatttactaataatcttgatctttagccacatttctctgaaataaatttgctctaatgctgtgacggggatcagcaagctacgttttccaagttccttcaagtgggatcctgctaggttctgctattgggaggtactagagaaacataggcaaaagaatggaagaataggtctccttttcctgtttgtttgctgtccttgccgatattctcccaagaacatccccttgcccaaggagcagtaattgtttcagtttaccaattttttcagagccccagaaagtgcctcttcagaggtaacagcagcagttggaacatatctctccctcagaggtctagcctcagctcaggaaggcttttactctgagttaacaaattttaataactccagtctcttccctttattcatctaagcttctgaggaggtctgtatgtggccaggagatggtggtgatagctgcatcttgcagtaattttctttgctttccacagtgttgttacttttttctccgatttcttatgtggtcaattttttaatattaactcatagtcatagtgtagtattcatgctttatgtgaaatgaaatgttttttataatgtagccatggcctaccaatagcatattttcttttagatttggtgatatatattttgcttcagtgactttatatccttatttgttgcccaaattagttttttgtatacaaaacatccactattaccctggtcccatcatttcttctgttatccattgtcctgtgatttctcctggaaagtgaattgtttatccgtccatttcactctgtgaagtcatacaggtctatctatatagaactcctgtgctccaatttattccctgtgtgaaactgggcaatgtattaatctgggaatatgtttcttcatatgcaaatcagagataacacttacctcacaacattgtttagagcattaaaagaaatataatatgatatcattcacacagaatttccctgggtgtgaattgaacaatgtcaatttttctcccatttaatgtgaaaactaactatataaataaacaaaaaaaacaaaaaaaagaagaaaaaatcaataaaaattattatcaaatgtatacatattaaaatattatcgagtcttatacaaattgagtttttcaaaaataataatgattgtaacttttatattgcagttaatgcaagaagcattatgaaggagaatcacatgtctagagcaaagtgatgttaatagtgtttatgtttgagccagatggaactcctcataggagcacacagtgctcacctcctcccaactttgcattcaaagaaatcatattcataagccaaaattggtcatagaggaaatattcaacaccactaaattaagcaaactaaaaatacagcagtttttctcagtgaactggttgttaaatacatactaaatcaccactaggtggtataggccctcataaatcgcaaaataaaaatgggactgcttagtttctattttgttactttctttatttctgaagagaatgagctcaaattttaacagcagagaaaaaaatatagttatgagagaatcagactttcaagtatgtggggctattttaaggaaggacatagatgttctaaatttatcctagccaagaaaaaaaatgtgcttggttggctacaaatgaaaatcaataaaatcctcccataggattattgatcagtctaaaccaagtgtcaatttttttttttttgtaaagggtcatattgtaaaaatgttggtctttatcagcctgtttctgtctcaactaacaaactctgctgcattagtgtaaaagtaaccataggcaaagaatgtaaatgtaaatgaataaatataattgtgttctaataaaattttatttgtatatcaaaatttaaattttagcatgtcatgataagttattctttgggtttttttcaatgagtaaaaaatgtataatctacatttagtttgcttgctctactaagtgagttgggggccagattcagcttgaggagggtggctagctaactcttagtgtaaacaatatatattatttagtattcctttgaagtgatcaacttggttataatcatggtaagctggcaagtgagttgtaagataaggactatgttacttaagttctccagagaaacagaaccataaatgagatagatagctgagatagatagctaaggtagatgtagacatagaggtagagatggagatagagatagatgagataaagatacagatgatagagatagatatagatgacacagagatacatatactgatacagatgagatagatagagatagagacagagatagctagaagaagataattcttgggaggaattggctcacaaggatgtcgaggctgagaagttccacaatctcctgcctgcacgatggaggcccaggaaagttagtgatatagttcaacctaagcccaaaagtctgagaaccaggtgttccaatatcggaggacaatagaagatggatgtcccagctcaagaagacagattaaattcacccttcctctgcctttttgttttatttgggctctgaatagattgaaggatgcccatagatactagtgaggatgatcttcttcacccagtctacctattcaaatactaatttctctggaaacacagacacactcagaaataatgtttcatcagccatgtgggcaacccttagcccagtaaaactgacacatgaaattactcatcacagggaggtctgggacaattcacgtctttgttaatttaaatagacacatgaagaaattatttttcctctatcttttttccttcttctttctctttctttctttctctctttctctttctttttgtttttaactaaaggacattttgtaagcacatgaaaccagggaattgcagtagccatatggctactatgaggtgagaaaaaggaacgtttttgcatcctgcagatctgccccatctatggtctttgtgttaactgagacgacaaatacgttactgtctaagcttcctttagtaacgtcttccactacctttatgttaaaacattttaaaagataaaattaaaaatataaaatgttgtccttttagagtggaataaagttggcttccataagctccgatgtgaattttacactgattctggccaaatttttcagacaattttagaaaattgcctaaaaatactctgtaaatctagtgttaattattagacattatttttttcaaatgttattaatattatagtgttagatgaagaaagtataatcactagggatgagtttaatttccttaagacagacagatatcaggatcctctaataatacattaaaggcccactaaagtcagaggtatgtatttggtaatgtacctcactatattcttgtggacaagaaggagcaatatggattaggtaatggaataatttggtaaattatttaatggttaatagttacatattactaacaaataaaatggttttaacctgaaaaattcatttttgtttatattctgataacattttcatcagtgttttagacatgttcatctgtcaaacacatgaaaagtgaaacaactctgaggattagctaataggttgataaaataaaaacctatatggatgtctgtgtattataattatgaaacagcttttagtcaataaaactaaataggaaagacccttaaatattacatatttaacaataaaccacacacacataatgacaatgctaggatgagagacatatgttttaaaaagcaagattttactacagcaagcagtgtttagctagctaggctgtaaaccaagggttggcaaagtatggcctgcaagccatatccagccaatagactggttttgtaaataaagttttattgcagcatggacacactcattcatttgtgtattgtctataaatgctttctcactgcaacagcagagctgaatagttgtatagagattatatggcccacaaaacctaaaatcttagcctctttccctttacagtaaaggtttattaatcctgcctaaaaacaatttagcagagtaatttggctacaaggaaaataatgaatttctcttatacgtttaatgtctggacaaggttaatgagagctatgtttttctccaggtagagtatcctggacgtgcagtttaaaaaaaaaaaagcatcacattttgagagtctgtcatttgaaggcatggtctagtctaatcatggtttatctcaaatgtaagttcagaaattgtggatgttacagcaagatataatttgactctaaatcagcaagtactttcaaatattcagaactatctggaagtgaaacagcttcctctgtagacagacagcaagtttcttatcccagagccttgtagatagaccatctgtgcaggttataatcaggagattcacaaatgtggtaatgatgacatagtcacattgacaatgaggcttttagtcatacagattaaatatatactctattgtgcaaacctcctagtaattgagaataaacttaatcttgggctgcaagtagatacaaagtattcccagttagattttacatgtatacattttgaaactattaatttttttaaaataaagcaacgactttaaaaaaatttttatttattatttatttatttatttatttttatggagtctcactctgtcgcccaagttggagtgcagtggcgtgatcttggctcactgcaacctctgcctcccaggttcaagtgattctcctgcctcagcctcccgggtagctgggaccacaggcatgtgccaccatgcccggctaatttttgtatttttagtagagacagggtttcaccatgttggccaggcaggtcttgaactcctgacctcaggtgatctgcatgcctcagcctcccaaagagctgggattacaggcgtgagccactgcacccagccaattttcccatttttgacacactaattctaaagtaaactttccccttcattacttgaagatttatttcaggtgtttttcagttcctcctaatttcagctcctcagttcatatttggctcacattaatgatggttatctgttcttgacacatagaaaatacaaatataggacttttactgaattctattttttaaaaagttctaaggaaaaagctattacatccacatatatgtgtaaaatgtaacatggacctaagaactactgtgaataaatagcttgacttttaatacaagagagtatattgaatttaaagctaagaatctgggaattctagagtactgtctgctagaaacattattatgtcaaaaataacaaaaagggttatttgacatgatttgctgatcactaagcccactgagggaagccctccaaggtttatgtgagaagtagtcagttttttactggtgcagaagaaatgctttttattgctccaaggatggcactgagccccacaaagcaaccactggggaatatcaggttaatagcatgaatctgtggttataaaacaagcacactgttttaaaaacatatttaaagtaattcatgagttggatgtttcctgataggtatacttttcagtttaggcatttaaaaaaaagtctgcagtgtacctttattttcacttttactttggtgttttgatgtctatagaaatgagcagtttctctacttctttcccagaaattaatctccaatgctgacgtgagcacaaagaccttatgtactgcgctgggaaatatgttgtgttttaagaataaaaattttcattagagttagttcatgcatcacagatattatccttcctgacaagaggaacactgaagcacagacactgtgttgggctgtagttctcaatggaaaaattaagcttttcaaaatgttagtcactgccatgctagatgtttctttaagtcatttttactacctgttttgatagattctaagaatcagtcttacattgtatttttctatggcttactgttaaaatcttattcataaaaataactatcacgcatggaaatagtatacaccaaaatcataaaccagaaagtaatttatatttaaccctcataacagtacttcaaagtagaaattatctcatattgtagaggaaacacaggctcagataggatataaattgcccatatcacaaaactagtaagtgatggagctagaatacaaacaagatctgcctatttacacaaatcaataatttttcctctataacatgttgtcattacatgcctttggttttcaagtgaaatgcactcaacttcacattttaaaatatgccacaaatgtacccataaagtaagtgaacttgactattgagtgggaccacaattattaaaaagtttgccttgggacctttgaaacaaagacagtatagtgaccctcggggaactgagttacatgcccaagtccagccaagagatggaacttgtgggacctcaggtctcctgctccagtctaagtccagctctttccttccataggaaaggaagaagaaggaaaccatggctcctttggcactttagaaagaaatccgagcaatccaggggccaaagctcacacaggcaatgagttctcttcacctttgtctggaccactgtacccagggctcatggataatcctcaagccctgtgggctgtcaagtaggacgtgcctaactgctaagacttgtgctaacaggagctctgggacctcagggagaatgggctcgcgttcatcttgcacctgcctttgttttagcactgatctaactctcacattttttacccaccagtctccctagtagcctgaaagtcattcagagccaggggttgtgatggtcccctctgtgtccactgtccccagcacagggtccagcacaccacagtgggtagcaaatgctatttaaatgagatgggatgaaattcccttccttcactttcttcacctcaaggtaaggaccatgttcctgtttccatcattccctgtccttctcctgtctgtggtgacagcttcctgctccaaaacaaaagcctgtgcagatacccagaagacctgctccatgattacctgtggcatccccgtcaccaatggcaccccaggcagagatgggcgagatagacccaagggggaaaagggagagccaggtctgggacaggtttctgtggcttcctaaatctccacctccggcaggtgttcaagcaaatctgtgcttgagcctgccacacgagggttaaagcacagacttggggaggctcccctttcatcaggacccatgctacactcagaacaacccctgtaaaatgccattgcctccaaaacaaagctgttcgtggactctctgggatcccatatttccacacaggaactgggggtgtgtggttgtcccttcagaggggtgtcctgcctggttggggagctggccttggtgcaggccctccactaggttgcaggagagtctttcttctttgggtcagatcactggctcattggctgtgccgggggtgaacaggaatggagcattgagcttttggggaaaaaaaaaagagtgacagccactgggtcatcttccctttgtcttgcaacaggtcaagggctcagaggtttgcagggccctcctgggaagatggggcccccaggaaacacagggacttctggaattccaggacctaggggccaaaaaggagatcgtggggacaattcaggtaaggggcacacgtcagcatgtgtggcctgggggtcccgggcctggggagctgaaggaccagctgggaggtccccttttccttcttctcctgctgcctcatgggaagatgcccaactctgcatccaggcccagtgcgcctggccctctcaactttacttggggcctgaggagactcccataggtgcccaggtgcagacgttcaagccatgtagggccattccctcatcaggccccttagcagatgggccctggcttctcttcagtggaaacagttcagtgtgcacctccggggtgccagggaagaaataaggccctttagggggttgggtttacgtccattgtcacaagagtggcacgaaaatgttctgcctcttaggacccctggctgatggggaacatcacagccaacttagttcagagtaaaatagagcaaaattcagtaagaacaaaacaataatgacaatccacttattcatatttgtctaccagcctgtcaaaacaataaaggtatttaaaagtgtatctggaatgagaaatgagaaagaattacaagaaaaattttcaaaaaggagggtaatgagttgagtattttcttatgaattcttacaatatgacaatatgcaagccatatgtggagacgggggtccaggactgaagttccaggttgtgaagggatgtggaggtatagctgggaaggaggaatgtagtcattttcccctttttatttcttctgcattcttattttcctggaataagcattcttcttagtaagcttttttcaaaatgctccgctctccaaattaaggtcttctccataaataccttctccctattgcgttgcagttgctgaggctaagctggccaacttagagagaaagctatagagcctgagatcagaactggaccacacgaagaagcagacaggatctccgtatgttgtccaggctggtctttaactcctgacctcaagtgatcctccccaatcagcctcccaaagtgctgggataacaggtatgagccaccatgcccaacttatttctattattgtcatttgttttatatttcattaatttcacttttatatttatttgttttgtcc

SEQ ID NO: 2350 - DNA, 496 bp, Homo sapiens
tgaattattaacagaggttactttgacaggagggaggaggatacccagcgataacattcttggaaagcaagggaatgagagcaagatgcattatgtcacaaggagaagctctgggctggcatgagagcccacgtggtatctgcaccctccagtttgctgctctcagcctcttgaattcttcccagtatctgctctgaatccccagagctacagctccttcgaaatggcattagtacaatcaatagaaatgagttgcatgactatggaaatgagagtgaccttgggtcatgtagctgatcatcttgtatccaagaagtatttctctcaagttctcctaattacagattcagcagcgggtctattgtgactcctgattttagagtgcattctacctgacacgcagtttctcttacagtaaccaggaggataataaatatttagtgaagagctgattgagatcaagtaacatgttccatcagtactacctgatgtgccc

SEQ ID NO: 2351 - DNA, 4833 bp, Homo sapiens
caggaatggaaacgaaagtggaactcggcctttccctctttctctcctgcagacgatgggccctactccaaaggaggcaaggacgcaggaggggccgacgtttccctggcgtgccgcagacagagcattccagaggagttccgagggatcactgtggtggagctgatcaagaaagaaggcagcacgctgggcctgactatctcaggtggcaccgacaaggatggaaagcccagggtctccaacctgagacctgggggacttgcagccaggagtgatctgctgaacattggtgactatattcggtctgtgaacgggatccacctgaccaggctccgccacgatgagatcatcaccctgctcaagaatgtgggcgagcgcgtggtgctggaggtggagtatgagctgcccccgcccgctcctgagaataaccccaggatcatttcaaagacagtggacgtctccctctacaaggagggcaatagctttggctttgtccttagaggtcagtgaaagaattgcccttggtattggggcagcaagaaagaggctaatactaattccatgtgtgtgctgtttggatttgaatgtaatttatgtgtatctcagttctgactttgaagaacacaggaccgttaaggtaagtattcagtgggaaaatctgccaagcaatgaagtaggcttggttggggagagtgagaggagaaagttgtaccggaaaatgatggtgaaagctgctaccgagactgagaacaaagtctggagcttcctagagatcagggaaaaggggaaataaggtgaggtcacagaagggaggcaagccatttaacagagagaagactttggtcatgttacccaccccttgcaccatctcttgggagggcgaatttattgttggtgtctcataagagggtccatggatagcaaggacaaggtcctcaaacaggttttattgaaggagcctgctcaggggctgtgtgggagcctctggatgggaaggggtgggtggatgattcctgcttcttgtcaaatcctgtccaggaggtgcccatgaagatgggcacaagtcccgcccgcttgtcctgacctacgtgcggcccggtggccctgccgacagggagggctccctgaaggtgggcgacaggctgctcagtgtcgatggaatcccgctgcacggggccagccatgccaccgccctggccaccctgcggcagtgcagccacgaggcactctttcaggtggagtatgatgtggccacccctgacacggtggctaatgcttcgggacccttgatggtggaaatagtcaagacgccagggtctgccctggggatctcgctcaccaccacctccctccggaacaagtcagtcattaccatcgaccgcatcaagccagccagcgtggtggacaggagcggagccctgcaccctggagaccacatcctgtccatcgatggcaccagcatggaacactgctcgctgcttgaggccaccaagctcctggccagcatttcagagaaggtgcggctggagatcctgcctgtgccccagagtcagcggccactgaggcctcagaggcagtgaaagtgcagaggagtgagcagctgcaccgctgggacccctgcgtgccctcctgccacagcccccggcccggccactgcaggatgcccacctgggccacacctgctggccaggaccaaagccgatgtaatgtgcctgccctgctgtagctcagccagtcttgtagcctttcctagggagggggcgatgcctgttgtctaagggaaggaaactcagactcagagattagtgagctgggtgtggtggtgcacgcctgtggtcccagccactcgggaggctgaggcgggaggatcgcttcagcctgggaggttgaggctgcagtgagtcaagatcacaccgccgcacttcagcctgggtgacagagcgagacctcaactaaaaaaaaaaaaaaaaaaaaaaaaaagagagagagattaggtggcctgcctcattgtcatctagcatgccagtggcaagattggccccgtccctaatagctgagtttcacagggtctatggaaaccctgcagtctttgagacccagagaggaaagggacttgcctgaggtcacacaatgagtaactgatgtgaagggggaaggcatccccatctctccctgtggttgggtggcttcccagcacccactgtgtggtggggtggagagcctcggctggggttcacggggctgtgctctcatctccccagccttgtcttcaactcccttttcctcgccgaccttgaaccacgccttttcctgcaacaaccccagcacccttccccgtggatcccagcccatgagtcctcgaactacaatggggcggaggaggcagcgaagaagggaacacaagagctcgtgtaagctgtggtctcttccctcctccttgggctgcttgtatgtctgagagtgaggcttgccaaagggtgtatgtcagggcgaggggaggtattttgggcagagctccaggtgtatgcgtgggaatgttaaataacatgagtggaacaccaggctgtcatggatggttgggcaggttgtgcactgctcaagaggaccactgagaggtgccagttactttgtacacttttattcttgtatttttattatgaaaaattcctaggatttggtgataacgtccttgaggaaaggaagtcttttcagatgtgcatgaagttttcacattttttgccattcagtcctgattcattcatggataaagcctcagtgctgcgttactatatccttaccacctctctgccatttgttaatttcccctaagacaaagacatggcctgagactctagctgtccagaatgtaataatttccagtcttacttctctgcttatttattgttcaaaattgcccttttgaaataaagatatttacatgttaagaaaagtaaatcaatagaagacaaaagtagtgaatgataaggcaggagccctgtggaagtggcaaaacacaataatgcctaaaattttgaaacccttcttgggaacagtctttcctttgttgatgcagaaagggttctcagcctcctgccacatgagctgcagaggcctccaggaaggatagaagatcaaactgggccatttgagatagaaccaggtgaaagaagagaggagtacaggtcacctggtgtctgaaaaaagctaaatatggttctacactccctggcagccaaagggaaatgggaaacagatttcagtcagatgagagagaaaatatatctctactaaccacctttcctggccaccaaagtggggaatatgtagatgaaaagatgcagaaatgctgttcgtaggtgggggatgtggagactggaggctcttgcgactcctctgcctgtctccttcctgggatgtgtaactaagaaagtactatcattattgctgttgatagtaatttattaattaattataattaattaattatggggcatagtactgaatgtacatactatggggacatagtagtgaaaagaaacaaataggccaggcatggtggctcacgcctgtaatccccacactttgggaggccgaggtgggcagatcacttgaggccaggagttcgagaccagcctgaccaacatggcgaaactccatctctaccaaaaatacaacaaattagccttgtatggtggcacacgcctgtaatcctagctactctggaggtgggaaaatcgcttgaacccgggaggcggaggttgcagtgagccgaggtggcgcttctgcactccaccctgggcgacacagtgagactttgtctcaaaataaataaataaatacatataaaaacacaatatacctaaaaacataacatattacacattttgtaatgtataatatacaatataatttaataatataatatgacacaataatataattagtaatgaaataccaaataaattttgtttgataaataataaatgactttcaggattcatattaatgatgcaaatatatttcatatatggaatgtaaaacaatatttattaaataaccttatgtatcaaatagttaaacatagagttgccatatcacccagcaattccactcctaggtatatgcccaagagaagtgaaaacatgtgtcatctccacctaaaaacttatacacaaatgttcatagtagcattattcactgtagccaaatagtggaaggaacgcagtatccaccaatggatgaatagataaacaaaatgtggtgtatccatacaatggaatattattcagccacaaaaaggaatgcaattctgacacctgcaaaatgtggatgaacttgaaaacattatgccaagtgaaagcagcctgtcacaaaggccacatggtgcatgattctgtttatataaagtgcccagaacaggcaaatgcagagatgaaagtagattcgcggttgcctagggctgagggacataggaagatctttggggatggctgaagggaacagggtttcttctggaggtgatgaaatgttctcaaatgcatcgtggtgatgtttgcataattgtgaatacactaaaaaccactgaattgtacacattaaataggtgactactgtggtatgtaaattatatctcaataaacctcttaccgaaaagcagagtgacataatatagtagatactacagtagatcacagcacaataatacaataaaatgacactgccccccagaacctgctttacagcatgacagtcaatcccagccactgtcttccctagtccttgccacaccccacgaggtgggaatcaacgatcccattgttcagatgaggaagc

SEQ ID NO: 2352 - DNA, 1963 bp, Homo sapiens
tttgaaaatcataatccaaaaagctatttgaaatactgattttataacttaaaattcattatctgtcttaaatattttggagggtagagggaagagtgagggaatagaaagattggaaatggcaaagctgatactggggggaaactgcacatctaagatccaagatccattataatgaaggccctttagtctctgtcacctaagaaaaggaaaatctacaaaaaaaagtatataggcagaacatgttcacaaaggacacatagaagcaactgtgggttctggtggacaatcagtatttaaaactctgccctggaaattgatttaatgatacgttggttagaacattgaaaacaaagcaaaaccactccacattgagcgtcccaaacccaaagatctgaaatggtccaaaatgcaaaaccttgtcagtactgacctgatgctcaaaggaaatgctcactgaagcattttgaactctagatttgagatgctcaaccagtataatgtaaatattccaaaatctgaaagaaaaaaaaaatcccaaatccagaacttaatccatactgagttgtcttttttctccaacataggtaatttgtatagcacttatactcaaaacattcttatgagcattatttcattgaatagaataacctatacctattcccagtctagggaaattctcaatgtaactgtgagacaatagctgatggtcacactagtaagtgaaatttttataaacagcaatgaagatgggataagtctaaatttgtgtccatagtctcactaaaagtggtttaacacaaatgttgacaactgctagtgtgaaatgacatagctctttgcatctttcaaagtattttgtgatctgatccacagaaaagctctaggcaggaagctatttattaaaggtgaggattcctagcaaaataatatttgcaactatatgatttgttttaaaattaatcatgtgatttgttaaacctacatatgggggatagccaactaactacactttggaaaagtcttaaggcaagaaatacatttactatgtaaaagagatataatagaactctgttgcatagaaactttatactgtgattagtttttaaaacaaggaaatcaagagctctttaaattgctgctccaaaatttattttgtaacagatttttctaagcttataaagaagaaatgaactggtaattagaagtgtacatatatatgtatatacacacacatacacatacacaggctgaatattgttcatccgaaatgcttggaaataagtcttttggattttggattttttgaatttttgaatatttatatttactggttgagcatcccagatatgaaaatccaaaatcccaaatgccccaataaacatttcttctgaaggtcatgtcagcacttaaagttgtggattttggagcatttctaacaatggatactgaatctgtttgtgtatacgtgtgtgggtgcatgcttgcgtgcatcaaagtcatttgtaggcacagagctcccttctgttccttaattttcagaaaatgataccagtgaatctgaggaagaaaccagacatgtaaagacagggactgtaagagtaacaattagagttgtacaacgggaaatgctggctcttccagtcaaggtgacttggaaactttatttgtgtagtgaaataagggaaatctagagtcaatctctttttgacagatgagctgattaaagaaagttggacaggcttggtgtgagccatcgcactggcggtaatccactctgaagcctttgagtataataaacttacttctttgaagtttattcttcctgtggccagtgacttctatcataccattattcaacatatacttttttttgtttttgtttttgagatggagtctcgctctgtcgcccaggctcgagtgcagtagcaccatctcggcccactgcaagctccgcctcccg

SEQ ID NO: 2353 - DNA, 1136 bp, Homo sapiens
ggttggagtgcagtggtgtgaatatggtttactgaggcctcaatctcctgggttcaagtgatcttcatatctcagccttctgagtagctggggctacaggtgtaaccagaacagctgcaggtggggccaggaagggcaagagtggatcccaagatcctccaggttgacacgtcactcctgaaaacattctgctttaaacagaagccacttcgctgctctgacgtgaatttctataaccaagacatactcttcgacctagagagatcaaggcatgaaaaaatggaacttctcaaggatgaggaaacagactttgagaggtaaaataacacgacggaatctatgcactacctgatggctgagctgggacttatccccaggtccagtggcctctagagcacaggtgtgttactaccaccccattctgcccaagtgaagcaagcagcagagaaataatatgcaggtttgctttccaaggaacccaaatgaagatagaatgactcaaagagaagatgtatagaagtacttacagcatgtggcacatggtctctgtgcctgggcaccaagcagactgtggtatcaattacagtggaccctgtgcatccctcagccatccaggcaggtgcagacactcctcaggctagggatagcctcaggagactgactcagccagaaggttgccctggagaagaccaggtagtccctgttggcatgctcagaggacgtgtagatctctcatggatggtcaggacaatcaccagtaccaggatatctggatcaggtaaaagatattccaagaggaggttcagttcagaaggcaaatggggcagcaatcagcactgagatccctgttcatacacaatgggtaagagacccagggacctaattcagcccaagggaatgggttcaggtggcgtctgggtgagaatcagggccagcgaccatcatctgggactgagaggacaactcaattcagaggcagaaattcagatttcttgaggggcaatctagcatttatctttgaattagcatgaattcttatagaaatgcagtgttgctttatatgtatatgattttgagtttacacaaatagtacagtattatgaaccttgttctgtatttcactttttaaatcctag

SEQ ID NO: 2354 - DNA, 8268 bp, Homo sapiens
atggggagggccggcgccgcggccaacggcaccccgcagaacgtccagggcatcacctcctaccagcagcgaataactgcccagcatcctctgcccaaccaatcagaatgtaggaaaatctacagatatgacggaatctactgtgaatctacctaccagaagtatgttgaaatctttgtgagtcttccttctggctcgtacatcagtgcttgtggttgccagctattcaaaaatatccttgtattgaaaccttctttttatctaatttagtgggggagaaaaaaaaacaaaaaaacaaaccaacaaaccaaaccaaataaaaacaaccaaaacaatttgcctctgagatcaagacagaaaaaaaatgtttatttttttgaaattgtggtctaaaagttttttttaacgactgtattaaagctcttaggtaagcttctttatattgcaataaacaagtacttatatgcaagaaaatctcggcaaaatacattgcacaggtgctacgcatcttagggatttgaaaggtgtgttatgtataaattagctgtcactttttttcaatcctgtaatggaatgatgagttgtaatttgcataatcctttaagaagtcaaattatactgtcatgtagcagacttaacatgctagctaagatttcagagctttgcagctaattactatgtaccttacaggacagttaaattgaagttgagtcctctgtctttgctgccatttgctttgtccattacttaacagaatctgcactttgggtaacgaggtgttgttactatcactgaagtaaacactctgctctgggaggaaatggcattttaatatatcatagttggacttgtattgcttttgctgtgaagaaagttttcttcaaaaacagtaatccaattggaatcttccccaaaaaagatgaaatttatgctttccataaaagttatgaaatattgattgaagcaacattaacctttaattaaattctcctatggaaaatggaaagtaatgtaaacataattccactgaaggcattatgttttctggatatactttgcaaatatactttgttgtgtttttgtcttcacactcttaacttcttttgtagtagtgtgactattgaacaataccatttttttccttaaaaaatcctttgtgaatgcaagctggtgagtcctactttcatttactcctccaactggttgtagagcactttctttcatggtttccatttttaaaaaatcagaaattctggtggctgtgaaggctgctctctgaaatagacacaaagtggatactggatggagctgggactgttccctacctagcatggtttaggtgactgtatcactgtatctttactatatacatgtagttatctctggctttatttattgatatttcactgtctagatagtgttactagttttatccgaactggtataattataatgcagaattgttactgatcatcattttaaaaaattctttgttatctgtgagtcatttattgtggctcttggtggccaggtttctgtaatttgttagtgatttgtggatttgttgtatactttgaaaaatccttttgttgtataagaagagggtcctttaaggaccaaattaaagcaggatttgattactgaccattcaaataagtgcatatcaacaatcaactgttgtttatttttaattaagtcagtttcacgtgtctgaaattactgttggcttagaggctgagatttgtcaattaggagcccggatggggccaccaggaatttggcgcatagtaaggcttccctgctagctgtaggaatcatctcaagggcttgctttttaaagaattggtgttatttgtagtcaaggtagacacagtaggcagcacagctgtgactgccagggaaagtcactatggggatattcataacaaggaaatattggcaaataaatgatgaagaaggggaggaaatccccaagatgttgaattggagtactgtcactgagatgattaatggtgttgtgtattttagtgaagatgcttatctgaattgtcttgaaactatagtgtacatttaatagcacctataaaaaagcatgtggtacacaagcacactgaagagaaaaggccgggtattccgattttatcttcctattttctccaattaagtttttggcttctgtttattagaaagctggtgttaatatatattatataaggagtatgtttattctatatatttattactcatcagcatttatatagctactttccctagaagattgaaatgtattgtaaaaaaaaaaaacatggatagtattgtaaaaaacatgggtagtttttccacactcttgttgggtgaatattatcaagagtagggagatgtaggcaaacagtcagggtcacagggctgcagtgagtaaagggctacacttttatcaatgatggagtcagtacaattttaaaaacatttctacatcaatttctggtgaaggggtaactgttttggaagatcctctagctttcagtgtcaaaccataaatttcctgattctgtggtgtgaattatcacttgcctggagggattgttatccatgaaagcaggtgcatctttgggcaagttacttaatctccttgggcctcagtaattactagtagatataggaatagatacagacaaatgacatatcatccaatcttcaatgagcttatagtctattacagcgacgtttttctaactcttggttactattcaaacagttggatatgtatccaatttagtggatcaagatcctaattttaaaaatgaaatggaagagaacagaaaattttattgtattgcatttcagtaagaatgtgtcttattttgtgaggctccctttttagtttcatatttgtgtatgtgtacatataactgcacatatgtgtttactgggtagatcatgaggtaatatgtgtttctactgtgtttcatatccaaaaagaatggaagccactgtgatagagttgagtaggtaaatgtataaacagaataatatataggtgttgtcactttgtgttcagggtacactggattataaagaaagaaatggtcagtcttatgaaaagggttcaggaatgaagaggctacgctgtttggtctctcatattcagggatgtgctagagccaacttggatgggtttgtgagagtcaattgtatgcacctctttctcactttgttagttctggcctcacgttagtaacttgaagttgcagaaagtacttgcaccatggaaattggaaaatattgcaattctggtgctctctaagccccaagtgattgttatacatgtaccagcatgtcattgctcatatttgttccaactataattctatggttttataattattttgaattacatatttaaagacattattttctatgttgcatttagattttattggtaattatttaaatgattagacaattgtttcaataatgaaagtttaaaacaagcaggaatataaaacctgtgattattttaaaacgtctataattagttccaaataatagtaatagttactctaacttctgttaaatgcttattatactttcaatttaaaatttcaagtttaattggtaagatcaggttctttggtaaagggtaggtatatagtgttttaaaaaatacacctcatattgtaaatattttacaaattgtatcattttaagttaggcagttattttgctaagtattacaaattttgggcctcagacccctcctttcctttttagtggtcttttacagtttacaataatgtctgtgttttcgcaaacacatctgtaaagtagtggatttcatcagaagatgcaaaagttcttttcaaattaaaacagttgtcaatcttataaaaatattttcaaatacaaaagtaaaagtagcatagtctaaaataggagaaaagacaccccttccatactaactataactttgaactttattgttttttatttagagacagggtcttgctctgttgcctaggcagtggtgcaatcatagctcactgcagcctcgaactcctgggctcaagctcccaagtagctaagactacaggtgcatgcccccatgtctggcttttttgttttgtttttagtagaggacaaggtcttactctgttacccaggctggtctcgaactcctgggctcaagccatcctcccacctcagcctctaaaagtactggattcctggcctgaacttgaaagaaaatattgggtaagtcagaggaaataaaatattcatagacatgagatggaatagtagtagtaagttcaaaggaaatcacctatattaagaagaatatgagatagtgaggaaagataagtaggaaagagtcaactgagctaggtgtttgtagcttcaaaacttaagttgcaattcagccatatagttggacactgccatagagggatttgaggaagagtggggtgtctttaaagccaagaacaatccgttcacccgtatttagaaaagatggagtgagtctgagatggcagtttcaattactaacgtttattgagcacatgctatgccattgtaataggcatggcagtacctattttaaacaacgaggtttaatccaggattcctagactccaagtgtaaccaagattgagaagccctgattgagaaggtgtttgtaatggatttagacagttgtcattgaaagcagaagaggccattggcaaaattgtaaagtttgtctttgtttagctgtcttttccatcctttggaaccccatccttttccaagcccctttttctcctttgtgaaattcattccacctggatgcctggttagtgtttcaaacctgtgcctcatcggcacagagttgtgattgtctatagccctcattgcagatcaggtgttgttagctgatggtgttactgttctcaggacgatttgccttttcataagcaactccaggtgaacaaattcaagaaaatgggtagttttttccaacagaataatttcagacaccatgacagggcttggataaattcatatggggctagaggaaagtttctttcttcctgaaaatacaaatccagaatgtgggtactctactcagtatatagtgttaaggctggccttggccaagaagcgtggatttggattcacaaccaaaagagggaaggaattaacaagttccagggaagagaagaggagaatgagtgaagaaggagggaacgtgccagtctttatcagctcttttgtacaagacagagtgctaaccactttcatgtgttatcccaattaaggcgaacaagacaggcgccttgtcagggattctgctggggggaggatggtcacctatgctgaagaaaagggaaaggtcacggaggctccagcagcaggagtgaattcttttgctggttgtttaacctgattgactgattgctattatacagtcatcttcccctcacctgcacaatagaacaacttatgccagttgtgttaggatcagtaaataacaaaggattgagaaaagagttagaaatataaaatgaccttcataaagagctctaatgctaaacatgttaaacagacattgaactttgtagcaagaactgcttcaagcctttcgatatccaaatgaattctaatttccacatcatgcctttcagacttcagcatggtttctggtggtttctcccagttaattttagcatcacacgaatgcttttgcctataaatgacttgaagtagcatatgttggtaatgtggatggcatgaaagtgtattatttaggggttattctagactagcctagaagtgagtgaatttattcattcatttaacaaatatattttaatcatcacccacgggtcaggtgcttttctacacgaactgttctacactaactgacttattcagaggtgactaagaaaacctctgctctctagaagcctagaagactgagatatcaataagtaattgacattctgcctggagcggtgcctcaggagaaataagtgtcaactatggaagcagcaccacagaggggccatttttaatagtgcagggagcccaaggtcttcatggtggaggaggagctatctgagcttgggagggaacccgaggtaatggtttgggctaaaaggcatttctggtgtggcaaattgcaaaggacacaggcagaagtggagggctggggaacggtgacaggaggtgaggctggagaggaagggagagcagaggcctcagatcccagaggactgccatcctgggagagccctggcaggagttttcaggagtgtgacagagactgcatcttcgagaagaattaccctggaggtggattaggcctgaggctgctgtgggagtgttccatagcttcctctcctcttctttgtttcacaactcttgtaacttgctttgcaagaaggaatgtgatctcattgttcaattcccacctatgaaaaaaaaaagaaaaaaaaaaagaaggaatgtgaaattgtggtgtttgttagtttaaagttgttttttattgataaatatcttgaaggactctcccaatgtgaaatccggttcaggatctgtctgcaaactcattgcttttcctggcttgaggtgcccacctctgcctttctcctcacagaccacttgtaattcaagataaacgaatgccagagagtaaaaatggataggcgcaggcagcatgatttagaatgaaagaatattaattggtttcaccggagtgtatattttcattatgagagaagtgactacctagattttaaaaaataattggttggtgacacacctgcagtgtgcatgtgacctctagaaacttgagaacgaaagtaaaggtcaagatgagaggtgtagcaccacaacgagccttttgtaggcacgctgttgaacagcggcgttcaaaaatcgctaacaggtggtttcagaaagtcagtgatactaatgtgcttgtgtccagactttagaaatactacagcaaacttaaactgtggtttcagtaaattctccttaccttatgaacagcttcttctgtgtattgagtttacaaatgtgtctttagtgaatctttggacttagtttatgcattagagtataatcattatgctttgttctttgactatgagcaagctattttaaacaattaagtccatgcagtaatgtttagtcattgctagcggtggttaaatctcttggaaatggatctggctttgatcctagccccacaattatctgttacatgtgggacagtgactaagttgcttaactttaagcttctgtttgcttatctctaaaagtaggggcaaaacaatacctcagaggttgttttgaggatgaatgtgatgattaggatggtgataataatgaacattactgatcttttaccagatgccaacgtcaggcactgggctaatggcttaacatacatttaaaaaaatccttacaataaacttatgccttaggtatgattattaccacattttacagataaggtaacagaagcttacagagctgacagaactaactcaaggttaagaaggcaggatgtggtggaattaagattagtatcagcaaattatgatccactagccacatctacccccaaccccccagtttttgtaaagttttattggaacaaggccatacccattcatttgtggtggaattaggattagtatcactgaattagggcccattagccaaatctaccccatccccctccatttttgtaaatacaattttattggaaaatatccataaccatttaggtattatctgtgactccgttcctgctataagagcatagttgatagtagtgacagagaccatatggcccacaaagctgcaaatatttacaatctggccatttatagaagtttgctgacctccgcattagacctcaggctatctgacttcagaacctaaggtctaaaccataaaaacactaatcatggtgcttggcatatagtaaacatacactaaatgagtactaccttgttgctcatctaacttactatagaactgttaacctcgcagaattagtatctgcaaaatggaaataataagcattcaaccgccagcaagaaaagtcataatgactatggagatgttgaagaacttaaagttccaaaaggaacacacgctgaattatgtgttatagttgttgtttattactatgctttatgtaatataaatgagaaattccattttcacaccaaagtacagtattgccttaaaggagatcattgtgaattttag

SEQ ID NO: 2355 - DNA, 6135 bp, Homo sapiens
tatttatcatagttatgctgaagttactccctgataaatctaacgtctgtgctttctagagtctcagcctgttgactgttttctcatttgattattgctcacattttttctctttgtgggtctcaaaattttttactctatgttggatattgtgagaaaaatagtagagattgagaaaattaatatttatttaccctaaaaaagtgcatactttttttgttagaccttttcttgggaaagttgaggaaatctgttgtatatttgaggtatgtgggattatttcagctttagttggattagtttaccactgacttcaaatgttttgaaaacagaataaggtcttttctatcactagggcttgtgatctgagcactggcaagatttcagagatctctgtgtgctcccagactgttttggttgctagggagttctttttcctttcctgtttctgactttattaatctcaggaggtctctcttctttttgctctgctgcttcaagcctttggcatccagtgccttgtacttaatgaaagtttgcaacactctgagcaactgttctcagttcttctgccttatttctggcctccgttgcaactgttttgacctagtgaaggcctagactttctcagacagatttcttttaactcttctgccctgactccagtcttcactgggatgctgccttgcacttagggaaggttcacatgcctcaaggatctctctctctcagatttcttgactttccctcagtcttcagtatagtcctcctctgtgcctggtgaagacctgtggtaaagtgctggcagagaggaagctaaatcacgtaaaaattaagaaacagctcagcgtttcacagctaagctgccggcttccccttgaaggaataggagtagacctgctgaactatcacatgagagaagaggcccaaaagcttgcacactacagtcaagctggcccttaaagagatggacctagaagatgctgagccagatgtactcaattacttctccaaaattcatcaattagaactgcttcttgctgccgccatatgaagaaggacgtgttcgcttccccttcctccatgattgtaagtttcctgagacctcgccagccatgctgaactgtgagtcaattaaacctctttcctttataaattacccagtctcgagtatgtctttattagcagtgtgagaatggactaatacacctgccatgcctgttccttacttactaaaaaaatttactcccctttctccatagaatgcacgcaatttgaccttatgctacacttccagtctctactcctgcctctttatgctctgtccacatgtgatttctcactattctctacatggcttgtgcccctataaggtttgtgcccttcatttcctgtgccctctacctctggttcccatgctcagaatatcagtgtccttactgcaggggtgtataagctcagatctcacctcctccatgaagcccctatagacacccagagaggattaataatgaccctcctccatgtttccataacactgctaggctttctcctgaatttttgtttttaggctaatgaattaggctttaatctcttttaactctaaggtataattagatgtactatattcacagaatcaagggaatttgagttggaaagggccctagagatcagctagaaccacctcctcatttcaccagaaataattgaaattttaggggacttgtccaatttactatttttggctagttgtaggactcaaactagaactgcttcctggatctgtgctttttcattagaatatgttgtagccatgtggtagacagaaaaatctgctcccctcccctcttcagatgtccatattctattccatggaacttgtgaatatgttaggttacatggcaaagagagattaaggttgtagatgatattaaagtggctaattagctaaatttaaaatagggagattttcctgggttatctaggtgggtcctgtgtaatcacaagagtcctttaaatgttgaagggagaaacagaagagtgtcagagcaatatgctatggaaaagtttggctgccatcactggctttgaagatagaaggggccatgaaccagggaatgtggacctcttttggaagatgaaaaagacaaaaaaaaaaaaaaaaaaaaaaaaaaagaaagaaagaaagaaagaaaaaggattctgtcccagagcctccaaaaggtatatagtcctgctagcattttgattctagtccagtgagacacagatttctgacttccacaaccataagataataaatttatattgttttaagctactgaatttgtggtaatttgttaccataacaagaaatgcatgtacttaagtccaaacaaggttaaattgataactcaaagcttactaaagaggaatatgattactgaggggttttttttaaggcatattttatttccacaaactttgagatttactctgaatgttttgggttctatttattcattcatccaatgaatctctattgaatgtgtgacgtttgctgtagtagacattatggtagtttaattttatgcctcagtgttttcagtcttccctgcatctatcttcttaccatggactcattatgggtgaagggtactttcttatgctttgactttggacttggccatgtgacttgttttggccaattatatgtgggcagaagtgagtgtgtcagttttgagccaagcttaagagccatgctattgctttagagaagcttctccttgtcatctgctccctagcctggataacacatggaacacttgaaacagaatatctagctgagccccagacctgtgagtaaagcaaacttattgctctatgctagtagtgttactgagtttgttatacaaccttattatgacagttcttgactggtactgtcatgtaaacacatgatctaaacacacctgaatagaagcataggcagtatcgtagaggtatttcaagtataaaggagagttgtgtcaaagcacctgactcttgctgggagaatcaaggaagtcttcagagatgaaatgacatttgagctgaatcataaaggatgaatatgatttctttaggtcaataaagggtgtgggtgagtagataggaaaggttatgcgaggtaagtaaaataactttaagcagatttaaaggtaatttagtttcagctgaaggagctggtaaatatgccctttctttatttggagtttgctttttttgatactttttctatagaatgtgaaaagtaatatttcccaagtagtttgttaaacagatctcatgtctgctttctgaagtgataattacaagattatgtcaaaacctgtttaagagagtgagagtgtggaagaagcaagaaataaagagggactcattttaagaggtctctcatggtccaggtagattctatgcctccttcgtgggcagaaccaatttcctgtctctcttcttatgtataacaggatggtagcaaaatcacgcatctttttctgagatgatttttaatgcaaaattgtactttccatctgaattgttcttggctcacttggattgttaagtggtcttaattaagcatgggaatcaataactaagaagaattaagagattgttgggaacatcatgactatcatttgtaaactatatcatgagtggtgcttatgagaccaaagccattgttttatttcctcagtgttttggtgttttctgaggtctggggtatcctcctgtaccctaaccctagttggcattttccacatgcacactttcagcaacaagggaaagaggagacagtgtagaatcctttccttctagagagaacagcgacattttccaaatgatcatgggtcaatagtatctttgtctaaaaagattgatatatgtcatgatttcaacagttttggaatttgttcaacaagagcggtcttgggaatacttaagagcatgtgcacattgagatgtgtgttaacacctctcactatcatatctgaaatttccaattttaattcttgtgtaatatattcttgttacttaaaaaatttcatattcacatacccaaattctatgcaacctgcaggaaaacatgcatactctttctctatggcaaatggcatgcaattctggcatgagcagggttagaaatgttaatgaagagggatctgcaagtgtaactaatatgatctcatatttaaacaattcacaaatcaataccatggttggatttagataccagatgtcaaaccacatagtaatgcagatacagttgcttgcctccctgtagctggtcgccagaaagaaacagatggttaaaaagatatgtagccgaggcaaggcatggaaataggaaaccacagagcagaaattctgccatttaagtaacagtaattttctagtctgaaaaacctggctgttttatacctccacttatacacttaagcagtttaaatgtgaaacatagcaaaaatagtccaagcaaggctggcaacttgcaaattttgcaatgcataattgcatctcaaaaatctcggaggcagacgcacagcagtaaaaagtaaacacttgtatgcagttgaacacaattatgtggtggttattaccttagctcattatggcatcagaagggactctgtgaacttgtgctctaactagcaggtcaggcaaaatgcaaataagtaccaaatttgaaagcgagtgacaaaaaacagatacaatttagactgggagtctataatttggcttttaaaaataatcctcagcaagaattatcctcattacaataatggcttgtttattctgcacaacttgtttgcaattacagaccctctttcaaagctgatttcaacaagaaataagagcatacaaaaaagggagagctttgtggctggtcagttgttataattagagttgatgcatatatgtgtcataaaaccatttacgccttttctccaaatcttttaatttcagatttctgtcactaaaatctaaagtctgaaatagtcttttattctaaagaaatcattataattgaatttctaatgagggtgtctatggagctttgttcatggtattcctattatagaactggagtcctctgcatctattatggtcaggtgaccatgaaatgatgagctacagctgttacagggcatgtctctgctggtgcttaattcatagcaaatacacattttattgctaatgtgcttcctcattcatttcttcaaatatttattcaaatatttatggggtacctacaacgagaaggcatagatcatggttaaggatgccagacagcttgggctggaatcttggcccagacatttactagttgtgtgacctgggacctctgtgcctcagttcctcccgttttaaaatgaagacaattataactcccttataggattgttatgaagattaaataagttaatatacctaaaaaactcagaagaatacttgacacatagtaatgtgctgcctgttgttatttgctgggccttgggggcagagtagtgaacaagacggggttgatttctaccttcatagaatttttgttctgggaaagagggaagaaggcattcagcaatgaatcatccatttaattattaaattacattggaattaagagcaatagggaaggataaaactgtgaaggtattgtataaaatgggaacttgacctgttctgagtaggtttctgccttcctgaaagaagtgatatttgagatctgaaggatgggtaggagttacttagaagagatattagggaagttgctttccctacagaagccataggagagatgaaaggtttaacgtgggaaattcaattagagaccctgtggctggaaatgactcagtcaaacaattataaaaatagtttaattataaattgagttttcctgtcattgattcttgttcttccagtgagaccctaccatgctttgcaagcctttcactcatgcaactcacagtgaaatcctgggcttttcattgatgtagatgtttctgggtttttttcctagctcatgacaaaattggtttccactgcactttgttgtattcagagaagtcaaataaaagtcccaattgaaaaatacatgaaaatagatgtctaataagc

SEQ ID NO: 2356 - DNA, 735 bp, Homo sapiens
attgaggtttagaagatgggaatttttccctggaaaagaagctgtagatgaaaccaaacctaaggaaagtgcccggcaggacgagggtaaagaagaggaacctgaggctgaccaagaacatgcctgaactctaagaaatggctttccacatccccaccctcccctctcctgagcctgtctctccctaccctcttctcagctccactctgaagtcccttcctgtcctgctcacgtctgtgagtctgtcctttcccacccactagccctctttctctctgtgtggcaaacatttaaaaaaaaaaaaaaaaagcaggaaagatcccaagtcaaacagtgtggcttaaacattttttgtttcttggtgttgttatggcaagtttttggtaatgatgattcaatcattttgggaaattcttgcactgtatccaagttatttgatctggtgcgtgtggccctgtgggagtccactttcctctctctctctctctctgttccaagtgtgtgtgcaatgttccgttcatctgaggagtccaaaatatcgagtgaattcaaaatcatttttgttttcctccttttcaatgtgatggaatgaacaaaaaggaaaaaattcaaaaaacccagtttgttttaaaaataaataaataaagcaaatgtgccaattagcgtaaacttgcggctctaaggctcctttttcaacccgaatattaataaatcatgagagtaatcaaggtccaa

SEQ ID NO: 2357 - DNA, 24980 bp, Homo sapiens
ctaggcttgtgcccatggaggaattcactaggagactaaattccactttcaggctgcctgcaaaactcccactgctgtcagggagatttctgggcctttaatgaggggagaatttgattctaagacttcttgttaagataaagacctggctggtttattaactctatccagctggggtacggactcacagacaaataattaaacattccctgcctaagaaagtcagggtctcagagaaaacctgggctggatccggtgggaaaggggaaaaggattatcccttacccctgtaccaagaatcatttcctgaaagcctaaagctggtgggccttttcctctccagaagaacttttctttctctcctctccacatatctggatctaatcttaaattgcatcctagaatatcagagttcatttattcaacaaatatttattggatacctactgtgtgccggagactttgctaggcttggggtggtaatgggagtacttagaggacttcctggtcattaataccaggttatacaggaagagactggggccccaagggaagaagtcacatatctgggacaacaggtttagtgaggttgtgggcccactctcactcccataaaatgcttcccctccaccctccctgttttctcctgggagtttgactctccttagggcacctctgagttttagctgcgggattgcaagtttcctgaatgtggaaccatgcctgtcacctcttggctggcctttcaagccactcaggaatctcagtacctgcattgactcattcaaaaatatttgaatacatattcaaacagaaatttttagttcaagggctcaatgcctggaagttagtaataatttaatgtttggataattcatagtaactgatattaataacaataactaatcttttctcagccttctagtatgaaaaatatgttctcacatatctgcatattaactctcatgattgccctggcattaagtattattatttacttttttgttaaggtgaagaacttgagactcagaaaggactttcttaaattctttcagcaaatagtggaatggagacttgaatactgagtgtcaaccttgtgaccatcctattgtattgtactgttgtgcacaaataaaaccccaaaagtgtgatgcaagtgtgcaggtaaaccatctattaaaatagtgggaatttgatgaaagaggtcatgcaagaggaagggtttaaattgtcttagagattcctgtactcatatgtttatggcagcactgttcacaatagcaaatatatggaatcaacctaagtatccaccaatgcatgattggataaagaaaatgtggtatatatacacagtagaacactattcaaccataaaaatgaataaaattatgtcttttgcaacaacacagatggaactggaggccattatcttaagtgaaacaaatcagacacagaaagacaaataccacatgttctcatttgtaagtaggagataaataatatagacacatggacatagagtgtggaatgatggacattggagactgggaaaggtctgaaggtgggaggagggtggataatgagaaattacttaatgggtactgatatggtttggctctgtgtccgccctcaaatcttaccttgaattgtaataatccccacatgtcatgggagggacctggtgggaggtaattgaatcatggggttggttttccccatgctgttctcatggtagtgaataagtctcacaagatctgatggttttataaggggagttcccctgcatatgccctcttgcctgccaccatgtaagatgtgactttgctcctcctttgccttccgccgtgattgtgaggcctccccagccatgtggaactgtgagtcaattaaacctctttcctttataaattacccagtcttgggtatgtttttattagcagcgtgagaacagacaaagaaatgtacaatctatgttactggagtgatgaatagcctaaaggccctgacttgaccactacatgatctatgcatgtaacaaaattacacttgtaccccataaatttatacaaataaaaaataaaataaaacacaatgagataccattgcaccctagcgtggttaaaaataaaaagacaaataataccaagggttggcagagaagtggaacctggaatttccatgcattgctagtgctaatggagaatggtacagcactttggaacctatttgtcagtttctttgagaattaaacatacacttaccataggacctagcaatcccagtcctgagcttttactcaagagaaaaatgaaagcatagaaaaataaaataatatctgtatatgagtgctcatggcagttttactcacaatagctcaaaagtggaaacaatccaaatgctcatcacctggtgattggttaaatacatttcagtgcatccatacaatgggaaagatggccttttaattaaatggtgctggaacaattggataacaattttaatgtgataaaaaggaaggaactgctgatacttgtaacagcattgatgaatcacaaaaacctgatgctaagggaaggcaaccagacacaaaattattctaataatgatgaacttctggaaaaggcaaaaccatagcagctgaaattggtgaatggttgcctgggactggctatggtagggaattcactgtaagagagtatcgatgttacttttgggggagaggaaagtgtgctatatcttgtttgtgttggtggttacattattgtacatatttgtcaaaactcattgaattgtacataaaattggtgaattttattgcgttaaattatgtcataaagctaattttaaaataaataaattgtcttagaaggaggaacagtgttcagaagagaggttaataattaaatatgtgtgtgtgtatgtgtgtgtgtgcatgcatgctcatgtgtgtagaggggaaagatgtgtgtatgtgtgtgtgtgtgtttgcttaggccattccagaaggaggcaataacctaagtgggccttgcatgaagcatggtatgtttgttgaatgatgagtttgaagtcctaagctggaaggtgtattcatgaggcaagccagtgagcaggaagtgggaaggagacaggcccaggggtggtttgtgtggggtggataggatccaaatctccatttggtaatttactagctatatgactttgggcaaattatttatctcagcttgtttcctcttctttaaaataagcataatacttagctactgcaaggtggttgcaaggattaaatgtcactatgcatgtcaacagcatagttggcccattcccagatgattttaggtgttcaagataaattagtacttgctcttcaaccataaaaggggctttgtgatgcaaagtctataaggaagcttagcaccagtcatgaagcataaaggagtatgaatagtgtccccaaactgggaaaggttggtggtttgtgagacataaagaaataatttttgtgtttactttcgtttgttcatttgttttagaaaattgtggtcaagataggtaataaatcagagtctggaggcagaccaggttgggggtacttaaaggacatacatgagaagagaaattcttgtgatatagtagaagaatgaaggggaaaggtagggacagggcatgaaacaacaaccatcaacatttactgagtatttcctatgtgccaggcattgttctaaatgctttaaagcctgagctcatttaacacatcagatgaattaacttgtccagtactcacatcacacctgaggtggaagctgctcttatgtgtatctggaagtaaggaaactgaggcacagccaggtgaaggtgcgtgcaaagaatgcatgcatctacctcaatttacttttaaaatggatttaaaaagtccttaaagaaacatgctctcattatagaaaattcaaaaaagatttccatctctacggttctcttatattcaatttatgttggtgcgttttctttgagagtgttttagattattttactctctacttatatgtaattacaatcatggtgtgcatttatatatatcaggagcatattgcttcttgtcttcatgactatagttttaaatggtggtttaatatttcattaagtgggtatattagaactatttttttctgctaatatgaacatcttgggacagaaatctttgacagcaactcttattatgttttaaagatgcatttcctgaggttgaattactgaatgaaatagagtggccaatttcatggctcttcattcatattgccaatttgcttttcccacagggttgaacacatttatagtatcctgaacaacgcaggaggctatgaatttaattacatccttgccagcattgtgtgtttttatttttatttttttgttaaatttattagggaaatatggtagactgtgtgaattttaatttgcatctttttacttattattgggattgatcattttctctcacatgaggtccctctttcatgatttaaaaaactttttggtgagtgtaattttttcaaaacaaacatttgcatgttaggataaatgaagtacataacggggcaaagagggggtaaacttgcagaccaggagatttttgagcctagaaaactggaagaaaggccacccccagcctaaacaaacagaggggaggcaggagtcattggtagaatacttggaacctgtttcagtgctgtccagaaagtggtgagtcttgccatcctctggttaatatcttctttttcctttttattacacaaataaagtatgttcattgcagaaaaaaataaaaataaggacaaagaaataaaaatcagccatatttccaccattcagacaatcctttaacatttcattgtatactctctccctctttgtatagaaaatataacacacatacacctctatataatagtgtctcttttgagctttcttctcttaaccatgaatttcttgctcttccttccttccatttccctgtcactctctctcacagctcaaatgcctttgatcttgtagttgtttgcacttccttattcagaattgcttaagagacttgagaccttgggtcacatcttcaaggtcctatgggagtccttatggaatctgaaccaagccacacagttggccacagttatttctgtgtcttttttcaaacctgactctatttgttatcatgtgcttctgactggcagagggcaacttggctagatctggaaggacaaacacaagataaatctcatgtgtgtgctcatagtcatcgtgacttctttgaagaagatctgtgtaatctagtagatattctccaaaaaagtgataaaaaaaagttcatgtcggactgatctcaacacttctattattgacttccattattgaaaaattaaagtttcaagggcagctctcttcataggctcaatttatgaaaggggagcctcattctgttcttatgtctccttcatttcttcttagccttttaaaaatttggtctatagggatagatgggttctaatgaggctcagcaggccaccagctcctaaattccttgtcagaggcagaattttggatggaacacttatgtgcttattatatgataaactcgtttgtatacatttaaccactctagattctccaatctttccaaacttcagttactgtatctgtaaaagtagaaataataatgcctattttgtagatttgccatgggaataaatggtagagagaaggtaaaagcttagtccaggaactggctcaaagaaggcacctcatatatggcagctcttattacataaggggttgcaatggtgatttcaccctagcactgatcatgacctgcagttgtgttggaagctcctctgggagaaggatagcctacaaagtatgcaagatgatttacacaggccatcccatctaatctgtctgccatcctactagataaattattaccctccattttatggattcatttattcattcaacaaatatttataaagcacctcctgcgtgcgaggcactatttcagaatgttggaggcacagatgttggtgaacagagcaaagcccctgttctcatggagcttacattcaggttgaaggagacaggtgacaagtaagtgaatgactatttcaaggggtggtaagattatgagggaggagagagcaggacatggaagatagcggagcagaacgggggaggctgctattatacagatccatctgtttctgtgaaaggcagatcagaggaggcctccagtagtgtaaatccgagcagagacctgaaattagtgagagagtgagccatgctgataacccacggaggcacgctctgggcagtaggccctgcatctgcaagggctcggaggtgggaacgcactggttggaggcacaaggagggcattgtggttgggatggagtgagtgacagggagtgcagtgggagaagaggtgagagaagaagtactggctgtgggagaaaatatttagtagggccctgcagggcattgtgagttctttagcttttactgagggaaataagaagtagagaagtgacacatgatctgactttgcaaagtgtcactatggctgctgcatgagaaaagtctttaagggtgagggtgtggaagcagggagaccagcgaggtgactgttgtagtaatctaagcaagggataatgggaatgtggatctcggtgctaatggggtgggtggcacgaagaggtcaggttggggaaggtagagctggcaggctttgctgacggactggaaggtgggggtgtaaatacagtatgatggttttagacctgagtaactggtggcataggagttgccattttctaagatggggaacacagggtggagcaggaatcaagagtttggttggggcatgttaaatttgagatgtctgttaatggtccagttgagatgttaggtatgtacttaaatatcagagcttagggttttggggagaggtctgggctaaacatttggaagccttttgcatataactagtgtttgtcatataaataatatttaaggccatgggtaagatcgccaaggaaatgagtacagacagaacagagaagtggcccgaggactaagctggtagcatttcaacatggcacaggtgagggaaacctacgacccatgagaaaaatcaaagcaaggggagtcaagccatttgcttcacagtgagtagcagagatggaaatccaagctctatgggtctgactctgaagtctgtgttattaacccctcagcaacactccaaatgctggagcaaagaggtcttttcctggagacataaaacgtaggtggcttgccagtctcacctctcaatgcgccaggattgcaagctaagccctcaggtttgagcaaataagatacttcagttgctggtagaaccagactacatccatcagttccagctggtgcagtactcaaggatctccagggagcaagaaagggctagtaattaagaaagattcctttcctgagctgcactgggtcacagtgactgtcagggttaaaagattgatggcttaataaagaccacctgaaaaggcaattgaccagccagggaaaaacaatcatcgccacccacccactaccggcagagtctccgttgagtcccaccatgaaagcagagctgcttggaactatctgcactcaatatcaggattgtttgaacaatcctcaaacaagcataagatgcattccttcattaactggtagtctactctctgcccatttcctcgactaggtatgtcgagataaataagcagttcccctgctcttaggagttcagaatattgcagaggccatgattatattcaagattctgaacaagccaagccctccatttaaaaatgctgcaggtatgtatgttttaatcttttaaaacttcacttctataatggtgtggtgatttagagcccagtatgtagtaaatattcaataggttattcactgaatttgaagcatgtgtggagtcatagagaaagggcccagaatcaagaattaggagacctggctgggcgtggtggctcatgcctgtaatcccagcactttgggaggctgaggcgggtggatcacttgagatcaggagttcgagatcagcctggccaacatggtaaaaccccatctctactaaaaatacaaaaattagccaggtgtggtggcgcacacctgtagtcccacctactctggaggctgaggcaggagaattgctttaacctgggaggcagaagttgcagtgagcggagatcttgccactgcactccagcctgggtgacagagtgagactccatctccaaaaaattaaaaagaattaggagaccagcattgcagctacagttttgccaaaaataaaaataaaaaataaaaaaaaatggccttctaactttaaacagatccctccctctttcttcttctctggattttagtttgcccatctgtcaaaaatcgggttgaattaaattatcgttggagatattttagatctaagattagaatttgtctaaaggtctaaaagcctcggttaaaaaaaaatccccttcctaaaatgctactaaatgtcaagatgtgcttttcgtagcacaggtgttccagaggatttaggaaaccgaagcagatgcatgcctgctgtgtgaaacccgccatcttctttgtggaaccagcccctaccccaatattccacagattctaattgctcagcagttcagcttgatggaacacctggctgggcagtttccaggaaacttagcccaggtcattctctatggcagcccaacagtggcaaggtggaaaatatatgagctacctttgcctatttcagtgcctgccagaagcagtgcatatgttggccaggaatatggcaactgtggagcgtcctcatgctttgagccagatgaaggatggatctgtgggtgccccaacccagaattcgggctgctggtatgcatgttgcaaaaagaaaaggtgcttttttcactggatacctcttggaagagaaattgctgtctatttactttaagtttaggaagtcccttttggggagcttccagtgcagaattttcctaagggagagagtccagtgaattttcatccttagtgccaccatattagttctagccctggctttttttcttggcagaaccattatatagcctcctttttaagtgaggacctgccttcagtctccttccaattcattttctgtaaaggaactattaatagagttaccttttagaaaaaaataaataaaagggagctgaaaattcctcaaacaaattaggtcacgttactgccctgctgatgaggcctccaaaggctcccatagcacttagcattgatgcagacacccaccatggcttgcaagcccaagtggcttcacctgtctccccttctgatctcttgtcaaattgcatcattttcctttcactcattaatttcatccactttcggttttctgagtttgccacattttcacccatctcagaggcttacccaatcttttctctctgctgtggatactcttctctctcccattcctttctccttcttctaagtttgcctctgaaagcatttccctggacactttatctaaagttaaagctctcactatttttctggctcagctccttacacatcaaaatgggcaaatgttttatttatgtgtttttcccccctactaccccaaccccgctgtgaatgctcagcttcaggaaagcagaaaccatttctatgttatttactgttgtctgtgtcaccagggcctccctcagtgccaagcacataatagatactcagtgaatgtttgctaaatgaccgatctggttctgctcaacttcccaatgtcaacccccatcccaacccacatacacttaactatgtccgattcttgcagcttctgccaggtccagcactcttcctggctgctgctcatttgcgtgtactgttcccttgccagaagtatccttctcccctattttcctcctgagaaacaaactcatctttcaagactcagttcaaatattatcttctctttggtgcttgttcccatctttcctagcaaaattaaaagcatctgtcccatgatctgtgcacacccaagttgcagcctttgccattctgcatggtcctgatctgttttcatatctacttcccccactgaactgacctcttagagacaagaacaatatccagcttaccttacatccctacttcttaacagcgtttgttgtatagtcaacattcgatgaatgtttgtggaggtaatacataccgtaataaataaaggagctgtctttgtgaaatttcagtatgtagagtcttcctatctgagaaacctatatgtgtatacttgctgtttgaatatttcctcttagaaattttctctggggttcctggctcagggagaccacctctatgttttgtgtcttctaggattaggcagttggtttggtttagaaaacaagagtttgctgttacctgctttaaaagcaacctagcagtcaacaaaagtcccctgggagaaatcaggttgctagtgagggcacagctccactcacaaatacttcgtttgctagtctacccacctgtagaactgtttgttaaggattcattcattcattcatccacagactaatgcattcattcattcattcactcactgtccattgttcccatgccaggcactgtgttggtgctatggttacagagatacaagaggtagagtgatggtcctgttccttgtgggtgaggaagcacagacagaccaatagtgtagtgggatcagtgttctggttgggggtgtgtgggcaaagtcatgtggcagcagaaggaggttaaggaagcatacagaggctctttatgctgacttctgatacatgatagaattatttgatggataagggaggtgagaaagagaggaaagaaagaagatggggggaacagcatccacaaaggcatgaaacaaggagtagtaagtgtgcttgagaaatggcaaggagtttgcaattaactgtcttcagagctttgttactcaaggtttgataagtggaccagcagcattgactttgcctggacacttgctgaacaacagaatctggtgttctcctctggcccaactaagtcagaatctacattgtaataagatccccaggtagttcctatgcatgttaatgtttcagaaaaactgggcaagaggcatttttcaaactctagcacacatcaaatcacctgcaaggtttgttaaaaaacaacaacaataacaacctccacaacaaaaacagatcactgggctccatgtcagagtttctgaatcagtagctctggatggggcctgagagtgcacatttctctaaggttcacaagtgatgctgctgctgatggtccaagcaccacactttgaaaaccactgtggcaaagtgtagtagaaagggtaatttctggaaaatgaatgggggcaggtagcagaattcaaatcctgaaggaccttgagtgcagaagtgtttggactttgccctggagtgctgaggactgctgtggagttttcacacaggagagtgacatggtcactcgtttatgttgggaagatctccctggcagcatgtggaggatggttgggatgacagtcactatattccaggtgaagctcatggatttccaaccaagtcaatggcaatagagatggcttcaagataaattagggggtcagaatctacaggattcagtgacaatagagatggcatcaagataaattatggggtcagaatctatgagtcagattggtcgaatgtgagggtggtaggcacacccctgctttctggggacctgggcgctggaggacatcctgttgcttttttcctcctgtggctgtcacccttttaggtccagaaagccatcccactttatttgccttctctccacaagtcggcctctggctccatctgacaggtttcagcctgcagtgtttgcagaaagggatgcagtaaaccattcagaaataggatttattaataggaggcatgtaattactgccagacacagcaatctgaagagtttatggcttaaatgtttggtgtcattcattaaaacaaagtgggctcttggcatggacgctgtcaccctgtgaccagatccatctgtttctgtgaaagcccctcccctcccgggtctgctagttgagcctggctgaaggggcagagccaggcaaatcatcagggcagggtgtttggtgctgggagtgggccttgctgggagtcctttaaggagcaggtcctggtttcagggcagggttcccagaggggatcttggcctgtctgcatttgtctcctgaacctctgattccatagtaacatgttggaagacctattattaacaatgatctctcacatttataactcctccaaagtctttctcccttttattttgcatctcaccagcccctcacagaacctatgatgcagatggcagaggttagcatggcctcttgacaaatgaaaaactgaggcccagagaaactgggtgagtccccgaaagtcatacaggcaaaggagcgtgcttgaactgaggtcccacaaagtcatgcttgaaatcccagctcagtgatgagagtgttggtttgtctcgaggacagacccagctgtcagaggtactgctgctgtaggacttgagttcaaacaaaggatttcttttgactagcactatgaacttgggagagctgctctgagcatcagtttcctcaagtataaaatggggagagggaaatatgtgacctcctttacagggtgttgtaagggttaaatgcccttgcagggtttgttgctgctcgtccacttttccctgactcgtggccctctctgggcctcccagaaaaccctacactattcaggatagatatgttggtgctcagatgagataatggagggatatgctttggaaaatccttgtacaccattcaaatgtgaggtaataataggaaaatagatctgctaccatcctgccaagaaaccagcagcttttgagacaaaaagcagacctaaaatctagaatcctcatcatcatgattagttttggacagaggaatttttctgccctttcaaacatttatctcaaaagttattttattctgaggactaaagagaatgcctatgaagcacaatgtgaaacccatagtagatatcctgcttagtacactaatcaggatattgttccattcaatggtaagctcttcccagaggactgacatcttatttatcttagtattctctagtgtttagcacagggtctggcctgtggtaggtgcttagcaattatttaaactgaaccaaattagattctgtcatattccatggattctttgaaagcagagcctgtgttttacccatttctctctttccagaactaagattagtgtctggcacagagtaggtacctagtaaattcaggttgggttgaaataaagcactgtgaaaaataaggtagactcgcctaatgtctgccctgaaccatgggggacccagggctccaggtaggaaaggagtctggaatttgtagcctgagtaggtactggtcaaatgacacactcacttcaaaggcacgcagtggggagggaaggggatgtggtttcccaaatgcctttttggctgggtgaaagcttcagttggcggcaagagtcaggtcaggggatgttggcagcatagagaagacggcagccaggactgccaaggcaggaacgagtcagaggagaggaagcaactcagatggagacgaaaagtgcttgaaatcttcccctctctgcatctgcaggaacagacgtggcagcagtatgcacgctggaaggaaaacaggctttgcagtcaaataaatctgcaggtcctctcagtgcaagccagggctggggggtcttgaatgtcatgttttatttttctgaatctccatttcctcatctaaaaaaaatgggatcagtgattcttaccttacagggttgttgtggatatcaaaagagtgttttgtgagtaataaaacagccatttattaagcacctgctctctactaggcactgagcctagtagctgtatggatataattagtaatcccctaatcatcctgcaaggtagtgattatcatctctagtctccacttcagagctgaggaaactgaagttcagagacattgagcaatttgctcaagtgatacagccagaattccaaccaggttctttcagcaaaggttaccatatgaatatggacatgatgattaaattgtataaatctttgtcaagtctaaaattctcccagagcagcagggttccttcattgtcagtgctttttctttcccaacttcccccaacttttttttttttaaactaaaactttggctaacctggcaatctacgaaagaggggttccactaagtgatttaaacatgatttgattctctttgtcctgttgctctttggcatcaatgggacatggatcaggaaattatttctaggtgtttatatgaggaaagaggaaaagctgctgagagttaatcttttagacaatccaacagaatctgaaatatcaaaaactatccttccaaaagaaaactatcaaccctttcaacattttttgaatctttctttgaagctttagccaaacagaagataaatgtaaaaggtaaggaaagcaaattaacttctattgaaacccaccatgtgcctgtgtcttgatgtattgtcttctcagttcctcctagtaaccccgtatggtaggtatcattagattcattcttccacataaggatgctcagaaaggtaaatatttgtctgagttcatacaatgatttggcaggaaagccaagattcaaaccgcagcctgcttggtcctaaagcccaggctttttttttttttttcttcttctccctgcttctgagtctgcagtctcctgaggggagcagttgtttcctctttgtttaaggagtccgtccttttgtcctggatagccccagagagatcctgcatcttcagaagaaaaaggacttttcgctttaagactgcttgggacctccaaaggtctttagcagaaaatgcaagcaagcaccctattggaaggtactcttaatgaaatgaacaccggctggatggttctatttttggatgtgggctcagacattaggagcaggcagtatcttttctttttctttttctttctttctttttttttttttttgacaggatgggctggggttgggggaggaggaagcaagaattaagcagagaaggcaagctcctttctgttcatctaactcaaagtgagtattatggatttaaataacccatgtgcagttctattacttagtggttttacccagatctaggctactacaggtgaaagatgttctatctgtcctgtgcttaatttttaatgcagtcttgaattacttttgtagaaaaatccaaacacttagtttgcatgccatcctcaaggttctccttctggggtggaaagctcacaggctttggggattgtgaggcttgagttcgaccttctgccatgccactgatctgtgtggctttgggtaagccatctagtatctctgaccttaggcccctcctctgtaaaatgagtacaatcatgcatgctttttaaggttgtcatcattgcaaagtgcttgatgcttggcagacactcattaaacattagttactttttctccctgtatctcaaagtgcaaattctttatctttattctcttaggtcgagaagggcatgagtgatgacctatatttttaggacagcttggatccacccagattgttggcaggggctattggctgtggtttaagacttaagccaatgcccattatgtcattatggagcctgcaaaagtgattactaatgttacttttccagttcactgcagagcagaggggagagtttttcacactgctggcgttttgttggagcacgaagatacgaatcacagatggcttcctcggcagatgtggccctgtagaactgcagtgctggtttataaggggtttaatgaaaacctggcaccctcccagacttgaatcaatcctctagggtctcagcttatgcacgtacagaccaatctgcaaatgtgcaccattattgacggtgtggggaatgctggggtgaaaagtttttacctgagaaacaaagccaaacctatctggccaagttcacaggcttggcctgggagatggaacagtgccgtggaagggaagttggtaggagaagagtggctgcagctggaggatgtccagatggccgctgcccagctgggggtgatccgggctcagggtagaatgatggttttaccagctgcttcgggctcacagtattttcttccttgccatggctaaaaagagtgagcaggactcgcaagtgggagatatggaatatcgaaatagtttctgtctagttcatattatggactggaactgaacttgcatattgttgcttctgcttgaaatgttcttcaaatggtcagcttgctatttctcatctgttttattttggcttcagtgtcattccttggcaaatgctttcttgatcacttccctgaaagaatctccaagctctttgccatattctatcttagttgtgcatttgttcataatatatcacaatttatttgcctatttggttgctgttttggtcctttactaaaatataagctctttgagggtaggaagtctgttcatcttgttcaccaatgcagccgagtgcctagtggagtacctggaacatagtagacattcaacaaatattgttggatggatgaatacatttttgtgacaagactaagataaatcagtctttgtagattaaagccaccatttacaagctgtataactgtctaaattacttaatctttcttagtctcagattctttatctgtgaaaaaaaagatggccaggcgcggtggctcacgcctgtaatcccagcactttgggaggccgaggcgggtggatcacccgaggtctagagttcgagaccagcctgaccaacatggtgaaatcccatctctactagaaatacaaattagccgggtgtgttcgtgggcacttgtaatcccagctactcgggaggctgaggcaggagaatctcttgaacccaggggacggaggttgcagtgagccaagatcacaccactgcactccagcctgggcaacaagagcaaaactccatctcaaaacagaaaaaaaaaaagataaaaatatagtagagggagctgtttgtgtagaatagtgtctagaaataagaaatggtcaataaagctattattatccagttattgaagaattaagttcaccaccaacaaatatttatcaatatttctattctaatatctattgagaatctagtatatgctatgcccccacaccaagcacttttacatgcattatcttatgctattcttcacaaccttgtgagatattcttcccattttagaacaaaggaaatagattaagtggtttgaacaagcttacatagctactcagtggcagaggcagtattaactccatttctatttttaaagccctaattttcccccataattccaggctgcttcctattaacactcattctggataaataaacataaggaagccacattctctgtcctctggaggctctggtttaggtgataagacatatgtaagagtaaaatgaacactaataaaaaccatttttttggtgctgctttgaagtttacaaagcttgtcccaatatttacaatacattcaagttttaaaagattattacccaggatatataaataattcatacaagtcaataagaaaaagacaaacaatggaaaaatctacagattatgaacaggcaactggaatggccaataatcatataaaaagatgtttgacattatgagctgttggggaaattcaaatgagaacagtaagacactatttcccattgtcggataggcaaaaataacagtctgagatacccaatgttgaggaggataaggagacatgagaactatcataccatgctggtgggactataaattggtaaaacagtttggggagcaactggcaatacatagtagcagtcaatatgaatacacaaccagggcttcctctatgaggtaatagcttagagaaatttttgcatatgtgccaaaggagatgtgcaataatgttcagtgttagcattgtatataatagtgcaatattggaaataatctaaaagtacattaatagaggaatggataaacaaatggatctttttttagatagaacataaaatagcaaaaataaagcaacataaaatagcaactaaaagaataaattagagctacatttagcaatatgataaatcactaaaacattattgaataaaaaagaccaagttgcagaaaggcacagacaagatatcatttatgtgtatttaaaaacgtgcaggctggccgggcgccgtggctcatgcctgtaatcccagcactttgggaggccaaggcaggcagatcacctgaggtcagaagttcgagaccagcctgaccaacatggagaaaccctgtctctactaaaatacaaaaaaattagctgggcgtggtggtgtatccctgcaatcccagctactcaagaggctcaggcaggagaatcacttgaacctgggaggcggaggttgcggtgagccgagatcacgccattgcactccagcctgggcaacaagagtgaaactctgtctcaataaataaataaataaataaataaaaccatgcaggccaggagcagtggctcaatgtctgtaatcccagcactctgggaagctgaggtgggtggatcatgaggtcaggagattgagaccatcctggctaacgcggtgaaacccagtctctactaaaaatacaaaaaaaaaaaaaaaaaaaaattatccggcatagtggcacatgcctgtagccccagctactcaggagactgaggcaggagaatcgcttcaacccaggaggcggaggttgcagtgagccgagatcacgccactgcactccagcctgggcgacagagcgagactctgtctcaaaaaaacaaaaaaaaccccatgcaaaacatgttttcacttataagtgggagctgaacaatgagagtacatggacacagggaggggaacaacacacactggagcctgttaggggagggcagggaggtgggggagcctcaggaaaaatagctaaggcatgccgggctcaatacctaggtgatggtttggtaggtgcagcaaaccaccatggcgcatgtttacctatgtaatctgcacatcatgcacatgtaccctggaacttaaaataatattttaaaaaatgcgaaacaatgccacaagtttaaaattaactctttatgtaccataaagatctggcaaggaagaatacatgcttctagatggtaataattacttctagggtagaggtagggaaagcttatcgagggaacttctatggatcttcaactaaatgttttaatttaaaaaaatctgaagcaaacatggcaaaatattaacattgttagatccaggtggtgcgttcaatgcgtttgttatacttgtctttgaacttttctctgtgtgggggatattttctgtgtatacgggatatacacatacaaacacctcgttaacccagagcttcttccccaaaccttatctaattttgtcctcattaaggccttggaaacagcaatgaaagagaagacgttaaactctcgagtttcagtgcgtgtctctcctgacacctgcttttgttttgctgattgggaatgctggtcaggtggagtagagatgaattgattttcattagaaagggtctgcagctatggtgagggtggggtggagtcagggaaaagtggaagagaatcaggagggcaaaggtgcccaagttctgagaaaaggctgaggaacccaaggttcggagaaggagagtaataaatccagtgtcctatagggatagagctggaatctgctcctggttacctaacctcatatttaagtcaaaggcaagtgtacgctagggacaggagcatgaacactggatttggacagatcttggtcagatcacagctttgctatttagtgtctgtgtggccttacacaccccacctaattctctgagcttgggtcactattgcctctcttagagtgtcactgggagaacgaataacataatgtgtacaaagggacttagtgggaccagcactcttggcatttcactccataaagaatagttattaccaccagcagcagcatcattccaatttgtttcagccatttctcaataactcgttcttttaccctctttccttctttccccagcccaaattgggacagtttcctatgggtgagaatttggtttatctctgtccaagaattggtctcagcattccgataaaagctaccaaaccgagagacaagcagaaagatcacctccttttctctggagtcgttcttcctatgagtgcagtctgaggtctcatcaattttgggagcagccaaatcatatattactattcctatcaactaaagcccttgaatcttttaatatgacttaaaatttgcccaccctatacagttgggttttctaactcaaatgaagaatcttgattacaaaaaggagaaaagaccaaggtatttaaaaagaacttagtattatggaggaagtaaaattgctcttatttgtgagtacttaagacaggcctatttttgctccttttggagttctatgacattaaaactttaagatcataggctgctctgcctagggagtagccattcttttattcttttacttccttaataaacttgctttcacttaaaaagaaaaaacttgaagaccatagagttgaacccaatattcctccttttcctagtagtaactatttcaaagaacaacttccttctttcctactttaaattttatatttattatcatgatcttatggattcttctttctttcttattcttaagtggactgtgaattattatcactattctttttgatttcccaattgatttgaccagtgggaattccttcaaaccaattcctatgttcttttgatatttcgccatcaatctttgagtacctctttgttttctgacaacaagagattctcgacttaccttatattttctttgccccagagccagaatcagctgtttctctaagaggcagtggttctttttagtggagaatggtatttagaaatcaagatgtagacataatatgtgctctctgctactggggtatcattgcttctgggccctttcattacagagctaaaataaataaatgtatgtatatgtatttctgtctctatcttcatctattggagtctctgatggttagttttatatgtcagcttgggtggatcacagtgcccaaatatttggttaaacgttattctggaggtttctttgaggatgtttttggatgagattaacatttaaatctgtagactttacatgaagcagattaccctccttaatgtgaatgggcctcatccaatcagtcgaaggcctgaataaaacaaaagactcatgtcccccaagcaagagggaactcttcagcagatggccttcagccttaaactgcaacattggctcttctctggatctctatcttgctggccaaccctgcatattttggacttggaagcctccataatcctgtacaccaattccttgaataaatctctctctatatatttgtgtgtgtgtgtgcgtgtatacaaatcctattggttctgtttctaattaagaatcctgattaatacaaagtctgaaacaatacaataccgtgttcttgctcaccttcctcactgatatttacatctcccatcttttacagtgagaatcatggtttccaattaaagtcaatatatttactcattttttgtcctagtccaaatatacataacaagacaactgtcttagaatctttaaaacagtcaatatcatgaaaaaaagaaagtaaaaaggcaggagaaatgttctgtgttagatcaaactaaggagatctggcagccaaatgcagggtgtgatacttgtttggattctgaacattactggggaactttgaatatggaatgtatattaaataatattttatgaaattaaatttcttgggtctgataatgatattgtaaggaagaatatcattgtaagagatgagagattcatgttgaattatttaggaatgcaatgtcttgatgtttgcaagctattcttaaatggttcacaaaaacatatgtatgtaaatagatatagatatagacagattgattaatgagggagggaaagactgtgtgtgatggggggaacatgtgaagacatggcaaaatactaacagttaagtaaatctaagtttaggaaaaataggagttacttggattatcctttcaacttttctgtttgaaagttttcaaaataaaaagatgggggaaacagtagcaagtgttatgtatcaagtatttatatatccttgtgcaggtattatataccaaatgttaactttgttttaggcatgtgtcaaatactttatgaacatcattcattaacttgtttccgtaatccccactacaatcctctgaagtaggtaacgttatcaccctacttcacatttgaggaatctgaggctcagagaagtaaaggaatttgcctaaattcacccagctagcaggataggaaattgaggaccagagagaggagtgacctgccaaggctgtcaactagatagtgaccacagcaggactgggactacaacatctgattctaactctggggctcaatcccttgcatcagaaaggtttttactctttgttttcttgcccactttggttccatttagagaaaggtttctgctagctctactagactcattctgaagagaaaagattgtttccctattccccattaaaaaagataagcatccagcttcctgtcctctggcttttacccagaccttttatactcattattctccgcaatgcatgctctctctagttattgggtcacaactttatcagattccagagatgtgaaaacccaagcaggcgcagaagcttcagactaagggcaagcattcccattcattaacagagggacagtgattctttgtctgcctcgagctgtttgcacgctattcactttaaacacaagcatagagttggcccagtatagtcttctgcacactgggggttatgacccattagtgggtcctgaaatcagttgagatggtggctgtcagcatttaaaaaattatttataatcaaactggatagagtagaaaataaccgcacccatgctcattataaaggtaggtattgttttgtgagtgcacagacagacacatatagatgtctattctgggtgatggtataaaatttatttcttatgagtcacagttaaaatgattctaaagctgctgatctaagacagagggtggcaaatgcctgtttttgtgaacaaagtttattgagacatagccatacccacttgtgtatgtattatctttacgtattatctttggcagcttctatagaacaatggcagagctgagtagttgtgacacactgtagtgcctgcaaaacccaaagtatttgttacttcgtcctttacagaaaaatgtgtttgtccccttatagcctaggatattaaagcaaaaatttcaaattcaaagtcaaataaagcccccattgtatataatctctggaatttctatctctagtatttctcccccaataactaagttgtgtattcacatatagacttatgtaaatgaatatataattacagaaatataggtatagcaaaagtaattattgctttggaaactaggagtattccaatgccatgtccttttagcacatagcaaacaggatgacctttccatcctaggaaaatatttttatgtttaacctcattgcactcaaccagacgtttccttgcacagattttcaagtgaaatatttcaatcctgcattcatcttgggggccacgtgtcttatccaagttaaatatttccagaaaataaatgtctagacaccgtctcatataaattaagcacccggtttttaaaagattcctagcagacctcctttctggtgtgtgggtgaatataattttactcctgtgaaaaatgctgggtaaaacctgatgtgcctaagtcagtgcacctgcaggtgactaatgagtgctgctccgtcattagtggacaatgcatgtgtgtacttgtgtgtgcgtgcatgtgtttgcctctgtgtgtgtgtgtgtgtgtgtattagggaggtggaggccagatggaaagacaagactcagggagtgtatttcatgcaagagccccctcttctttgagatgatcatttataagaatcttggataaaagagtacatgtacttcagggagtctccatatttgttgaatcctctcttcagagaataagaaatgtgtgaacgaagtgcatgaagataaatttctattgtagctctatgactttttattttatttgtgtttgacgtttttcaaactgatgggttttatttaattcaagtgagccatttttagtgtttttgctatttataatttctttaatatagacttctgtatcactgtgatataaattacagtatttttcattaaaagtgaactcttggccgggcatgatgatgcatgcctgtaatcccagctacgtgggaggctgaggcaggagaattgcttgaacccaggaggcagaggttgcagtgagctgagattgtgccactgcactccagcctgggtgacagagtgagaccctgtctcaaaaaaaaaaaaaaaaaaaagtgaagtctttaagaaaaaccaaatacttaaaggaatgagcacacatttttagcttttattatattttattacatatttatattttatatacctgttataaatatgggta

SEQ ID NO: 2358 - DNA, 623 bp, Homo sapiens
tgagatttttttctgaagatgaattgacttgtttcacgaagccaactaattttcagtctcacactcccgtatgtaaaaaaataaggcaaagagagccagggagtacacaaagcaaagctagtacacaccaaacaaggcaatagggtgagttactttctggttgggaaacaaaacccctcttctctctactactccattcctttctactcttaagcatccgttccttcaaatgctttctccactatggatctcataaagcagttcatagtaggatatgaaatgatcaataaaagctcaaagtttaactctctcatgggaatgtatatttgtgtaggaatcaaagcctttagtacaagtctccagtgtatttgggtagagagaggggtgcgtgctatctcattgtctctgaaataactccttcaaactttttcttaccctcaggcctctaaggcttacctgcatgatgaatttccgttttccttactctcacacccagctttcaatttagcaagaaacagattcgcccaggccagtctcaagaatttgtattctgcctcatatgactacttatagtcagtggacatccacagtacacattaaaagctctgaaaagtcatgcagtg

SEQ ID NO: 2359 - DNA, 13716 bp, Homo sapiens
agaggtcaggaaaaaaataagaatatgacagtcccatggcatgaagttaggcatctgaaaacgtgtgtgctccaaaacagaggtcagttaatggaaaattttagaagagaaagttgggttagagccagcacagcaagctgaaatctgctcttacctaactggcaaagtcagaccagaaatacaagcaagaataagaaagacacaaatattttagaactaaatgagagagacctgtgtggttcgatgcattctctgacgttattctgagaagaaacaattaaatgcatactggaagacattttgctcttctacatgttggaaattcggtgtcaccaatgcacagctgcagaatgcacagttctattgttttctttctcatcacagatctgacccctcaccatcttcccccgcccttgagcctgatccttttctgactttgagcctggcaccttgctggtgccggcaggcatcatgaaggcatgggctgggagccagactcagccttgcaaaggaggctcagggaagccgactgacatgggctcaataattagttcaatgccggacacaatgctcaataaggagctgctgggttaatggatgtgtgtgctagctagctgtagtaaacaattcaagttgataacatggggctgattgtctgaacagtacaaaagaaaatggaggactgaccagctctttggtcctccaaggtcaatacaacatttaaagccttcttatagagatatacaagttttgttcatttttaatattcatgtcaataatttaagcaatgtgaaaacttaaacattctcaagcatttatttattttttttggtagagaccaggtctcactctgcttcccagcctgtagggcagtggcatgatcctagctcactataaccttgaactcctgggctcaaacaatccctgctgtctcagcctcctgaacagcttggactataggtgcacgacaccatgcccggctaatttttttatttttattattgtagagatagggtcttgttatgtttcccaggcttgtcattttatgtattgtcttgaataataaaagaaacttggacagagaatagcaggtagcaaattttcagatgtagatttaggataatacaaaattttataatgtgaagtacctcagtaccaaaatcttagctatttataatatgatagcccttgatgtagagctaacttaaattcaacatttccatgactaaataatttgtgggctctaaaatattctcaaaattcctagagttagcatttcttaattgatttctttagcctttttcacattcaactatattataaatacaaaatgaatccattaacatattttataatgtgtctttcagtgtgcttcttagatttagtttgatttcagaaagctaagaaagaaaaaggaattttgcaagccacactcaatcatatctgcataggcatagctatatagacacccataaaattatgcataacccccaggttttcaaatgaacacctcccacagtctcagcaacacagggcaacctccaccctctggcatattcatgtgtccatttcactgtgaaattcttatcttcatcactgctcctcagggggcctctacaactctgcaatgttattgttctgagagaaaatggttattttgtaaaattttccttcaaaaaacctatttaatagaatcacaagtttattctcttcagcagcaagtttgctgaagtacattatttgtccaaaaatagttgaaggccacattgattgaggaagggatgaatactcatactaatgagctttctgtcccgttgttgtggaaattttctgtgaatttgctgggattttctgctgggtcatgcagaacctccttggaatgttatagcctgggaaatgtaattaccccatgacgtttcatttttctcacaatttctggtgtcagaggatggaacaatcaagtcctcactctgaaaggactctctcacatgcccatcagggcagaagggctatcattacagaaatacagcattctcctctgtttttcaagctggtttatctccatcccactacccgaaaagtggaattcagagttcccttagttctctgcttttctgtacatagaactacaacatccaacccagcaaacactcccttcctatacagatattctttaccagcagtattttatgtggaaaacattaacaagagattagtgacaaaagaaattactttgggggagtccattgatctttgccttctaaaatttataagctgctttatataattgtccatgattgccttctttaccctcatcatcaacttccacatatgaaaaagtaacaagaatggggactgagaagaaatagtaagatggttcagactgaacgaagccattcagtttttatacgtgtgtgtgattatttcactataaactctgcttccatgactaaaatcatcacaattaccaagcaatggctttatcccagagttactttagaacaaaaaagaaggcatttgtcatgcagtggcatatctcggggacagctcacccctgtgaaccatgtctgccctttcttcctccttcttttaattaacatttggaaaagaacagtgatgttagcagatagcagagctgggaagggagactcagaaagtgatgtgagctttgtcaatcttcaaccttgccaaggaggacacattaaagtgtttttcatggaaaatcaggctttgtcaacacaaattcaaagcaatgtgaccttgacggatggagatatatatatatatatatatatatatatatatatatatatatatatatatatgcatgctaagtaagaatagcacagactgaagcatctttagagaatataagtgaaccaaataaaaggaggaaaagcatcctaaaagaagatgttaaatccaggaaaaagttgtcaagtgtatttccttctacttaccttttctgctgactgggctgtaccaaaaaagatggggatgaaagctaaccaaatgatgcaggtggtatacatggtaaatccaataggtttggcttcattgaaagtctctgggacacctctcgttttaatggcataaacagtacaagtgaccatcaagaggatactgtatccaagtgaacaaatgagtgagagatcagaaatgtcacacttgagcactcccctggccttctctggatctagtgtccgctgctctccatagtcaatgatgatgtgggggggatccacaacaaaccagacaaacactccaaggagctggacggagatgaggctgaaggtgatcaccagctgagatgctggactaatgaacttgggcgctgtgacagatttcttcccctgctcaaatattcggtggatacggtttgttttggtcagaagggctgcatagctgaaacacatgccaagtcctaggaagacccgtcggaaggagcatatgattgtatctggtgctgcaatcattaaaaacgtgattgaataacagagaaaaatccccgttaggagcacgtaactaagttcgcgtcctgaagccctcacgataggtgtgtcattatagcggacaaaggtcacgatcacaaaggtggtggcgatgattcccaatattgcaacaaacacaggcaccacagcccagggagaatgccactccaatttgatgatggggataagctggcagcctgtgcggttcatgttgggtctctgatccagagggcaaagttcacaggacagctcatccacctggtagttgtaaccttcacagcgttcacagtgccagcagcaagggacccctttcaccgttttcttcctctcccctggcttacacggcaggctgcagacagacgccggacacagtaattttagcagaatgctaataggacaaaactgaaaattacagatgacgggagaccacttactatgaaaagcagctactataaaagctagtcctcagtttggtccagtgtccaagtcccacctccagagccaagtccctcctacctcatcatgaaaactctcagcagccctgtggaaagaatggaggcctcctgtccacaacaagcaccaacttcccatgcgtgtgaaggagccacctagaaagtcatcatctggctccagtcaagccttcaggtgacatctgaatgacatcttgaatacaaactcatgagagaccctgagccaggaaaacacagctaacctgttcctgaatttctgatttacggaaatgttgtgagatgatgtttattgttttaaactgctacattttggagttatttgttctgcaacaacagaaaatgaatgcagctcaaattaaacttagctacttggtggccactttcattttaatatcagtgtagttatctatccagaaggcacacccagggacagcgactgtatacttccaaagcagcccgaagtatgtagctttagcaatattccttcatcattcttatggtggcttactctttgacaatcaggtgactgaaatcgttctcatgaacaattacttaagaatgctttcctttcttgaatctagggtgaatggttgaggccagagaactgtagtcttcaagctctatccttttagagggctgtcgaatctcctcagagtagagactttgtgtctttaatttcagatatcctcccttgagaaagtagatgctacttcatctgtcatatgtcatcagggcatttgagactattagatctatcctgtcagctcactacaaaggaaatgtaatctattataaccctctagtttcttattgggttttaatgacttaaaaatattatattttatttacttataagattacaggaagaaagaaataaaggtaaatggaagcacacagtgatttctttcaaaaatactgagaaaaaaaatgaaatgctccactgggtgcttcaggaattaactttacaacctaagggactcataagataagaaaatacatttttgaaggttatatttaaaagctaattactatagaaacaaaattgcattttgttgggaacttccatagatttacagtgttcctgctcaaaaaacacaaaacaaaacaaaacaaaacaaaaaatgaaaaacagcaaaaaaaaattggaaacattaaacttcaagaaaccttaaaggtcagtttctctaaccacatgtcggaagctttaattctcaatatgctttacttctcagaacaacataagatgtgttaaaaaagaaatgtacctatactcggtaggtttcattacataggataactatttatcattataagctaaatgtgaaattttccttgacaattttttaatgttttgaaccaatgaaaaaacgtttttcataaattaaaaataaagttgtaagaatatgaaaaataccagttttttaacagctatgaattttctttaagtaaaaaaataagcaatatgtgtaacatttttattataaaggagactgtaatgttatagtttacagattatgttttaataaatatgttaaatatgcatgctaaatatgcatgacttaattttcatcaaggaatctttgttaaactatgctgtgaattgatttcatagctaaagtctgaaaaccaactagtatccacttcaagaaaggacaaataacaaatgcttgaacaaggatcttacaaatacagtaatatttgagactaacaacttattttacatagttgctaaatgatgattaaaaccaacactatttggaccggacgtggtggctcaagcttgtaatcctagcactttgggaggccaaggcaggcggatcacaaggtcaggagatcgagaccatcctggccaacacggtaaaaccctgtctcttctaaaaatacaaaaaaattagccgggcatggtggcaggtgcctgtagtcctagctacttgggaggctgaggcaggagaatgctgtgaacccgggaggcggagcttgcagtaagccgagatcacgccaccgcactccagcctgggtgacagagcgagactccgtcaaaaaaaacaaacaaacaaacaaacaaaaaaaacactatttgaaagtgaaaactgcctaatttccacaactgttacaaagcataaacaaagattattcaaccctgtttattgctatattaacaaattataccatctttcattataagtataaagagatgccttaaccatatatttttaaaatttgccttcctcacctttggtattattctgttattaagacgttttcagtctgaaatacatggtataacaaatggaggatagttatatagatagatcttccagggacaaaaaaatggcccattcttatcttgacaatgtttaccaatagtgatttattcaataggtttcaatccagtgcatttcagaaaatgtaagtcatcagctggtttctgctgtcaaatcctgttattattgcagacaagtacacaaagaatcgtgaaaccaaagtttccgggtgagtgtgcttacatttttaaattttcaatcttttcagaaaagtcaactaggagtactgttttataaactctttaaaaagaatataatttttagagaataattttcttctgtatagttttaataactcctgaagaaaggattacaagaatgattacaagaatgttgaacaagtaaaatccccattataattaataattttcagtcttcattacagaactctcaatctaatatctctaatacaatgtttttcctaaatatcaagtggtatttttttaatgtgcttaccatatacaggatgtgggaaaattttaaatacattgtttacagataactgatacttagtcataccattcttaacacatttcctcttgctctacatgtaataattttgttaattattattaattaataattattttgttgactagtttgacacctcgatattcaaaactcaatatttctgacttaagtaatggaagactgcatgtgcaattacttccagagacactaatgattatttttaaaccattactcattaaatttcatataaatgcatacaatctgcatgggtacttaaaattttaaactttagtgccatattttgcatatcacatgattcacacatgaatgagtacatgttgcacagttaatctgataacagaatataaaattatgtaattatatgcattatatgtgtctctctatatatatatttcttaatattctgcatttcctttgagtcatgtacagctttaagtgaccacaaagaaaacaatatttatctcttcttcaaagtggcccgtgtcctttgaaaaatctaatatgcttgagatgattcccaagctgaaatcctgtttttttgtgatgttccagatctatataacctttaaaagtgcgaagacttctcctattttaaagacaatttaaaataaaattaaggaaaaaatttcatttacattaacaccaaaaataaaatacttagtgataaacttagtaaaagaagcacatgacttatccaggaaaaactacaaaacatcattgaaaaaaagtgaaaaaaaaagtataaatagttgaaaagaaatcctgtgtttatgaatcagatgatttactattgctaagatagcaatatttcccacattgatctgcatacatattcaacacaatcccagtcaaaatctcagctggctccttcactgaaattgatcatctgatcctaaaatttatatggaaatataagggacccagaatagccaaaattttgaaagcaaagaataaagatggagtattcacatttcctcattttaaaacttattacaaagaatgtcataatcaagacaacatagtacaggcataataataaacaaattagtggcatagactagagagtccagaaataaacctcatacacatttataatataaacgtgtatgttcacgttatttttgacaagatacaaagaaaattcaataaagaattttttttttcaaaaaatgatgccaaaataactggatatccatatgcaaaataatgaagttatacacctacctcacactgtatataaaaattaactcaaaaaggatccaagacacaatgcaacaactaaaacttaaaaactcatagaagaaaacaggagtaaatctctgtgaccttgtgttaggcagtgttttttagacatgacaccaaaagcagaagcaacaacaacaaaaaaaataaattgcacttcatctatgttaaataattgtgtgggtcaagagacaccaccaagattgttagaagacaacccacaggataggcaaaaatatgttcaagtcattattatctctaataagggatttgtatccagaatatattttttaaaaactgttaaaattcaacagttaaaagaccaataatccaattacaaatgagccaataaattgaatagacatgtcccaaagaagatatacaaattgtcaatagtgcatgaaaatatacctaacattattagctatcagggaaatctaaatcaaaaccagtgcaccaactaggactattataataaaaaataaagacaatagcaagtgttgataaagatgtggatgaagacatttggaattctttgcattgctgtggcaatgtaaaatggtactgtagctttggaaaatttgacaattccttagaaagctaaacatagggttttgatatgacctagcaattccacttctaggtatataccaaagatagttaaaaacatatgttcccacaaaaatttgtgtataaatgttcataacaggattattcataataccccccaaaaccagaaacaacccaaatgaccagtaactgatgaaaggataaaaaatgtggtatatctatattacttagcaatcaaaaggaatagtgtattgacacctactacaaaatggatggaccttgaaaacattacactaagaaatgaaagcagctaatcacaaaatactaatattgcatgtttttattttatatataacatccagaataggcaaatccattgaattccaggagctagggggaaggaaatagagaatgaccactaaagggtatgggatttcttggatgatgatgaaaatgaactaaacttagatattggtgatggatgtgcaacactgtgaatatacgaagaaccactgaattgcatactttgaaagagatcatttttggcgtgtaagttatctctataaagctgttatttaaaaaatgtggagactatttaagtagatattttcaagtggttttaagactcagtcctataatgctgtacaaaaacatagtccatgcccattttgtttaaggcacaaagttcaatgtgagaattcaacaagaccaagacatggttcttgccctccagacacaacgtagatggggagagaaaaaaacaaaggccaatcacagctcacagtgagtctcccttacagaaggatgaggaaatggaactgctagaggagcacacagcaggaccacgaagcccagggttcatggatgtgcagacagcagtctggaggttgcacaggagacaaggcacagaagaggagctcaacagcacatcaggcaaaaaacaaaattactaatatatagtttcaaaaagccttgacaaactggaggaactaaaagtattaagaatagcaggaaggtagataaaagcagtggatggagtagcaagaaacaggccaggaaagagggtacatgtgagatcatgaagggccttgtgagccattgagaggagtttggatgccatcctgaaggtagttgggatcttccatagggatatagccaggataaagatgatgagtcacgttttagaatctctggactgtagcgtagaaagaagactgcaggagtccaagactagagagaagtcaatcacgctgaggctgttgcggaattccagatgaaagatgatgacaggaatctgaggaatggcaatggccatgggaaaaatgtgagtattctatcagctgcttcttcaaggaccatctaaatttgttagatacagattatcaggtacaaaggtacatacaagaaagattcctggagctaagagctacttgagatcgtagcattctaatcactaaatacttcgttagtgctaaggaattctgttatgggttgaattgtgtacctcccaaaattcatatgttgaagtcttatccctcaatatctcagaatgtgactgtatttggagacagaatctttaaagaggtaattaaagtaaaataagattactagggtgggacattatccaatataactgatgtttttacaagaagacagaattaggacacaggcatgaatagagggaaggccatggaatggcacaaggagaaaaccatctaaaagtcaaggagagaggcctcagagaaaaacaactatgccaacatcttggacttctggcctccagaactatgagaaaataaatttctgttatttaagccacccagtctgtggtactttgttatggcaaccctagaaaactaatttaggctctaaagggtcggcatttgtattactaaagcatagtcaaaagatacctcatttgtcagctaataaacgtggatttttactagggactgtacatacagaaaggaataaaacagtttcttctttcatagaatcacagtccagggaacagaaagtcaattaatcagtaatgattataaaaattacaagtgatgttaaagagtcatgcaaaggatactaggggaacatagagctggggcacttcagcatcagcacaggggtaaaaagtttctcaggggaggtgagactgccttgaaagataaaatggaactggagaagacaaagaaaggcatttcaggttggatgaatcctataagcaaatgtacactgtaatcactgtaagcaatatggcatgattagaacatggtgtgtatcaatacaagacagtcagtgaccatataacgaagggctttgtaagcagcatctagtttccagactttattctttaaagctgtggtgagtaattaaaggacttttaggcaaatatatgacatgatagtattattttttaattttagagaaatcactgtggtgacagatcagagggaggatggcagagaagcaagaatatgaattagagaaatattgccataatgtcaggcaaagcaagactttgtgaattatgtctaagtggtggtgatgaagaagataggatagatttgagatacagtaaagacaacagagatcatggtagagtaagggcaaaagatgaatgaaaagatgggatctagttttctgatttgacatccatccttagtgtttcacttctttccactgcatacataaatccaataaaccagcctacatggacatctatgcatgatcttgtccctgtctaactcccaggcaatgcgcaaccatcatttagcaatcctccttagtccttttagtgttcttccatggacttttacagtacatgattatgtatttgtttgattttatttttattttaaaaagtgggctttaaattttaggttatattcctaagaatcacttaagggtttacttaaaatgcatatttctcgttcttagagattacaactcataggtttgagaaagaaccctatgttggcatgtttaaaagaatccctccttcctctagtgattctgacacatgcaagtaatgaactgtactttgctaagccactaattaaaagtttattttcctaagaagagtagaagtcaggtctgattttccaccactgtgttccagatcctaacatcatgactaagacctaataggcatcaataactatttttgaatgaatgaagaaagactaaaatgccatgtgaataggtagtggtatccttcactgaaaaggggcgtacaagggaatgactggttttgaaaggccgatcatgacttagttcatgggtttgtgagccaagtgtgcctagaggtaaagatttcaaaggcacaggtatatgcaaggcaattgaggtcatgaatatttatgagagagctctctcccacagacatgatgaaaaatacaaagagaagatggcacaaatggatcactggaaagagtcaatttaagaagcacactcaggaagaccagtggaaaacgatgtaaaaacatgatcaaatggtaactagggaagaatctagtccacagtgcaagaggccaatcaaatagttaatttcaggaatgatgaagtagttggcaatgtatgaagacagtaatatttcataaccataggatttgaaaatttaggggccttggttaccttcatgagataagttttctgtgaagtctctcttatctactttgctccagacaggtagatatgttcctcctctgtatttcatcctcctccaagacatatttttattgtaacactttggcattatatggtgattatctgttgatgtgtttatttccccaccagactgacagcacattaatctcaaggaccacccaacccctatataagacttaggacttagtaggagttccatgtttgataaatatataacttgattaataaatagaacatgtgataaactagtctatgactagaaatgtataacttctctctatttagtgttttgagtaggcctggctttaggcagtaggcagatgggagtactaaacttatcgtttcctaaatctgtgtggtctctagattatgtcatccgcagcttcagagaagctaattttgaggagactaagtaccctgaccgcatacctcacaaggatgtttggaagacctaacaaattaatattttgaaagtttatttattattattattattattttgagacagagtctcactctgttgcccaggctggaatgaggtgacacgatctcagctcactgcaacctccgcctcccgggttcagacgattctcctgcctcagcctcccgagtagctgggactaaggtgcacgccaccacgccctgctaatttttgtatttttagtagagacggggtttcaccatattggtcaggctggtctcaaactcctgacctcatgatccgcccgcctcggcctcccaaagtgctgggattacagacatgagccaccgcacctggccttcaaagtattttatgaacagatgatgtggaagacagaaactctgcaggttcctttattaggactgagaggagcactggagaaaagatatccacgctctacccatcattaaatacagctggtctgtctaaaaattatatcagaagcaaaaagtcaaaagccaccatctctggatttcatccagatctgctattacttgtttttatcgtccgacaatctcagctcttaataatggtttctgatatttgttacatgaagtgccccatctttcactcaagttctatgcagaaaaagccacgtaaaagagtgccttctccccttaactctgagtccacggatggtggcatcttgagtgtgcatgttggcgtatgtattgtggatgcggtggtttaagggaagggtgcaggaagtcagacctgtaatattttgggtaaatgggatgtaataaccttattataaggcttcaccccaacacagtgcatatgcaaatatgcagggcacatatggtatttgttgcaagactattgaagtagaataatcttttcccttaaattttaacttatgataattctaatttggatatcacagagtgaccatttttaattgaagccattgagttatgtttttgttactatgttcatgtttatattatagatggccaaatttagagtttcaaataatttcc

SEQ ID NO: 2360 - DNA, 48839 bp, Homo sapiens
ccataatcccattacttgtagataaatgtgatattttgatgtacttttttcatttttaatcaatgaaatatataaacatatacatgagtatggttattgactctatgcaatgtcatattctgcttttatcacctggcataaatttccatcttgttaaatattctttgtctttaattcttgcataacaaagcagcacaagaatatgccatgctttgtttattttaccattatcttcttgccaaacatttagatttcttttaacattttattgctttcactggaatgcatattcttgtatatatattttgagcacttctgtgattatttccttataatggattctgtgaattggaatcagtgagttaaaaattatggacatgtcatacatatgttttaaatgtgtaggtggtttagtttgtccattaattaaaatgccacttgggtggagtggatagtgtgtatggggtctggcggggctggtaaggggtgaggaaatggagaattggagttacatattctcaaggaaagaaaaggaaaatcatttgttagtagatgattcaagatcttagctattaagtaattctaaacactctaaaatgtgattttataatgagaaatcttaattctataattatagagaagggagaatttcgaatcttttcatcttctaatagaataaaaaaacacacacatttaaagtgtgtaattagttgtttatcttggcataacactgagattgtataatctctttaaaatttttttaaaaggtttatattattttcttcctgtcataaaaggaaagacacacaaaatcaatactgtaaactccgtgaaggcaaaagatggcggctgtcccaggggctctgcatctcagtcccccatagatctcttgacacatgaagagtacacagtagatatctggacagtgtagagaatctcttccttgtgacttctggagtattaaatagatctggtcaagatgattttattttcatcaaaattcttagagagtgatataatggagaaaaaaacccctgtaaacaaataaaacaaaaacagtatgtaaaggccattctgaaggttgaagtacttagaaggctggaagtgctcctctgtctagagattgcggtagatgggatttttttcttaaccaggaaagtccaggaactcacagaaaacctttctctctctcacttttcaaaggccagttacctgaaactctgtctctctgttcttcctttgccttattacagcataaagaatactaaataacaccttcagaaatgtttccttttaaaatgtagtctcctacgactgagaaaaaaacggattagagttttaaaaaatctaaattctaccatttgtagcaatacaaagaaaacacactattctctgttcatgtatctaaggtaataagcaaatttaaagaataatacagaaaaagctagataaattaacttgaatgaaatagtttctttttttcttgaaatggctcaagtccttttcaaactaccactgaagttttttagaagttaaaaaatccatggcaggatataggtttcttccttcttgtcccaattaaaagcattctgaatactaaaactctaattttattctcttcactttcgtctagatgtagaaatacaagggcagatgagcaaaggatctttgtagcagattgtttgaaaaaaggaggatttaaaagaaaaaaattagctttaactatagaaaatgttgacccttaggaaaaaatttgtaaatgcaattaaaggaaaaaaaaaggaaataaaaatttagaaataaaatgatctgtggtagggatatacagagtgctacattgaacacacgttttcacccctcatactcctggagcaagtatatgttcaggagagatgaataacaatgtcttcagtgggaagcaatggggaaggacaagaaatgctaggatgccaggggagagcatgctcttatgactttgattcaataagaaacccatccatcattccaaggttgatcattcttaccactgataaatgaattaatttacattcctttgtgtaatggccttattgcaattgtaaatttataagtgatgttttaggatcttatgcataattactgaaaaaaaaagtttgcatttttgagcctgtacacagggttggaattttactaatcaaagatttcattttggatgtttccaataatatgagtgtaagtaggaatgtgtcttggtagtttgcttggtgtacctaggatcattcacctttgacttctcttaactgggaaaattgatcatacctatttttttctttgaacatgccaagactcttggtaaatatttgtaaatttttataaaatatctggaaaattgtgttgaaggtctacaggtcaaatagcatttgttccacagaagagtcctttattggacgatttatttattacatgttctccgaacctagatataataatctattcagataaaggtaaatgaagtaagtcctatattgttttgctttcagtctttagtgtcatatttttatagcaaacactttctcatcgtactgttccagaaaataaaacagagcaagatatctgtggtatacctgtgagggggttgtctgttacaatttcctctatcataaaagcaattcctataaaaatgctcataaataaaatgagaaagggtttggaggcaatcaataagggagaaattatacaataaagttactaatctcttttcagagataattttcatcaaatgaattgtacaaaaagtcttcaaggaataattgacttcaacaagctttccactggtcagcaagactttttgctttgaagtaaaacaaaataaaacaaaacaaaaaacagatcagaaaaaaaatggtaaataagaagtagtgcctacagatcttcccaccaagaaaaatgagcagggaaaggtcaccagcgtgtgttttcaggattatttgtctatcccacagtttgtggttccaaagtatttttatcagcattaatttgtttttgccttaaaattgtggaaacattcaactcagaagagttatgccaatttaaatctcaaagaaaaatttgggcaaggagcatgtttcttggaacagggggtataaaggaaaactgatttctatttatttggtttccattaaaacaccacaagttattggcttaaatgtccctattttttatgttttgaaattaatacatgttcagcttagaagagttggtatgaaataagcagaatatgaaaatatatagccctaataatgttatttcatagctataatttgtaggtcatttttatatcagaagtagctttgtatcctccaccctcacatttttttcttactttatggtgaccattttcccgtgacatttcccattctgcaaagtatttcaccatctaggtttatcataatgtatttaatcagcctcccttttagtagccatttgtctatttattcttaattaagatgaatatcatcaattgaatatgaagtcaaccatgtaagccaaacacagttatgaaattcagatgtgtgttatagatcccagttcggcataataaagcaaaacttcgtttctctgtcttccaagtgattcatttactttcaaaaggctaacaaaggaaatgatatacaaacctagtcaattaagaagtgcaaaaatgtggagaaaatataaaaaaaatccaggtagataggagcacccaaagtccagggtcatagaaggaaagcagaggatacttcatccagtcactataaacctttaaaaatagagccatttctctactactgtgactggtttgttttcgtggccaagaactggccttggttgcaattctacatggctaagataaatgggtatatagagagtcatgtggtggcatgaagcccaagtagtattataatcccagagcctctgcaggcctgtttaacagggttgaactcatcaatgactctccgtagaatgtctgcctcatctccctcaactcacttgagtgcagagagattccctaaaacactgaatctccatgaaatggagaatgaataatttcccaaatttatttgaacgtggggctatttactcacctaaaatagctattaacctttcacagatgactactgtcctttggaacatagtttgaggaacatagctctgactagacagcattactctttctcgtactcctctagcacttatatctgttgctccttcagtatacatccttttaatatgacagcaggagtaaaacctggagtgaatatgacagttacgtgggaagtacttaagaattcctctgttcttctttctgaaaccaggtcccaggcagtggtttggttttgagtttcttgggcaattctattatgaagctgtgttcagaaccattgcctgacggtgcactttttctttatgtattttacagaatacattcaatacagcttcagatatccttaaggctaatgcaaggaccttgtagataatagattctcaatagatatttgttgaatgaatgaacacacccgtaaaacatgctaatgcaaacagtatcaaagtaagatctaaaatcaaaattaaaaagacaatccctgataacagcctccttttctgaccactgtgtatgtaggctttaaaagctagaaataattccaataagtagccatacatgcttttcaaggatactctgatcttcccagaggcttaaagagttttaaattctacaagcaaagcagaaagcagagcttctaggtatgtagcttccacgtatggcattgcaatggagctggccctccatcttttcttcttttctttcttctatagctgattattaagtgattaatatgtaatgaacactattgtaggctttgagattatgctagtggacaaaacagacagaagttcttgcccttacagaagttaaaatgtaattggggaaaataaagatcatgataagggctaaagaggaaagtaaaacagaaacggttatagggagtataaatgaggctgcaatttttatataaggaggctagcttaggccctgctgagaaggtgtcatttgagcaaacaatggaatgaggtgaaggaatatttgggtgacaacgttctccaggctgagggcacagcaagagcagaggttttgagacatgaccacacacctggtatattcgagaaatagccagggtattaggagtaagagatagtcaaagaagaaatggggaagccagatcttgcagggccttgcaggttctaatatggacattggctttaattcttacagagatggaaagtcattgaggcttttgaataaaggagtgacctgatctgacattttaacaggatcactctggtttccatgttgaataaactgaacaaggtaatggatgtagcaaagagaccaggcagaaagcaattgcaataatccggatgagataattgtggtttggaataaggtgttaacaacgggagataaacagtggccagattttatgtgaatcttccctttgatctgtggaccaatataacaagactggagagaacacacaatttcctccctggatatacatcatcactgttcatattttcttggagctcagtgtacacttctaatggcttcctttttataattgcagacaatgtacaataaaagggaaatttgattcacattcagtaagctctcagcttcttttgcttggattctgactgaccaatgagtgaaagaatctgaagaggagatttctgtacccagcagcgggtggaaatagatgaatgtgagcattctttctaattctgagattctgtgattctgtgatccttagtaactctggaaattgaatgttcaaagactgaaaagttatatatgatagtggcaccaattgtcacaataaattggaagcaaatactaatgatcatggatgtatttaaaatatttcacacctgtcctagcacagaccagtcagaacagatgccaactgtaaacagcaggcacagccatgcatcaggctgaatattagttgtgcttatgctcaggtacaaatcaaattatattttagctgacatggtctgacaaagttctacgtctgtttgaaccaagtcaagtgagcaagtgcagtgaacacagatgttttgcctaggtttgtgcctgatattttgagaaaaatattaaaaggggtataaaatacagttatgaccttctgagtgtttttaatctgtttcagaagacaacactttgcactcaaaacaaattaagaatgttgcaacatatgaggccataacaactattttacgggttcttggctcccagcagcttgcccctaacacggtaactgtgtctttcctgagatttcagagtagtgtaataatgaaagaagaacaagcttacttgcaagatattaggaattgttgacttcatgatgcttgctggcatcttaagaacagacatgcaatgtctcaagccagcgttcaacacactaacttaggcaacagccgtataaggcaatatatcttttccatattcatgatccctccctcctaccctggtttgggtgcttcccagcactataagaaccaacaatcataagccaaagtatatctggagagtgggagaagcagtcctgcaaatgcagccttttcacacgcttcaccccccgtttatgattggcttcaggaaaatctgtgttgtatggcatctgatcaagtatggtcaaggtctgcctatgcatcatctattcagcatgtaacacagttagctgggtagagggtgtgactaccgtccagaatcaacacaccaggcttatataacaaatatggagagtttgcagaattttagtttatttgacctgttgaacccccgtcattaagaagaatctagaggaagaagagaatgatcacagctttatccagaaggaacacagaatttccaaagttagctaactacagattctgtcccttaagctggatgcccattatagctcagccaaatgccttttttagtatcctcctctttaagcctgcctcactaagctggttaagtgccagaatatgtggaactgaccatgcacttcttctgcattaaatatttcggagctggtaaatttagaacaacctaaagagtcatgttatgtctctctctactgcttatcaaattggcataagggttagagacttaaaactgggggctggattttcccagagggctgaattatttaaccgtcagcaattttgaggttcacagtaaagtagcaataatgaaatcatctgcttctagatgtaaaagcatcttctcggaaggccagaaggagtttgcagctttttctatctgttgggtgttctgggctctgcctaatacacactgtttatctgacctgaaatatgagacgattctgccataggagaataaattccatataaatttaaaagggagggtctgcatgtgctgatggctccttataaggggatagtttgtcaaatttggtacatattcctctccttttttaatttttaatttttgtaggtatattgtaggtgtatatatacagagcacatgagatattttgatacaggcatgcaatgcataataatcatatcaaggtaaatggaatatccatcacctcaaacatttatcacttctttgtgtcacaaacattccaattatactcttttagttatttttacatgttcaataaattattgttgactgtagtcactctgctgtgctgtcaaaagctagatcctattcattctatctaattatattttttgtacccattaactgtcatcacttcccactgcccccaccacccttcccaactctggtaaccatcattctaccttctatctctatgaggttcgattgttttaatttttagctcccacaaataagcgagagcatgcgaagtttgtctttctgtgcctggcttatttcacttaacaatggcctcaatgatccagttttctcatctgtaaaatgggcacaataatggcaaggacatgttcctaactgggtttttgtgatgcggaattcagtcagaagagggactggctcaaagtaagtgctcagggaatgttaactattcttcttcttctttttttttttttttttttttaattttcagtgttctctgggtatgttaactatttttatttgctcatggtgaaacgaagagagctgacaagaaaatttccaccaacgaactttttatgtcctttttaaaaattgtcaaagttctattgaaatacatggggagcttaaataaaattaatgaatcatacatcagagtaacaagagtaataatcattgtatttttaaaacagtcaattagaaatgaagaaaaccttttactccaacaaaggaactgacatatttttgaaagcgtgctatatgtcaggcatttgtaatggcattgacatcatatttagtcttcccttcaccctggcactactatcagcatgtaataaagaaactaaagctctagttaacagaagctctagtggaaagcaggatgaaaactcaagtctgacacccctgaaactcctcctcttccactaactccaaataccaccacattcttcgttcttccttatgccaggcctcaattttctttctgtggtgttgaagcaccttctctctgtgctcctctcttctttgctcagcagaacggctttctgatactgctcctgaacacatggggtttcctggataaggtggatttcatgggaactgctgcaggatgtggcagcttcatgtgggtttttgtccaactttagtcaaatagcaagcctcttatgtccagtagtcaatggctaatgactctggttgtagctgttaaataaacaacagtgaaaacatttcaaaagttacagagaatcagtcagagcataaatggtaaaattgtgactgaatggatagtgtacctgcgtgtgtgtgtacctgcgtgtgtgttgggggagggggttgtccttgaagctgtctctgcattcttatgaagttccagtaataaacatttgtattcacctggcttattcaacatgctgctgcaattactttaagatatttcacgctgtttggaagagggggatttatacctgggagtcagggggaagactgaagtttactggaggtgtggagcagggaattcccagttggaagctgtttgatagcccagacttgagaatagaacagatccaggttcaaatccttgcactgcttttaaataactgtatgaccttggacagcttacttaaccccttaagccttgtttcttcctgtgtaacaggaaaataaccatatcaatgttacaagattctctgtgatgatcaatgaagtaatgagaatcaagtacatggcacataaattagatagtgcctagtgaacagtgattattaatgtgcactaatttattattattattttaaatttcaacttttattttagatgcagggggtgcatgtgcaggtttgttacctgggtatattgtgtgatactgaggtttggtgtacagttgatcccatcacccaagtactgaacataatacacaatggttagtttttcaacccctgcaccctctttctccctcctctttctggtagtcctcagtgtcagttacggccgtctatatgtccatgagcacccaatgtttagctcccatttgtaagcgagaacatgcagtatttggttttctgttcatgcattaatttgcttaggataatgatctccagctgcatccatgttgctgcaaaggacatgattttgttctttttttggctgcatagtattccatggcatatatgtggcacattttctttatccagtccaccattgatggacatctaggttgatttcatgtgtttgctattgtgaatagtgctgtgatgaacatatatgagtgcatgggtctttttggtagaataatttatttccttttgaatatatacccagtaatggggattgctgggttgaatggtagttctcttttaagttctttgagaaatctccaaacttctttccattgtggctatactaatttacattcccaccaacagtttataagcattcccttttctctacagctcaccaacatctattgtgttttgactttttaataatagccattctgactgctgtgagatggtatgtcattgtggtcttgattttcatttctctgataattagtgatgttgaacatttttttcatgtttgttagctgcttgtatgtcttttaagaagtgtgtgtgttcatgtcttttgcatctgtatttttctgtttttgttgggcctttttaaaatgagattatttgtttttggcttgttcaattgtttagctttctcatagattccagatattagacctttggtggatgcataagttgtgaatattttctccctttctgtaggttgtctgtttactctgttgttagttgttttgctgtgcagaagctcttaagtttcattaggttccgcttgtcaattccacttgcttttgaggacttagtaatagattctttcccaaggccaagccaatgtacaaaacagtgtttcctgggttttcttctaggatttttttttttttttttgagacggagtctccctctttccccaggctggagtgcagtggtgcgaccttggctcactgcaacctccacctcccaggttcaagagattctcctgcctgcctcagcctcccgagtagctgggactagaagtgtgtgccactatgccaagctaatttttgtatttttagtagagacagggtttcaccatgttggccaggatggtctcgatctcctgacctgatgatccgcctatctcgacctcccaaagtgctggaattaaaggtgtgagccactgcccctgaccctcttctaggattcttatagtgtgaggtattacactgaaatctttaattcagcttgagtttttgtatatcatgaaagacaggggcccagttttactgtggctagccagctatcctagcaccatgtattaaatagggaatcctttccctattacttgtttttgttgactctgctgaagatcagatgattgtaggtgtgcagctttatttctgggttctttactctgttccattggtctatatctgctttgtacccatactatgctgttttagttactatagccttatagcatagtttgaagttgggtaatgtgattcctctggctttgttctttttgcttaggattgtttttgctattcaggctcttttgtggttgcatatgaattttagaatagttttttctagttctgtaaaaaatgacatttgtagcttgataggaatagcattgaatctgtagattgctctgggcagaatgaccattttaacaatattgattcttccagtccgtgagcatggaatgctttttcatttgtttgtgtcctctatgatttatttcagcagtagttcgtagttctccttgtagaaatctttcagttccttgattggatgcattcctgttgtgggaagtcagggaccctgaacggagggaccggctggagctgaagaagaggaacataaattatgaagatttcatggacatttatcagttcccaaataatacttttataatttcttatgcctatctttactttaatctcttaatcctgttatcttcataagctgaggatgtacgtcacctcaggaccactgtgataattgtgttaactgtacaaattgattgtaaaacatgtgtgttcaaacagtatgaaatcagtgcaccttgaaaaagaacagaataacagcgatttttagggaacaagggaagacaatcataaggtctgacagcctgcacgtgcatgcaaaaagagccatatttttcttcttgcagagagactataaatgaacgtgcaagtagggaagtatcactaaattcttttcctcacaaagactattgatattaatactctgggaaaggaattcattcctggggggaggtctataaacggccgctctgggaatgtctgtcctgtgtggttgagataaggactgagatacgccctggtcttctgcagtaccctcaggcttactaggattggggaactccatcctggtaaatttttggtcagaccagttctctgctctcgaaccctgttttctgttaagatgtttatcaagacaatacgtgcaccactgagcatagacccttatcaggagttctgccttttgccctttgtcctgtttcctcagaagcatgtgatctttgttctgctttttgccctttgaggcatgtgatctttgtgacctactccctgttcagacaccccctccccttttgaaatctttaataaaaacctgctggttttgaggctcaggtgggcatcacagtcctactgatatgtgatgtcacccccagcacccccagctgtaaaattcctctctttgtactctttctctttatttctcagccggccaacacttatggaaaatagaatctatgttgaaatattgggggcaggttcccccaatacatccctagatattttactttatttttttgttgatattgtaaatggaattgtgtacttgatttggctctcagcttgaacattattggtgtacagaaatgctactgatttttgtgcattgattttgtatcctaaaactttactgaagtgattaatcagttccaggaaccttttggcagagtctttaatgttttctaggcatagaatgatactgtcagcaaagagatataatttaacttcttattttcctatttggatgcctttgatttctttctcttgtccgactgctctggctaggacttccagcactatattgaataggagtggtgagagtggacatcatgtcttgttccagttttcaaggggaatgcttccaacttttacctattcagtatgatgttgcctatagatttgtcatagaaggtcttattattttgagatatgttcctttgatgcctagtttcctgtgggtttttatcatgaggggatgttaaattttattgaaagcttttcctgtgtttattgagatggtcatatggtttttgttaattctatttatagagagaatcacatttattgattttcatatgttgaaccaacgttgcctcctaggaaagaagcttacttgatcatagtaaattgactttttgtgtgctgctggatttggtttgctagtattttgatgaggatttttgcatttatcttaatcagggatattgacctgtatttttctgtgttttttttttttttgggcctttgtgcactaatttaattagaagtgccagatactcataaacagcaacgttttcctgggtcccacagtggtatcatagatcttttccttaacaagtatctattgaaactttgctgtttagaaacagttgcatacacactgtggcagcaacttgtacatgcctgagagtggacacttcttatcagcgttaattcaactacacttcacagctctgagaggatgtgtaatcatcaacatagaatttgatggataaggtggtagaaggatttgcttagttggatccttctcattttttaggttttgcacaaataccacctcctgggaaggagcttccctgaccatgatgtctcaaatacccctcaccttacccatgacccagccagctgtaatctgtcctctttagtattatttatttgcctactaattttttacttcttaaataatagactttatgttttgagccattttaagttctcaggaaaattgagcagaaagttcctatatatcctctccctctcaccacatacacaatctccccactatcaacatcttaagccagaataagacatttgttagaattgaattggtgaacctacattgacacatcattatcatccaaagtccatagtttacattagggttctctctaggtgttgtacattctatcagtttaaacaaatgtttaatgacatgtatccacctttatagtaactaacatgcagcatacagtcagccctccatattcatgggtgctacatctgtggattcaaccaactgtgaaacaaaaatacttaaaaaaaatggacagttgtgtctatactgaatatgtacagacttcttttgttttccttattccctgaaaaatattgtataacaactatttacatagtatttgcattgtagtaggtattataaagaatctagagatgatctaaagtacatgggagaatgtttactggtgatatgcaaatactacaccattgtatgtggattttggtatccacaggggttctggaaccagtcccccaggaatactgctggatgactgtagtttcactgtgtttaaagtcctctgtgctttgccgattgatctccccatcttcactaacccctagcaaccagtgactttttttttcttttctaagctgacctataataattgtacatatctgtgggggtacattgtgattttgcaatacatgtaatgtatatgatcagagaagggtaattaagatatccattatctcaaacatttatcattttcttgtgttgggaacattcaatatcctccttgtagctatttgaaactacatattattattaactataatcacactacagtggtatggaacactagaacttactcttcctatctagctgtaatttttatgttttaacagatctctccctatttcccctgtaccctactcttcccagcctatagtattctctgttctacttttaacttctatgagatcaactttttcagcttctacatatgattgagaactttaactttctattcctggcttatttcatttaatgtaatgccctccacttccatccatgttgctgtgaatgacagattttattcttttttatggctgaatggtatttcgttgtgtatttatatcatatgttctttatccattcatcagttgttggacacctagattgactccatattttggctattgtgaatagtactgccataaacatggggtgcagatgtctctttgatattgctaatttcccttccttgggatagatgctcagtagtaggattactgggtcgtacagtagttctatttgtagttttttgaggaacctccatactgttttccatagcggtgttatgagtttacattttcatcaacagcatataagagtaaccttttttctgcatccctgccagcatttgttattttctgtatttttgattacagccattataattggggtgaggtgatacttcattgtggttttgatttgcatttccctgttgattagtgatgttgagcatttttttcatgtatttcttggccatttgcatatcttcttttgaaaaatgtcttttcagttcatttgcccatttttaaattgaattgtttgttttttgctgttgagatgtttgagtttcttgtatattctggacattaatcttctgttgtatgaatagtttgcaaatattttatttcattttataggttgccttttcactttgttggttatttaatactacccaaagcaatctacagattcagtgaaatctctatcaaaataccgatgatattcttcacaggattttttttaatcataaaatttgtatggaaccacaaaagaccccaaatagccaaaacgattctgagcaaaacaaacaaagctgaaggcatcacactaccagacttcaaaatatattacaaagctgtagtaactaaaatagcatgatgttgttataaaaacagacacatagaccaatggaacagatgacagggtccagaaattaatccacatatctacagccaacatttaatttttgacaaaggcgccaggaacagtcattgtgggaaggacaatttcttcaataattagtgctgggaaaacaggataactatatgcagaagaatggaactaggtccctgcttctcttcctacacaaaaatcaactcaaaatgaatcaaagactgaaatataagacctgaaactgtaaaactactagaagaaaacatagagaaaacaattcaggacactggcacaggaaaggattttatgaataagacctcaaaatccaggtaacaaaagtaaatataaacaaatgggattgtatcagactagccactaactttactatctccacactttttttctctataatgtcatatagttggatactttatttttaaaacatatatatcactatttgtattatttacatgttttattatttatttttttctccctctagaatgacagctgcatgaaagcacagtcattctcttactttttaaatgtcgtatcctcagtgctagactatgattgtctcagaaaagtcctcaataaatatttattagttaataaatgagtaaatcttccctccattataattactctcatccttctgctaacattagaaactggtcgttggaaatacttacatagtggcaataacaatattggttgtcatttttattatcttatagatgccaggcactgtggtatacattctaagtgcattattttattcaattctcagaactaccttctgaggtaggtaacatttaacaggtaatataggtagtatataagtagtcgagatattttttaggtacaaaaatgagattcagagaagttaacttactgaagatcacatatttagtaaattgcaaagttaaggcctaaattcaggactgtaggattccaaaggtaacagtctttattattattattattattattattattatacttcaagttctggggtacgtgtgcagaatgtacaagtttgttacataggtatacacgtgccatggtggtttgctgcacccatcaacctgtgatctacattaggtatttcttctaatgctatccatctcctagtcccccaccccctacaggctccggtgtgtgatattcccctccctgtgtccatgtgttctcattgttcaactcccacttagagtgagaatatgtggtgtttggttttctgttcttgtgttagcttgctgagaatgatggttttcaacttcatccatgtccctgcaaaggatataaactcatccttttttatggctgcatagtattccatggtgtatatgtgccacgttttctttgtccagtctatcattgatgggcatttgggttggttccaagtcttcttaaactgtatgttggaatttagagtgagaggaaagtgtatagctaatccactccactctttggatttgaaatacggttgcttaatctaagtgccttgatatttaactctagtccatttaataattacacatctactatttgctgtgccatgtgctctagggttatcacctgacttttcttagaaatgcagacttttagctgtactccaggcctactgatgcagaacctgcatttaaacaaaatctccagcagctttgtatacatgagatatgtgtgtttgagaaacactgccctctaaggaatatcaagacccaaaactcccatgtccttgactagtgagcaaacaaggatcttagcttttagaataccttgcactttaggaggggtcatagttactcatgcttatcacacttgctagcactaatacacacccagaattattataaattatacaagcaatgaactatcagccagctagtaaggcagatagtgttgctgagggtgaacaagccagcctctagcccctcgacagtataaaatattcttttccaataatgcatagacaatgcaatttctttttctcttgctgtgattcactggtggcgtgggcatttggtgtcatgttagcttttctaactgtagttgtgtagagttctgttataccagttagactgtagtacatctgcaattatgcagtaatgtgcattgccaggaagggctgatattttactacaaatcacagaagagctactgcatgtccaccagggaagttgtgggtggtcaatcttagcacatcttgaggctgctgtgttcttacaatagggaacaaagtgttgactgttttctaacatctctggtccaaacaaacccaaccttcgttacccactttacagtttatgagcatttatttacacaagggaaaatgaattttgatactccaggtatgccatctatcccagcctgtctgcatcaaaatgccagattgtcatctccagtttaggccccctctttttctgctgtaagttgtatttcagtctgaggatgaattcagcactttaatcagtgcatttgttttctgctttgtcatccacgtaactggcaagtctggccagggcactgtttgcagatgaaatctgcctgtgtctggaatgcagagtggccagtttctccgacttttcttctctttctcagtcaacacagccactctttccatttgttcccagttctatgcagactataattatgtatatttcctttcatgccacttacacttgtacatttctgcactagggtgaatgcaattattccattttctccttttttcccctttgtggctcaaactgttgccttgttctttctcattgattcctgcactgcaaaacagtcaaatggaaatacaatatgttgcacctgacattcatttaaatcacctgccatgatggtaatacatgctggtgatttcttagtgtactagtcaatggaaaactgtattagtattgcaataatatgcctatatttgctttttctggaatatactgtggtttggtgcgtgaacgattcaatagaattttgaggatgtagtgggaatgagtaataacacttcactcaatatgttctttaatgttcaaatcctaacagtcctagcacatccttttgcccttccaataagttagggtaggaattaactcttattgtgcactctcactactcaaggccctggactaggtactctgtatgtacattcttagtttcacatatatttttgcgtaatccttattagagattaaaattttaacatatacatatactttattttacaggcaagggacttaacattcatagaattaaggtgaattttttcaaggtatcatagctggtcaatgacagaatgaagatttgtttgactccagcatttatccactttctacacactatcttcctctttgcaaagttttaaattccagaaagtttagcagcctccttgctatctgatgctgattaattgggtggaatagagtctattttttaaatctcactcaaagtattcactgcaaagctgccgtgtgtaaataattgtgtgtgtgtaaaatagatgctttctgtaatttgtgagtaatgtattatgggtccaattgcattttaagaatcttttagcttatcctaaatcctcatggcatttttaatctagttttcattgtgtgtcagtaaataatcctggtgagcaagactaaagatcaagtgctagccctggctttgccatatatttgctttgtatcctagggaaagacatgtcaagcctctaaaacttagcttatttatctgtaaagtagagtaatacacataccctattcacctcacaggattgttgtatatgttgaatgagataatgaatatgaaaagcttaggaaaccacagtcatacatagaaatgtatcattgtaagtcaataggtgtttgccaggtccatagcattagcctacgttagacactgcactgaggaggctactaggatttctttgccttcaaagaagttaaaatgtagacaaacaaaaaaagtagtcattgaacagtcttgacgtttcaataaatttacaaaaattactcattgttttcaatatcatcagcagttaattctcaagtagagtaggcatcatgagaaatgctattatctaatatgttgtaattcacattttaagagtatattatattatattatattatattatattatattatattatattatatttttgagtcagggtctggctgtgtcaccaggctggagtacagtggtacaatatcggctaactgcaacccccgcctccctggctcaagccatcctcccacctcagcctcccaagtagctgggactacaggcgtgcaccaccatacctagctaatttttatatttttggtagaaacagggtttcaccatgttggtcaggctggtcttgaactttagctcaagtaatccacccacctcagcctcccaaagtactgggattataggtgtgagccactgtgcttggctttcaaagttttttaaaaataagtcttactttactatgtcttgcattcaacttgtcaaattgttacagtgaaaaatgccttctaatctaccaagaccaagttcaaagcctaccacttactacaacaatgattttccaagtgtggtccctgcactagcaacatcagcatcatctgagaaattgttagaaatgcgaattcttgagtctcaccccaggcctactgagtcagatactctggggtgtagcccagcaatctgtgttttaataagccctcctggagattttcatacatgttcaagagtaagaaccactgctctactaaaacctcaaggtataagtcagacgttaagaactcaaaggctcaccgaggccaagaaggacacatgaatgagggaaaggactggaaataagattatcaggagtgggaggaggaaactgtgttgaattggagagctgcccttgcttaatgggagcagctagtgattattctagacattggttcccatttaggaatgtgaagcaggtccaaatataattttccaaaagctgaaagaaagcatgactgtcttacaaatatacagtgaacgtgtcaaagattaatttaactcataataagaatttagtaagatgacagctggttcaaaggagaaaatgagaggctggaatatttatacagtcaacagaaataagaatactgagagaaaataaagttagttaaaaaattggttaataccctacaaggaaacaaaactgttacctatggagttatttattctattgtacaaaaataatttacaatcactcaatcttctacaagttggcatctaactttatagacttttaactctaatcagtagtacacagtaaatgtaacaatattgcatcactagagtctagggcctagacaattgtatgagtcttaggcaggtatcttagtccattttctattgctgtaacagaatatcacagattcggcaatttataaacaaatttatttcttacagttctggagactgggaagtctaagactgaggggttgcgtctggtgagaaccttcttacggcatcataacatggcagaaaatatcacatggtgaaaggacgagagcatgtcagctcaggactctcttgctcttcttataaaaccaccaatcccatcatgggggcccaactctgtttaggatcagaccttatctgatcctaattatctcacaaaggcctcatctccaaaagccatcaacgtatgaatttggggattacgtttccaacacatgaaacttgggggacatatccaaaccatagcagcagattttttagacaatattctattatgactgaatgagcatgctgtagtccctttgtctcatttttgtcttatttccaaggcctgggtgattttttcttaacaagcaagtgtggcagaccttctacttttaaaggaaaatggagatcaagatttatatgtgaaattttttctttaacaaatataggctaaataaagtgtgcttgaggactggcaactgtggattgccaccttgcaaaccagagccttctaccgtttgagccagtatctttcaagcctcagagggagggcagaagcaacccagaacaaagaaatcaatgcctagctttgaattgaaaaatgaacttttaaaagtgcaccgcagaaaaaataattttgaaacccaatgcaggcttcttgtgagattgtttttcggttcgtttgtttgtttagttccaaagattgactttgctaataaagattcaaagtttggtgaactcccaatttagagtttgttcattcattcattcactcatcctacaaacatttattgagtatctgtaaagtgccaggcactgggtattcagtagcaaacaaaataatgtgttctcatggagtttatgttccaatgggtggaaatgagcatatatcagcaaataaacaaatagtatgtcaggtgataataagtgctgtggggaagaagaggcagagagaaggagaagagggtcacagagggcatagggttgctattctacgtatgatcatgagggaagagggtcacgcaggtgcatggcagttgaccagacctgaaggcagtcaggaaaaagatatctggagtctaagcaatggggacagcttgtgcagaggcctgaggcaaaagagcagagtgttagagaggaggcaggaagggcagataatatagggcttcctgggtcaatatcagagctttggattttattaagaatgaaggggaaaccaatgaaggattttgcggaacagaagaatgatgctatgttacttgcattttaaagggatcacatggctgctgttctgaatataggttctagagaatcaaaagaggaagcagatggaccagtgaggaggcaatcacagtagtacaggtggaggatgatggtggctcagaccattattgtaatggcaggcaggtgaggaattatcagcttctgtatgtatttatcatagtcagtcagaaacgtgtgacatcaaagcagacaattttgtgcctaatgggcaggaaatagcactagaggagctatgagtcgagctgaggtgtactgagtctccatgaaatgctcaacccctcttccctttgcttgataccaagctctggagataaagagaagatggagacccttggagaaatttgagggaattctggaaagtggttttgtttttgttttgtttttttctgcaaggacaactatgccctgtgaagtatcctgcatcctgcatgatattatgatggtagaggagcaacaactgggcgaggagcttgggaagatggacaagagtgttgcttctcaaattcctatgcatcccgcatggtgaacaactaaaagtttcccataaccctaagaaagaaacaacgataggaggggaaaaaaccagcagaaaagaaggatctgtgactaggatcaggaggacacagtttgcaaataccactttaccaggacccgtgaaagggccagagatgctggtggcagtagacaaataagattggattccaatacctagaaccaggtagtctgaaatgtgctacagtgtacaccagcaaagacaggggcaaataacgaagacataatctcttctcccaaaaaggagggtttatcccaacagagctttgtaaaatgtgtgcaatcttcatcaacaagacaatactgataaaacaacttcagacaaaatgtctgtttactctatcaggcccgagttgaatggggagcaattataattctagaattttgaactaggtaaaagtatccaggtatacagggctacttgtcctaatagagatttttttttccccctgcctaacctatttgtattgcctacacagcctgtagcaaaacagagtagcaagagtagtcacttataagtagtttttcttataatttttttttctggttaaaccactgagattatgtactgtggcaaaaaaagaaaaaaaatgcttagcttccaattttatttgtggtaggaataatctagtcccagctttccctctacccatacccttccacccatccttccccaaagtcttcagattctccatctataacgtgaagggcttgtgcagaaaataattacagttcctttaattctaaacatggtggactttctattgccacgtaagcatttccaactataccatcccctttcctgtcactcacctcagtgtctggcacaatgccttgcttatgttgggtactaaatatctttttgccttatgagtaaatgatgcatgagaaagaagacttcagcctgagcccactgtagggccttgttgaggtaaagggcttgatgggccttggcctgaactccattggaaccagattataaataagccacaaccagcttatttcctgtctctttttcctcagtgccaccacttagctactttctggtttagtcctttaggaaaaacaataagcacctttctcatttcttctcttttccttcactggcagctgttttaaggcattaaaactgggagccgagcatgtccagaagtgaaagattctctcatgatgacaaattgagtctctatttttaaaaaatgtatgtaagagtgctccaactggtcatcaaaagggctaattagaaacttccaatccccaggagcactcaagtagaagacggatagaagacacttcttagagcaacactgctgctttggtccgactgtgcctatgaaggaactgggttttgcctggtctccatagataccgccttcttcactgactttatcttagactcacactacttgtttccaatacgagatagcaaagcatatgaatagaaaatgaagagaggtgacctgattggactgaggaaggcaaggccccttgaggagacagacagtttggtgttttgttagaaagtgatatgcatgggaggaagagggagagagagaactattcagagaactgtgtgagcaagggggagcagaacaaggtttatgtcaagaacagcaagctatcaggtcatcactgtggctggagctgtttttttgtttgttttattgggacagaaacttaagttgatggtgccacttttgagaggtttaaaatctaaggccaagaagtctgtatttcacaaaatccataattcaagaaaatgtggcaaggtccatgtgattatctgctagatgtgtggtacagagaggagtggaacatgagtaattgtgatccaaacctccatctttggccttgaagcaaaaggaagtcattcgttttaaagatggatgtagaaataatttctgttgataatttttgggcagcacttgacttctatggggtttttgattcagaataaatacttacctacataatttcatttatttgttctgctgaaaaatattgttttcctgctaaaaagaaaaaccttcaagtgttcataaacctttctgattatctgcagttctactgatatgttcacaaaaaaatagggataaatgaattcgaaatgtaggaatttaatttcctgagaactatgtatgttttctgaatgaattaactatctataaagtatgacaatgtgcaatgcagtttaggctttacaaatttttttcatggtttgaaatttttctctttatctgtgttctgattttatatatttccctggttccatacatatactggttctagaatgaatcactatggtgtctagttttacactcattaatgcatgaatttgatatctgaagcctgagttttaggttaaatatggtggtagggtggaaagagcaaaggactttgagagagaagaaccaaggttgggatccccattctaccacttcagagtccagtggcccttgagcaattaaaaaaaatctcccaagatcatttttttctcatctgtgtagtagtaaaaacaataccaacctccatcttggtagagaaggaagataagagtttctctcacaggtgctgaacaatcactattcttccctcttctttttccataaaatatattacttgcttgcatagtctttctcctaaaaattgtcattttctctgaaaagtcctcctaccgtgtgaccttaagaaagtgatttgtgtcctccgagcatcagtcactctttatgtaaagtgagggactaaaggagattgccaggggaccttacttcgattagtgtcattcagtgagtttgggggatttcatctacttcttgactccactcttccttgactgtccatttcctccctccatcccatgaatcctatagggtttcagtgtgacttacataatgggtgttctatatcagacatcctggacttgctgatgagatttaagcctagaaataagttgatagaatttgatgagacctactcatggagcaggcagtgtttttcctcttgttagctaactttcttttccattccaaaacattgtgatttgcaagtctttaagaattttatatcttctgacaatttagcacaacctgctcgtataaaatggtgttatacaatccagtagcagttgttttctttttttaaaaaattttaggacttttttttttttttgagatggagtctcactctgtcaccaggctggagggcagtggtgcaatctcggcttcctgcaaacttcgcctcctgggttcaagtgattctcctgcctcagcctcccgagtagctgggactgcaggtgcgcaccaccacacccagctattttttgtgtttttagtagagatggggtttcactatgttggccaggatggtctccatctcttgaccttgtgatccacctgcctcggactgccaaagtgctgggattacaggcgtgagccaccacgccttaaaaataagcttaaaataagctaataaagtgtgaaattcttgaccatgctgatacagtttctagcgacctctgtcacacacatccctattagtctcagcacttgagtattctgttatggagctcaagaagtggtcacaaatacatacaacaggtaataaggtaagatgataatatgtttcattcttttactctctagaacaaacattataattactaatttacctctcacctaaagaaaaatcccaggaattccagcgtgctttaatgtagtggaaagtgaactcaaataagaagacctgggtataaatactgtctcccagtttctagctgtatagccttggtgagttaatttgagttaattttctgagctttaacatcttcatgtataaagtaggaataataaccctggtatcccaggatgttgcatggattaaaagagttgatatatgtaaaataacactgtaaagtctaaaacacaaaaattagcattattataaaataacttctttcttgttcctaacatcgttactattattgttttaattttatttaatttttttatccagatgctgaattctttaatatgccactgttttataaaagaatttctttcttgttcctaacatcattactgttttaattttatttaattttttatccagatgctgaattttttttttctttttttcttttttttttttttttttgagacggattgttgctctgtcgcccaggctggagtgcagtggcgcgatctcggctcactgcaagctccgcctcccgggttcacgccattctcctgcctcagcctcccgagtagctgggactacaggagcccgccaccacacccggctaattttttgtatttttttttcagtagagacggggtttcaccgtgttagccaggatggtctcggtctcctgacctggttattcacccacctcggcctcctaaagtgctgcgattacaggcgtgagctgctgcgcccggcctggattcttaaatatgcccctgttgttaaaaacttctataaaatacaaggaaatcatagatgatcaaagaaagtctatagagtgatgaaataactaaattaggtaaccaaaagtgaaggcaaaaataaaagtattatttgtctttttcacccatgttttaagaaggtggtgcccaaagttttagaattagaaattctttttcctcacattttcagatttgagagagattacgtatatatgatgagaaagagggtctccctgtgtcacccagctggaatacagcgatgcagtcatagctccctgtaaccttgaagtcctgaactcaagcgattctcctgcctcagcctttcaagtagctagggctacagctgtgtgccaccacatctggcaaatttttaaaaaattaaaaatacagtgatagggtctcactatggtgcccaggctggtctcaaatttctgggctccactgatcctcctgcctcagcctcccaaagtgctgggattacaaacatgaaccaccatgcccaacctgggagagtatcttgagttgattttcggcatgaatttatttctttgttattatatgtaaacataaggctgacatttagctgtcatgcttgttaaaatattacaatatatccatattctgctgttcaaagaccctcctactaccaccacaacctctgccaggagtgcccgctccacagcccagcaataaagtgggtccactcctagaataagtgggggcctctagaaacttgcttgatcacaaggcattcattctgattgatgaccctgcagaactaactggtaaccgttttgagtaccactcttaccaagttctacattgaggattaagtggctccattactaccagaaggtaatgtcttttcattaacagaaatgctagatggagcagttatgagcagcactttcccttcaaatgccttgctggcattaaccttagagatttaattcaattcataaattgctttaaactatagcttttatatatatatattctgagtagaccccccggggtcagtgattccaaaaaagtgtaagaattatcatgttagactctttctaaaataatacattattaggtttataatgtagagacacagggggaaatgtgtacaaatggaaaccacactaacaagaagtacagttgtcagcagtttaatagaaagaattttaacaagacttgaatgatttttttaaagagtaaaaatgagtgtggtctagtctgcagcaggacatatgcacatttccaacataaacaaatggatctctatggcgttacctagacttacatttatatttactaaagcctctctacaaaaatgagaggatgaaatttagtctttgatacccacttctggaggaaaatagagccttccttgctggcttcttccttgctatccagttcaggcaaagttatattgcaacatagactgtgtcagaggcaattaagctctttctggagacactaataccaattttccaagcactattttggaatgatttaattatattaagatcaataacaatagctgattgtataactacatttactatttgtcaggtactatactgagttctttatttacattctttcattaaatcattggtaacaaccaatgagatggatattattatggcccatatatagatatggaaattgaggtttagagaaattaacttgcgtaaatttccagagttcattaggtagctcataagcaggaatccagagccttcataagctcatgagcagaaatccagtgtagggtaatatactgtctgcttcagtatttcatttgttccaggtcttcagttttaggagatgtgatttacctgcttgttacccatgcttgtctcatctgggttatatccccacccccctgaaaaatcacaagtgcacaagaagcaaagactcatacctttttattcagtttgtgtatggtggctttcacatgtacacttggttaatttttatgtttagtaatcattataacaatgatttttttcttttatggactattccccactttccagtgtcaagttattttcttttgaaaaattttttcaatacaatattttctcttcatatattattactgctactactgtatgctttcttcactagttcttagatatgttgctagatttcaactaaatgtatgtaaacacattcgactaagtataagtaatcatggggtttcatcggtgaagctaaactcttagacataatattacattgctataaatacagttatccccttccccacctccattcaagacaattgactattggccccagtcttccacctattgttgttgttttgctggttgtgggtgttgaggggctcggggagttcatggatggcaagataaggctgagcaggaaatgtcacgcaacccctcctcagtaagtggggagaaaaaaattgggtcctggagtccccagagttctacaggcccaacctccttgggtcaagctggtgagatacctaccagcttgttaggtgtctagaagtttcagccaatcactgagcctagaatctcttatggacattagagtgggagcaggaaacttgccaccaggttgtgccaaaccacaactaagtgttggatatgatctctactgagatccctgaaactgctcccacccctcactcctgcttacagctggaaagaggcacaaagataatttattatatatggtagaacatataaagatttatagttgaagagacctgggttatatcctgttgcttccaaggtttttgtggagtctaaaataagacagtggtgagtgcaagcaggcaggaagcacagtgtccagcatttaccaggcactccatagtattgtttggacccgacctagaaagaattgacttggcatgcagtttgttccttaaatattgaattcacctatgctattgccacattactttattgaaagcagggtaactttttctcacttgatgttgaatgcagcagaataaacctgtttccagaatgagaatttttttatctgaaaataactgaaccacatcttgtctttaaccaattcactggcttcagcaaggcacctagctagggcctggcatacactattgaaaagcagatgtcatatcccagagatgtctagagatggggatggcattctttatggaggggcagagttttgttggcagctttacagtaattcatcaatagaggaaaagcaacattgcataaaagcccaagagaagcttgagacctgaggaaatgtcttagccaagcagagagagcagagaaaggaaaaaatcttagaagctgatcacaggatagcctgaggatcagacaatacagggcagcctggcacaatccggaaaggtaggagacaggagtatcagattttgtctacaaactctggtgataaggccagggatgaaggataaataaatatagaaaatgtggctgacattctggtatgcaactaaaagagccaaacctctatgtgaaatcgtctgaaagtatctagggcaacagtaggcagcacattgagaacctcaaactctgaacccatcgcagtctgcttcagggatgcctctgacttgagataaggcctcagtgtatctctggacctctctgggcctctgttttccacagggatcgctaatatactagataaaaattcttataattatgttatcatgattaaaaataagactgcaaataatattcttaattggtgcaaatttacaaggccgaagaagatcggcatacaacaaagaaaacggctatggcttttccatacttgcaagtatagagttgtgccctcaggaaatgcccagagatttcaaaggttaacaaaggtatcaaagaaacagtaattactaaggttaatctgccagtaattattcatctcttttgctccttctgaaacagagcataggcaatatcagaggaaatgaaggtgtgggatgaagccagttccacgtctcttaaatggctccttattgaatttagaaataccggaatcattaaactccatgattccatggtagatcagcttgatgttcctatgtatttctaaagaagattatgagctcagattttttttaagtcagcagaaccctattcttcacaacagctcagcaggctttgtaaagctagtcagactgaatttttttccaggatttaaattaacagagaaaaagataaaacgatcatttcagaagcagccctttaaggcctataaaacaagctaaattgaaagtcagagttaggagatagagcctttgtgaaatatgtctgtagagatagaaatctagttactgatgcctctcctagacacctgtctgagtgtggaagcaccaaggaaacaggtcagatgtcaagactgtgacgttgctcttcaattgtaggtaggatgaagtcagggggtctgaaagtcacatttttttttctgatccattttagaaagattcacatttagtattctgaaactcaaaactgcttcagtctttttctgctattatatgtgacttaatatccaagtcttgagtttttgaaactgttcttgtcaattcagaagggctgaaaagtaccactaaagcaaatcaaagataggttcactctcactgccaaaagtatttttttaggaccggtaacagtattttctctagaaaaggaagaacatcatattgtgaagatgcttgaaaagtataaactattttgtgcaataatatcattaaacgattcgcatcgctcatctgatatcctatgtaccttcaatgttttccaccctacactaggccccatggagaatataagagagcacgaagccagtgatattcaccgttgacctgcagagaaaataaaggtgtgtgttatttgaggcagtgtataattagatagcaaactggatatcatttagcaatgcataaaataaagatttggaaactggagaaatgaatgagaactaaggatctcttcatggaggagatgtgatgtgacctagctcttgaagaaaggggatggtctggaaagattgaggaacagataaaatctcatttaggccaggctatatgtgatgagggggaagggaaggaggaacaaaatgagcaaattatagagccaggaatgaaaagtgcacagtgtgcatgtttgtgttgaggctagggatgtgaggaagggaaacagagtggggtaggcctggggagtacctgccgagagctcaggtgtggtagggtcaaatgaagctgagaagctaggcacaggcatttgaactgcctcattcatcttcaccttgatcctggttcatacccagacctttatatctatgttcataatgacagtaagataaggatttttttttttcttttttttactagctgtggaagcatttcctgctccattttctaatcaccaaccaccaggactgaaattctacttagtttcaaagctattcaagtcagtttagctcctgacccttaggactgctctcacttcttacatggcatttgaagttttcttttcatttctctttgtgctggaccagatctcacagtgcttagtagctggaaggcttcatccttgtcaaacgtcagcccatcctcttcataacttgctaaactatgtattaaggtaggaaatagtaatccagtaataacaatgagtgaacgtgataaagatacaaactctaactttcagttagagttcccctcctttataggctaacaactcccatttatatttatagtatgtgctttggaagaagatatgaaataaaacataaattttttatgttaacagtctatggcagattagctacaatcctaaaaataactttatagagattctaaatacacagccacaattatttttgaaagtttaaaactatttttaaagctgccataatttagtaattctgaaataaaatgcaaagtgtaatgcaacggtgaaccaggttaacatctgtacagctatatatagctgcttaatatatcaagagtttggaaagactctactttagtgggcctagaataattttattttcccacaaatcctgaacaagtacaagtgttgcagaaatattgtcaaagagtaaaacattgagtctatcaggacatttgagtaccctgaagagagtaaggcattcattgttttaagcatttttatatgtatttataatcttttaggtaattaaagataatgatattttagagataactgtgctcagcacattgagtaattaagaattcaccatgccatgtagatttggatgcaggaaaaatttgaattacagtgtatttagataaaaaagccatcatgccatttgggttctaaagaatggaaaaatttgaagtcctctaaaatattttcatttacattttagaaatcttcaaagtccacaaagagtgatgggagttgaatatttcaatggaaggaaagagaacacttgacctcaattatagagagcatgacaaagtcaagaaattttagaatctctaattgtccagagttaatatttttgacatttttgcatgtattcttcctgtatatatatatatatatatatatacacacacacacatatatatacatatatatatacacacacatatatatacatatatatatacacacacatatatatatattttagagaggtgaggtctcatcatgttgcttaggctacagtctcaaactcctgggctcaagacatcctcctgcctcagcctcccaaagttctgggattacaggcataagccactatgcccggctgtattaagatgtgttgaaatatattttaacatgctttgagtcttataattctctacatactttatttatttagtaataaattgtgtttattggcccacatcattgaaagtcttctatataatgtttaatgataacaattatctatgaaacaatgatttcataattaaccattcccttctcactgagtatattatgtccaatttttctctattataaaaatagaacattttaatagacattttatgcatatctgattatttccttcatctcaaattgctgttcaaaatgcatggacattttaagacttttcatatgtatttcaaataaatctacttcaaattaaatcctcacaacatgtattagtgtcattaaaattctttattgaggccggaagtggtggctcatgcctgtaatccaagcactttgggaggccgaggcaggcagattgcctgagatcaggagtttgaaaccagcctggccaacatggtgaaaccctgtctctactaaaattatctgggcacagtggtgcatgcctgtaatcccagctactcaggaggctaaggcaggagaatcgcttgaacctgggaggcggaggttacagagagctgagatcgggccactgcactccagcctgggtaacagaatgagactccgtctcaaaaacaaaacaaaacaaaacaacaacaacaaaaaaatctctttattgagaaggattttttgaaaagccccacatgtgggacatagaccaattttcctctcagacataaactatgtggagctataccttaggatcccggtatctacatattatgacacatttccttagcaagctgctccacagttcagcggtcactagatgtttcctaaaaaaattattgagttggatttcagggagagcttgaagcagttttcatctctaatcattttttataagggatttcataacatttgcaaaaaaaaaaaatagaaatgttgactccatgataaattccagtagcttcttctaataccgcacattggctgtcacctttatggccagtgagatagcacacaggaacttgaatcactgcataagatcttgcataaagtgcctcagaaaaataagtaagtatataagcaaataaagagtaagctacaacgttgtatgtcttggatttctaaaaaaagaaaaaggaaagagcaagcactgaattaaaagtcaagaggaccctagtctgcctccctcccagattgtaagttatttgaggtcagggagcatggcatctgtcatcaccatttctctctactgcctatgagaatgcccaggaaacggccctcagtaaaagcacgttacctcaatgaatgagtgaatagataaaagaaataatgaatgaaggaatactgagcttgaggctcttagaagaataacatgtggggccaggtgcagtggctcacacctgtaatctgagcatttggggaggccgagatgatcggaccacctgaggtcaggagttcaacaccagcctgggcaacatggagaaaactgtctctattgaaaaatacaaaaactagctgggtgtggtggcacacacctgtagtcccagctactcgggaggctgaggcaggaaaatcacttgaatcccagaggcattgaaccccggaggcagtggttgcagtgagccaagatcatgccactgcactcgaacctgggtgacagagagagacttcgtctcaataataatgataataataacatgtggtttacagcaacatggaaacagtgcttgtgtgtcctgagcttacctaccctccaggggatattttcatggagatacaggaagtgcctaccccaacaaatacctccactccttgttcaggaatatatatgcgcaattcagtttttactctcttaaatgtatcttgagaatgagttgtctgcacaatttcatcttttctttgtgtgtgtgtatgtatgtgtgtgtgtgttttaagaattgcttttcatagtgctgtaatcaagtcttgtaccttgagaacagatagagatcttaattttctttattggaaacaggcttattaccagggtgcaaggtaaccttttcccaaataggaaaatgtttcctcaaaatgaagacacatcatagatggaaataacattgaaaccctgtattttaaagaccattgtctatttcagaaaaaccttaatgatgaacattaggtacttgaaaaagaactagtgaaaatcattaaaagaaaagagaaaaagaaattataaacttaaaggagtgttggaatgaagatttggtgatagacattttacaaaccaaggcagcgtgggaggtcttcaattggtatttttaaatgtgagcagatgggctgagcattcttatagaaagtggatgtgtgtgtctatgtggtgaaaatgtagttcatgaaggctgttcctttgcaggtgggaataatatgagctactcgctttgcaataacaggagaactaaaatcaaatccgcaaatcattttacatatggtgacccagttcttattttctcattaactgtccagggagttgtttttttcttttcatttgataatttgagtgaaaaaggtaatattatcaaaagaaatttgaatgtccagcaagtaaagatcagacacatcatagcagaagaatatctattacttggctctaaaagtactgggtgtctctgaggttaggtgggacaaaaattaaagacacacttcctacttacaaatctaatctgagaggcaaaactgccatgaaattaaggaataagagcagttaataaataagttttgaatatatgcattgttgttattgttgttgttttatcttaaaagacagtaaagggttaagaatgcagactctggagccacaagacttgggtttaaatcctggctttactaaatatttcctagctgcgtgaccttgggcaaatcactcaatcttcctttactccagtaaaaagaaaggaacaaggagaataatagtacctatcgacagggaagtttaggaagactaaattagttaatatatgtaaagtgcttagagcagtgtctggcacattgtgattgctacataaacaaagtgtttttatttactattacttacttggtattaatttgatattacacaggtaactagagtttgaaattatctttcagacaaatgtaccaaaaatattttttgttgccatagagaacacgattatctttcatgaagtgaatgtacaatgttgctattttagataccctgccccccgccaaccataacccctttcactagaccttgctatctccctgcacctttctttggagccaaatatttacccatagttactgcttgtcataaaaagagcattttcttttgttttgtttgaattgaagcatccttttagggctttatctaacacttcacattagtattttaagacttcttggataaatacatgtttattcaacctataaactacaactcaattcaggcacctgctatttgccaatactatgcatatcattgtgagattagaaagatgagtaaaacagttattattcaggagagtaaagtacagtggtattcagatattcaaatatataatgacaaattattttatgaacctcaatcatatcactttagtcttaagggatctctatttaagattcctaaattttagtgaattcctctatgccatatggcagagtttcctcttcctttgttctctgtcccagcttttttctaagtctgttctggtttcatctctccaacactgccaaaatgcacatagcattccaggtaaagttggcaggatcatgtttccactttgttacatataccctttgtgagtgttttgctgctggaaccgagtacatacaaagggccaaatatttagaagataagcacaatgactctcagaaccatttgttcatttaaaaaaagattctatttcttgcactaaggacaatatgctcacagttcaaaagtagaaaagtatagaaaagaataaacaaacacaaaatcgtttattgtctcaccaccagaaagagcatggctaccattagtattatttatttatttattttttattacactttaagttctgggatacatgtgcagaatgtgcaggtttgttacataggtatacacgtgccattgtggtttgctgcacccattaacccatcatctacattaggtatttctcctaatgctatccctcccctagtcccccacccgccgacaggccctggtgtgtgatgttccctccctgtgtcccggtgttctcattgttcaattcccacttatgagtgagacatacagtgtttggtactctgttcttgtgttagtttgccaagaatgatggttaccagcttcatcccctgtccctgcaaagaacatgaactcgtccttttttatggctgcatagtattccatggtgtctatgtgtcacattttctttgtccagtctatcactgatgggcatttgggttggttccaagtctttgctattgtgaatagtgccgcaataaacatgatgatttatttttctgccctcccctgccacctagcagatttgggactaaactgttgttctttctctgcctttcaaacttaatattaaaatatgagcattttttttccataccatcaagtattcttaaataatgtatctgatggatttaattatcatttatttaatcattctcttagtataaggagaggccatagcatgcaggtaagacattgacctgatttcccctcagtacctttctaagacattactctttactttaagtcacacaatacttccttttcttacctccttttccaatcaaactttcttcttaaacatttcagtgttatggaaaatgtgcaagatttagagtcagttgttctaaaactagcttgcgtggtatttggcaagttactttatctgacttaccttcagctctctcatctgtgtgattgggtaacattccctgcctttgttacaacatggttgctgtgcggatgaaatcatatggtgaatatgaaattgttttacatattataaagtgagagatggttctttccctgtgctgtacttttctaacccaaaggcaacattcattatttttcttcgtttgtaagcagaaaaaaaagggctgcataaatgtgctggaaaagacatcattcaattgcctgacctcccaaaggatttgttaatgtttaaccccaactcaccctttcccctcagtgacctgatttatctgatgatttaaaacaaaggttatttggatggtgaaattacaattctaaaattttcattgcaagtaaaaaatctattggtgaaagaaaaccttagttatttttttcaagtacctttttcatatttatcatagaatataaccttatagtagtaacaatatcaacataataattacaatgtattaactattcataaagtggcagctaggtgctacatatatcagtttaaagcttctcaacaccctacagattatttgttggggtgaaaagtttatcaataggccagagtcatttagagaagagatccagaatagatctttaaaaaaaaatcagtctgaattagaaagaaactaggcttaagagggaccaaaacctaaatgcaaaaaaaaagcattagcaaaccctactggctaagtggtaccaaaagaaggaaaaggaaaaacaaagaaaggacttcaatatggaagccctagtgggaggcagagaacaggagactttcctcctcctcctcctcttcctcctctttcttctcctcctcctcctcttcctcctccatgttgctgtgttagcccttcttccactgcactgtggctattagcgaagttaatgtcctttattccaaactgaagtacattaggacagggccaatgccaatgctttgatcaccatttttacttgattttttatagctctattgaggtttaattgacagattacaacaaactgtgcacaattaaaatgtacaatttgacaaattttgacatgaaactattaccatgataaaattaatgaatataacaattgcatccccagagtttcattgtacgtgtttgaactctttctctctttgcctcctctccatccttaggcaatcactacttgttttccatcataattgattagtttgtctcttctaggcttacttcactccatgtaattatttgagattttaaagcatgttatatataataatagttcacctcttgttattgcttagttgtattccattgtatggatataccatagtctgtttatccatttatctgttcatggatgtgtacattatccattattgcataaaagattatcccaaaactcagtggcttaaaataactattcattatctcacagtttctgtgggccagacatttgggagcggcttagctgggtggctctggttcagggtctctcatgagattgctgttaagcaggtgaccacttctgcatgtgcagttacctgaaagtttgactgggctggaggagtcacttccaaagatgcatttttatctactgtctcaattattgtacctagtacacagtagtattcaacaaatatgtgttgctagagtaggttaagctttgattatggaggttcttaaattttaggctaagcatttgaacatttgccctcatcccccctaagcaatggagaatcattgcaggggtttgaatggggaatgctatgataacctatgttttggaagtctggtttcattgacaggaggtggcccatttttgagtaggacgacatgaactatccaattgtgcagtgctacttagagattcagaggtttattttcttgatttgatctttaagcaaaagtttatatggtaaagggtcagaagcatagcccctcctgcagagcagacatagtggattttcatgaagctccaactacactttttaaaaattcttgcatcttaaagacatgctaagaattgaggcttcattatatagcaggctttacagatctgctaataattgctgtatggtacagataggacatttttctcctctgaggctttgtttctccatatccaaaataaacaatattgactagctaacttctgcactccttttaagttttaggatatgtactatgagaagtagattattaattgcagaaaagtcagtaaaatacaagagtcctgtatgtgatcccttcccaaagcagcatctagctttatagctcaacgataatgtttaatctggacaggaaagacactatacttcactcccatgatcctctgttagggaatggctgggcagaggcccttgcttcaagggcaccttagggtaaaagaggctgggaaaggagaaaactgggttaaacctattattgaacttttgttcctaacttaaatgaagactaaatgacacttgctgaacatgtaagaggaagggcatggataagatggcaattaaatgttgctgacacaccagcagtgttgacattttaaaactcagaccgcttttgaaatgtcttcttgctctgtttgtttcttatacccaaatttggttgggttttattttttctaataagtatcgtaaaataggtattatgttagtcaggggtctctggagaattggaaccaataggagatttttatttatttatttatttattataagaaattggctcatgtgattattgaggctggtccactgtctgcagagccagtgtcccagtttaagtccgaaggctagtaggctgctgtagaaccaggaagagttgatgctccagttcaaaggccttcagaaccccagctcaaagggattgtgacaaggttattcagccagcagggatacttcctgcagatgcacccagatggtaccattgatgggaccaaggacgaaaacagcgactacactctcttcaatctaattcccgtgggcctgcgtgtagtggccatccaaggagtgaaggctagcctctatgtggccatgaatggtgaaggctatctctacagttcagatgttttcactccagaatgcaaattcaaggaatctgtgtttgaaaactactatgtgatctattcttccacactgtaccgccagcaagaatcaggccgagcttggtttctgggactcaataaagaaggtcaaattatgaaggggaacagagtgaagaaaaccaagccctcatcacattttgtaccgaaacctattgaagtgtgtatgtacagagaaccatcgctacatgaaattggagaaaaacaagggcgttcaaggaaaagttctggaacaccaaccatgaatggaggcaaagttgtgaatcaagattcaacatagctgagaactctccccttcttccctctctcatcccttccccttcccttccttcccatttacccatttccttccagtaaatccacccaaggagaggaaaataaaatgacaacgcaagacctagtggctaagattctgcactcaaaatcttcctttgtgtaggacaagaaaattgaaccaaagcttgcttgttgcaatgtggtagaaaattcacgtgcacaaagattagcacacttaaaagcaaaggaaaaaataaatcagaactccataaatattaaattaaactgtattgttattagtagaaggctaattgtaatgaagacattaataaagatgaaataaacttattactttaaaggaaaggatttggagaattgaactcacaaactgatgttatatactcaatagcttaaactcatgataatgctgcgatgtgtggttttgcttgattttgtattttatttgggcatctggaattgacacaccattacattctgtttgcaggattttttttgtaaccatgaaattgaacatttccaaattataaactatgttaatacctataaaatatatagccaggaaccatttatcatcaagaaaagtgtaagaaattatttttgagatgtaatttaagattgttttatgtaaaaggaaaatcttgtatggcatcgaatagccttaatgagtttaattctttcacaaaaatgatttcaaattatcctagagtataacatttttatcaaagatattatttccggagttcttctttctttcttttttttttttttttagtaatttagcaaaaacattactgttctaatgctgaagtgacttttgccagtgccatgtccaggtggtgaggtataagttacttgctcttagcatttggtctgatttttttgctttgtggacacctttgagagtatccacaaagcaatgtctcaggtgtggacacctgagagcatgttttagaaagctttgtaccctgtcttgtggcaggaaagaaagaacaggggttttacataaggaaataagtcctaggaaattagtcaacgcaaattgcatttgcgtttgtaccttaccacagtcttatattgttttttaaactctgccatgaaatttggagacatgactgtgaaattcctaacttactatcttacaaagccagtagctaatttgttgctctatgtatgatcctgttacaagtccagtttgcaattcatttgtttcctagaacacagaagggtaccagtaatacactaaattttcaaggtgtgtagagaaataatatggaattagcagctatgactccaacagacaggattgtgtgagcagctgaaaggagcaaaaaagaactcagtgtaagagaaggcacatacatagttaagaatactaaagtatttttaaaaatcaaggaagaaataaatgttacacaatttgcattggaataaatagatctatttagtcctacaaatcaggagtggtgtagagacatccaaatttaaagaaaaaaaaacacaaaacagaatgttaaaaaatgtatgcagatttatggatattatcaatgagaagacatagcatgtaacttctcctatatctctactgtccagcatgtattgttccaaatatgactccctaaaatatatacactttgcagaagctctaggccctcacctcaaaccttgccattggttgccgtatttcaaggtcaatatagtttccctcactttacacaatcattattcttcaatagtggaccatatccttcaccaggtatcctatttctgttatctagaggttagcagaaaatgaaatgaaggaatttccctaagcagttgggaagaacaaattgtatgcatgtaggcaaagattttgaagatacatttgcaagagatatttgtttaaccaaaatatttggaaagtaacaaataaagacatttaaattttctaaaaatggacttgctcttctaggaaaagaatacccctggggcaaaaatataactctagctgtatttcttcttgtcactcttgattcaacttgattataaatacacctgtcactaccagaaccaaaaaaaaaaagaaaaaaatcccaagcacaaagcttattttatttgaaaaaaataaaaaagaaacttcaacactatgggacactggctcttttagcatgaaatgacttgagcttttgtagtgatgatacacatacacactcatcagtaaaacgatggtttcataaataacacaattgatgcaaatcataaaaatcaattacaattatgatttcatgacaaaatatatttaattaagtttgttatgaaaaaaatagagatatgaatcactaacaaaattcctccattttcagtggctattcatcatttatcatctagactcacatttgtctccttcctgatagcagttaagaaaaaattctaaccacacaatttgtatattgtttttctccgtattatgttaagcaaatgttcactgcagtaaaatgttttggaaattagctttgtcttatttccagtttagttcagagaattaattggaaacctgatttcttttacacataaacctgacaaaaaatgtagcttagagcaaagggtgaatgtttgcttaactcctgcttacttctcaagtacatgaaaactttaatagaatatgccagtattcactgagtttttaaaaatattaccatgtgtaaacatataatatccaacttcatccaaaaatatggttgagtttaagtactttgtttttcaggcttatttcaagtataataattctttgattttcattgttctgatttctgggtcttcaattcattcgtcacttttcctttttaagtaaaataagcttttttttttttttttttttttttttggagttgcattgggatttttcccaggaaaaaatatggcttttagtaatgctttgcaattggctacgcagatataaattaagatatgtttattctgagttcttattggaataagtttcaaaatcaacgagcttaagaatgaaaacaaaacttttgagagtctcacaaaatagctttctggtcaatacaccttacttgatttttaagctcgcagaataaagtatagaaacaaatggagctgaagttccatttgctaattcagagacttttgtgcttccgcaaattggagggcagcaagccatcctattctcatagtaatcgttttggctttgaaatttacatacaatttaatagcacatttttagccattatggattggcgcaataaagagatatcaatgtaatgcaatgtgatgctttatgggcctcattctaattcagaaagcttgtttaaaagaactaagactcttctgtttaataaaatagcaacaatctaatatctagattggtagtcctgcggtgccactagtgggagatgagagtattaagacaagagtaaggacaaggaaagacttaaaggttgcatattgaaaagtttggaattcctaatttgggagcactgatttcttggtgaagaagtaagtatgactacgttgccagtaattttttaaaaacatagacccagaaatagcaaatcgatttcaccctcataccttagtctacaaggccttgctcttgagaaggttttccatgatattgcttaatttcatctgcacaagatgagacacaaacataaaaattccctgctcattttaataccataaaaggctgaggttatttctctgtcataaaattgtaaatagcattttttaagtcaaaattacatttaaaacagtggattgttctacaaatatatatgtgtatatatacatatgcttctgaaataaggatatattatatgagtttttatttgatttgtggtctttagtcataggtaatcaaaaataaagagatttgaatgcaaaactttatacattaatgtacatttctaatgatggtacaaattgccactttataataaaaaagaaacaggtgggaataataatcaaagcacgtgttccttcagtactttggtgatttttaatcccccttgtgatgcacaggaaattattttttagttacaaaaagttatcttagaaatctatacttcccaatacagatttcatgttaagtcatatcaaattgagaatttgtggtgaaagaataggaaaaggatgctagatgctgatctttctttttcaggatttttcctggagcccaagttaaaaattcaatacttaaatctaagttaagtgaaaattaataatgttcagaatgatgtattgagctttagtaacagacggaagcaaaaaaaaataagaatatttaacattatgataatagccttaaaataatgtaataaaaattgcatcattaaatgttctattagttggaaagaatgagctgatgtttctttgtctttgctccaagtacaatttaaagacagtgacattcattttacttaaaattgttcaaaaagtccaaaacatactcccatggctagaattggtattagctccaatacaaggttaaatgttacaatcttaagaaattattgacactgaaatgtttagtaaacatgttgtatgagaaactaaacaaattaatgtttcatttttccattaaagcacagattattcaaatcattgttttctgagctcagatttgtaaaacgtttatacatcattaccctcctggaattaaaaacaattaaaatcctgagatgctcatgcacgtagacgaaatactggcacttttttttaaacattaaacttctttgagaagtctacctttttttttttagtgtgtttatcctatattgctgaaaaagcgctgtgtctttttaagaaaaagatcaaaaattgatttacagatgggaaagatgtctaattttgtagaagagttgaaagaaaagtaaatgtttctttgtaattacgtagctacttgtctcaacctgacatcttgctttcaaggattaagaactaaagtacgttcatttattcttttattcataacataccaactagaggctcagttgagtttaggcatcatacactgaattgcaatctcaaaacaacaacaacaaaggcagacacataaataaataatgcaatacctaaaagtatgtgctatgataaatgcaaaaaagattttatataccactgaggaggcaacaaaggcatcatcagggattagaggcaagacagcgattgaaaaagaacagatatttgctgagtgataaagggggacgacaaaggcctctcaagtagaggaaatcatttgaatgaaagatggatacttggaaaacagggcttggttgggaagaatgttcagaaaaggaggtggaagaaaaactgagttgagatcaataaaaacgaaaagttactcaaaggttttcaatacagcctttgtatttgtttgaacatctgtatctgctaggatgcttctggttgctcagacagaatccccaaaccaaactggcgcttcatctcgaatatctaggtacacagcatcaccatcgaggcttactttgtagttctctcagctctgtccacctccatgtataacttctcccttagaggcagaatttcctttagtagtttcagaacctgcatgcttatatcatctattctctattagaatcccccagacgacatcttacatttcgttggcctgatttagatcatctgtccacacttcagtgactgaccatggccagagacttgagatatgttgactagtgtaagtcaaccaagacctggaggttggattgtcccccaagatacaagtctgcatggttgaggagtaaatatttgaatgcaattcagatcccttttatcaagaggaaatgtaaatgaagagcaaaaagtagcaaatctccattactaatgaatagatgtattttctatcacaagtcattggctattctaaaaatccgcagagaaatgcaaatattgattaattaaagctactgccataaaccataagaacaaacaaaaacattgacaattcaattccctaagcattattaagtgactgctatgaagaaggcactgtgcaggtcactgatgaagagataaacagctgcaattttaaagaaaagtggtacatttgacaataactcgatatatctgatatgttcaatgcttttagatgactctcatggagggggttagaaaatgcagcttgcttattctagatcagaggttcatatcatacctacttttattcatacccatgcaagcactgctaggattaggccattagaaaatgctgcacttcaaaatcacctgcaacaaccgtgcatgtct

SEQ ID NO: 2361 - DNA, 8109 bp, Homo sapiens
taactgctgattctttcaattcttatcatggttattagtctgttcttttctctgagggttctaatcctccttttaaaaagtcttattcagatttatctattttctctatttcgtggatatggattatcctgtttgttggatctggttgctttatgtcccattgctgagctttttcatgtgctttaggattcttatttgaggtgtcattttctttggagattgctctctagtagtgcagggagttctgcagtttttaaattctgggacctacacgatgcacagctccaaaccaggtctcatgatagcatctcaggatgagttctgccgtttctgggtagtcaaatttcaggtcctgcatctgtgtaccacgcagaccctgtgtaccagcagaaaaccagcagaagccgaatttctgcttctgccctcagagtggcacatttctggccacagacctaggagagtgggaagaactcttctctttgaaggtaggcagtgcaatctcagcttctgcatttatttggagagcctatctcagactctcctactaggcaggagtcatatttgtcccccattgaatattcccattaagaatcctgacccaatgtttatattccttcccagttccccgtagaatagtagttttgtctccgcttatagctgtgggttgccgctctggttccacgatgaagaaattttttcattcttagagtatgcagttttcaattttatataacttattttgttgcatcttttagttacttattctaccgttttttttttcggagttcagagtggaagatggaatttttggtatgtgcttaatctgccatttctacccatttatccattttagtaaagtactaacatttattaaaccaattctccattcttggacatttaaggtgtttttagtttctggttattacaaacatcacaacgatgaacatctttatagctaaccatttgcatgtatacattattatatccctagattacattttcagaagtaaaactaatgataatttttaccttttcattatgtgtgtctgataacatttttcttccagcttaaaacccctccttggcttttcatttccttcaggataaagcactaacaacataacatgatgttcaaaatgtgtcaatatctcactctttctgacctctcgcctcctgttatacccgtcttctctaccacacttgccattctgccattctgcagatactctatgctgtttcactcctctgtgtctttcactgtgcctgcccctctatcagggatacttcccctcactccgtctctttgcatagtaatctcctacttttttttttttttttttttttttttacggagtctcgctctgtcgcccaggctggagtgcagtggcagcgatctcggctcagtgcaacctccgcctcctgggttctagtgatgctcctgccgcagccttccgggtagctgagactacaggtacacgccaccaagcctggctaagttttttttttgtatttttggtagagacagggtttcaccatattgaccagcctggtctccaattcctgacttcaagtgatccacccgctttggcctcccaaactgctgggattacaggtgtgagcaaccacacccagcctctactcatcctttaaaactctgctcatgtgggttttttcctgtgaagccctctgtgacctttccagaagcttttctcccttctatgctattatatagatcctctattaaagcattcactacagttgttttacaagattatctccaccactaggttgggaaattctcaaaaaattgttatctgaatcccagcacttagcagagtgcattatacacagtaggtactcactcaatgcctaatcaatgaatgaatgatattatatgactttgtgaattgtatcatgttgaatcatgatttttttccttttgcttccacataataaacttgttttgggtgaagattatattatgatgttctttatgtctatctatctatctatctatctatctatctatctatctatcatctatctatccaactatccatccatctaaactattgtattctttaatctctaatgtagtgtcaatcatattgttggcacactaaacatttactctttgattgactattaagcaaaattacagtattggtgagattgaagtgagcttattatgaagttctgctgcaggtcattacactgtaggctgtcaggacatttgcattgaatatgcactttggatgagcctctttccctttcttagtttcctcagacataaacaaaggctttggacttgaagacctccatggtaatttccagttctaatagttgatcttcttactcataattacagtcctatgtccaacagccagactatggtccctgttctataaaaaataggtgagccctgtgtttcatagtggcacttgtttatagtatatttgtattttgtggagtgctaaaatagaagtcacagcacttgtatttatgttttaacttacatctggaaaaatgattgtataaagtcctgggaagaaagcttgtaaatccttctggaaatgttttgactacaaatgagcatccatccatatttctagtgaatttgaaagtgatagcaaaaaatgataaactgtttgctgctttgtagagaaagttcatagactgaaaataaattcttaaattaagcaaagctatataaaactgagttgaaaacagatatgaaactcaagaaagcatccttaattgattatgaaaaagaaaggtatttaaaattaaatgactttttaatgtttattttattgttatcaaattgagagctattgttatcaaattgagagctattgttttggggtatgttcatttccaaaaatctttctctcttctacttcataggtaagttatattggttttgttttaactgcataagtactaaggattatttcttagtggtattaaaatttgatgtatgtactcagtcataacaaacaaacaaaactactagaaactttgagaatcaattcaatttcaccattactgattgtgtcttcttcatgaaaggtcttcttccataactaattgaattgaatatcctgaattcggttttgagtgctggtcccacatgtgagaccttagataaggcatattctttttttaaaaattttactttaagttctgggatacatgtgcagaacatgcaggtttgttatatgtgccatgtggtttgtatacatgtgccatggttgtttgctgtacctatcaacccatcatctaggttttaagccctgcatgcattaggtatttgtcctaatgctctccctccccttgccccccacccccaaaaggcccccgtgtgtgacgttcccctccctgtgtccctgtgttctcattgtttaactcctacttatgagaacatgcggtatttggttttctgtccttgtgttagcttgctgagaatgaaggttttcaacttcatccatgtccctgcaaaggatatgaactcattcttttttatggctgcatagtattccatggggtatatgaaggcacatcctttattgatttcaggtttatcacttatggtaatggcatagcaatctgttctctcgcttcgacttatctgtagttcaatcttcatttccttaccttttcctataattgttccatgaaccatgatgaagttgatttttttcatatttaggtaaaagtctataaagagcaactgtgtctaatttatttttttattctctacccactctcctgccccatcctattactaatgtgtaacatgcatttaagaaatattttgtaactacctgtatttcaataaaaagctcaatctctctaatacagaaatcttatttctcattacccttagataaaccatggtcctgattttgctggattttcaggattaatgcactaaaaatcttactgaacgccagatgaggtttctggataatttgtttttcttctttgcgcttttctgtgttttctagttcttctctactggattcatttggttgacacaaaatgaaatattaaggtatattacaacgaggaccacattgcttaacttcataattccaaccacttcctcttccacgtatcttgagaaaggtaggagcatttttactcttcacatccatacactcacaatcagctttatcacttactagtggtaggattggagaagcttatgtgtactatgtccttcaggggcttcttatctaacatggggatactattacctgcctgtctgtctaatgggattatataatgcatgtgaaaatgctagactaattgcaaacacagaacaaacggatgttgtcaccattattgtcagatctctatgtatgtgcaaaagtgaaatccttggagacaagctgggagattttttttttttctttagcatctcttctgccaaaaatatatattgattgcagctggaaggaaaccgttctgagagagaaaataatgttgaatagaaatcagagcctgtttgatatttgacagcttggacatgtttcttcatgtttaatgataataataatttgacttttaagtgacttctctgacatgagagccccctaaatcaggaaagctataaactgatgcaaagctacccccagagagatgacatggaagggtaaatgggattgaccagtgtgtttggctgagggtactcatctgcctaagattttatgggcttcacaggaggcctgttctgtggcatgtgaatgacctgagaacaagtcacccaccagccttggaccccatttattgagattctactatgtgctaccctctggagtaggtgctttgacaaagttattacatttgaccttcagaacaattctgcgaagagagtactattgtaccattaatgtctgtaggaaaattgatactcaaatattccctagactacaattatcatcagatcttctaattctaaatctggtactcttttcattttatagacaactgcctgacaaccacataaaactgtattagtaactacgcatttacaaagcacttctacacaaattaccttacttgattgttactttttctgtctgcaagttttccaagtcatgctagtgtgttatttctgtctcagttctggtggcctacctaaaaagaacattgcatgatcatgaaccagaattctggtattgtctccttcaccagttagctttgttacttaaagccctaaaagagaagggaattgcctctactgtagctatttggtagaagaatccagaggagaacccaggcttcttgagaaccaggtctcccaacgatctttggagataaacagtactaaacatacaagtatttgtgcatttgttgcgatcattatttaattatttaaaaagtataattatgatctattccttctggtaatcaataagactctgactcaaaatgaaataagggaaaatgttggtagaaaaagacttagcataaaggctgggtccttattgatagtgaaaatgatacttagaggagaagaagctgtttaaagcttgcattagttgtagaaaccccagcttgaggcactgaatctgtaaaaactggagacagagtttgggctgtatttaaaagagtctatcaagggctcctctttgtagaggatccaagtcagacctcctagcctatggaaatcagcttgtcagagcaaatgaatgtattggagactgaccctgacctaggtagctttcaagtcatccctgagaaagagcattttagaggttgaattgatgagatggctaatatggttattgaagttattggaggctatttatttggattttgcaatgattcagatttatgaaaatgaatctgtaatgaaaatgaatggtggaaataagctaatacaggaagtgttcagctaccaaagcaaacctgccttttcaataagacaaggatattacctctggaggatgaataacatatcatttgagatattttattaaaagttaactgtgactctcttttgaaggcagtcgctattactccagggagaatgaccttgaggctacttccttctttctcttacctttccttttcttttctttcaccatttcttttggacatacgctggtgaatgaagactgtggaatatggagtgaggaataaggaagcccactcaggctgagtcagatgcagtaggagatcagtgaaagggatttttcattagggagtgggatgtgttgatgtgataaagcttcttgaagtagaattttatggcaagcgtgatattgtaacttgcccatatttatgcagcttttaagtagtaaagctacgatttgaactgggtctgtttgtcttgaatgcagaggccccagggaatttaccaggtctggctctcattggttttggatagcagaaggttgaaccttaacatgtcagtcattttatttgctagattgattacattttgtctggaacatggtaatctcagactctagtcagtcttcagcttaggaaatattttcttgattattatttctattccactacttaagatttgttcttaaggataaaaattacttgtaaagataaatctccagtatttactatttttattatcttccctttcatatctttcaccttttctgattcttgggagaatttcctctttacatcaatgatttaatttttactgagaccgagtctcactctgtcacccaggctggagtgcagtggtgagatctcagctcactgcaacctctgccacccagttcaagcaattctcctgcctcagtctcccaagtagctgggattatttttaatcccatgccaccatgcccagctaagttttgtatttttagtagagatggggtttcaccctgttggtcaggctggtctcaaactcctgacctcaagtgatccgcccgccttggcctcccaaagtgctggaattgcaggcgtgagccacagcgcccagcctatttaatttttttatagtgccagttttgttcttttccaattccagggtaggattaatttggctattttgttaccttgcttttctcagccaggtcccttaataattttagactatattgccataaattgtctttttatctcatcacttatcatcatccctaaccttaacaagcgtaccatttcatgtatttacttgagaacccagaacagacgttcccagtttttttcttaatattaaattattattttttttttaaagaactagggttttcttctgcactttcagaacaacttttccttatttcaattttatagcatgtgtccagcctgtgctttttttttgccccacccccacccccaaatgtttacttttccttgagcatgaatccaaccctggaatttccaaaagtgaggcttctctgttttcccttattccccaataatttccatgagagtgtaatagatttgtacaaagctcttcactaatttttaggaggtctattagtatggttctgcctaaataaggaagtatctcctgcttccaatgtagaagatacttctttggctctgaagaagataatttttcatcccttgtaagttgaaaattttctagttcttacttttccaaaaacagagtatacaatggtcagagctcttcctatcttcactagtgcccactcaacaactttacattacgtcctacttggaatttctttctttttttttttttttatactttaagttctagggtacatgtgcacaacgtgcaggtttgttacatatgtatacatgtgccgtgttggtgtgctgcacccattaactcatcatttaacatgaggtatatctcctaatgctatccctcccccctccccccaccccacaacaggccctggtgtgtgatgttccccttcttgtgtccgtgtgttctcattgttcaattcccacctatgagtgagaacatgaggtgtttggttttttgtccttgcgatagtttgctgagaatgatggtttccagcttcatccatgtccctacaaaggacatgaactcatccttttttatggctgcatagtattccatggtgtatatgtgccacattttcttaatccagtctatcattgttggacatttgggttggttccaag

SEQ ID NO: 2362 - DNA, 10105 bp, Homo sapiens
aggagacatacaatcaacactccactcagacaatgcccagacctccagaaaccatgtgtcaagctcggattgccttagacaggtgcaatttaagaacagctttcatcctcttttctctcatattgtcacactatgtgttctgacttctggctcctttcctcacaagaagctcacccagctggaactcttatgggaccttggcaccagagaccacaaattcctctttgaagttttctaacagcaacaatggtatttctgacttggctttcttgtatttctctcacgttaacaaaattggttcagcatctaccatgggctacatgctgagctacagagtttcgctctgtcgcccaggctggagtgcagtggcgcgcgatctcggttcactgcaagctccacctcccgggttcacgccattctcctgcctcagcctcctgagtagctgggactacaggcgcccgccaccacacccaggaatccaacttgctgtttgctatcacatgtgctatacatgctgttgatgaaactgctaaaggggctgaatgtgactgacgtctttggaaggatgagacttagcgtgcctgtacagttgtgtccaaatgctgtcctcatctcccaatgaaaaggtattgtaaataaagagaaagatcagaggcttattttaaacactaaatatgagctaggagctgtcctagacactatgtaaaagttttatttagttctcactgtaatgttggccttatgttagcatcccatttttcagactgaggaaattatggctcagagaggttaagagacttattgaaggtcacacagctccacaaactttggtgtagattgaacgtgtacatgggtctatgtgactttgaatcttgcattctttacattattggaatatttcacagaaggaaaatgacatattaacatggcaataagatttctggttccagtctggttactggtcttccaagagtgttataggatgtatagcctgagctctgaagctttgttctgaagcatgctatcaatatgaacaaattggtatggaaggaagccacaaattatatactaaaatctagttcatcagaggaaaatatagttaaatacatttacattcccagaactgttaatattgaagaataaaacacacagtgggaaagagacgaagagaaaatacgcctgtttttatgacttgttgatatctacagggtttttccttaagcctcacaacaatttacagcattgccagcagcattcagtacattcagaacaggataatttcacccgcagctgaactagggccatgcctgggacagacagagaatggccttccagcagacatgccaagaagcaagccagggtcagtgagtgaagaggagggcaggcccatttgaagcaacacagtttatgtaagtgtgatctaactgctttcactggaaatgggtcagactccagttgagagaaccaggggcctgaatgaccccagcaaaatcactgtggcaattctttcaatcacctctgagaatatggccctgtgacgacataatgacgtttggattaattccagtcggctgtgttttcccctcctttcttgcctccccgtagttgatttgccaaattttttttgtttgcttaaatacgcggaactaaacaggatacattatatgacagtctgtgataaatttaccactgggaatagggaaaaagtatgggataaagaaataggtatttttcgcctctcacagctgtgattcagttctgactcaaaaggaagtgtgccacctactgaatcacagaaaccacttcctgtggctgtttggtttattctggaggagcatcaggccaagtgctgccctgccctgaccctgactggctcttcagagccaaggcattcacagcttgaggtggtttggcctcagactcttgagaacattgcatattaaattacaagtgtttcgtttcctagcaaggagtctttagcaacatgaaaacgaacgtgtgttatttgcaaaccaagtatatcattactgaacctgaatatccttactttttcataaggtacgtattccggatgaccactcttaagatctgaatgtacactggttctgtttttcctgaggggaacttgggcagtctgcagggtggcatttaccagctgagggacttcaagagcaccctttaatcagtgtggcagcactcaacttgtattcactcactcagagtatttttgagcatgtacttattgccatgtgctgtgctaggtaggggtagagggtacagtggtgaacaagaccccacagctcctgacctcatggctcatgtgttctacaccataagggaatcaagctgtgtctcccggggcaggggccttcctctgttcaccatgcagccccagcatctagcacctggcgttgcataaaggaggctctaaatcaagcttgtccaacccaaggcccacgggccacatgtggcccaggatggctttgaatgcagccaaacacaaatttgtaaactttcttaaaacattataagatttgtgtgtatgtgttttagtccatcagctattgttagtgttcatgtattttatgtgtggcccaagacaattcttctatgtggcccaaggaaaccaaagattgaacactcctgctctaaatacttgtttgttgaatagatacatgaaaagaaagaaggagagaaggaagaaaggagggcggaaggaaaggaagaagggagagaagaagagaagaaagaagcagagaaaggaagagaaaagaaattacggccagtgcggtggctcacgcctgtaatcctagcactttgggaggcctaagcgggctgatcacctgaggtcaggagttcgtaagccagcctggccaacatggtgaaaccctatctctactaaaaatacaaaaatcagcagggcatggtggtgcgtgcctgtaatcccagctacctgggaggctgaggtaggagaatcgctggaacccgagaggcggaggctgcagtgagttgagatcatgtcactgcactccaggctgggcaacagagtgagactctgtctcagaaaaaaaaaaaaagaaagaaagaaagaaagaaagttaccattagttttttgttgtatttgcaagcaaagacaaaagcaccaaggtacttgtttccttctgtaattagagtttcaaatagactaaaagtttctgctcttaggtgggtctagagactctccagtacctcaggacctcaggacacatggggtctcttggttgttttcttttcattgttgttgtttattttatttttgtttttattttttaactttaaaacaattttttgtagatgaatatgcttacatatgtttgggggtttttttgagacagggtcttgctctgttgcccaggctggagagcggtggtttaaccacagctcactgcagcctcgacctcccaaggtagggactgcaggtgtgtacactggggtgcaccaccacacccagctaatttttaaatttttttttgtagatattgtctcactctgttggccagactggtcttgaaatcctgggctcgagcaattctcctgcctcggcctcgtaacgcgttaggattacaagcgtgaacaccgcacctggccagcatgtggtctcttaaccagaggaggcctcttctgaactaggtagaggtcctgagaattgattctgagagtaaaaggctctttgttctcctcagagtagattagaatccctaatgatagagcatctattattcctctagtggtccatgcccaacagattcatccaagaatagatgaagatctttgtaatgttgtgcaagtaatctaatcaccccacagaagagctgtgacttaaattatcccagagtcggcccacctgttttcataaagatcaatgtaacttgtaaatttcttcagttctcctcacctatcatcatttgactaacaaaacccagaaaactaggctagttatggtggcctatgcatataatcccaactctttgagaggccagggtgggtggattgcttgagtccaggaattcgagaccagcctgggcaacaaagggagaccctgcctatatcccagctatgcaggaggcgaggccagaggattgcctgagcctcagaggttgaggctgtagtgagccatgattgccccactacactccagcctggatgacagagtgagaccctgccttaaaaataataataatagtaataatatttcataaagatacaggaaactagattataattgacattttcaaagtgaaatactgtctagaatggtgcttggccaacagtaagctttttgtaagtggaagtcattactactactatttctttcattattattaccattactacttttttttacaaaaaaaaaaccctggacaacacactgaaaccattactacttctactactataacttaggttgcacctgatagagccagcaatttttccaaggtatgacaatggccatatgtttaatgatataattctatggctcagtgtatctcagcctttttaaaccctgctcttcttttgacaattgtaaaaatcttaaactgacctccagttgaaatcctctgtcaagaagatattgtcggccaggggcggtggctcacacctgtaatcccagcacttttggaggccgaggtgggaggatcacttgaggttaggagttcaagaccagcctggccaacatagtgaaaccccatctctactaaaaatacaaaaattaggcaggcatggtggtgtgtgcctgtaatcccagctactcaggaggctgaggtaggagaattgcttgaacctggcagggcagaggttgcagcaagccgagatcacgccactgctctccagcctgggtgagactgtctcaaaaaaaaaaaaaaaaaagaaagaaagtaagaaaaagaagaaatcccaatctcttcttttatgtggattcttcctcacttgaataatacttttcttccccagtattctccatattatcccagagtcagcccctctgtttttgtaaagatctacgtaacctcctctaagtttcccagttctcctcacctatcatatcatttggctcaacaaagggcaggaagctagattctaattgatattttgaggccgggagcagtggctcatgcctgtaatcacagcactttgggaggctgaggcgggcagatcactggaggtcaggagttcgagaccagcctggccaatatggtgaaacctcgtctctactaaaaatacaaaaaattagccaggcttggtggcttgtacctgtaatcccagctactcaggaggctgaggcaggagaatagcttaaacctgggaggaagaggttgcagtgagccgagattgctcaattgcaccccagcctgggtgacagagcaaaactccatctcaaaaacaaacaaacgaacaaacctgatattttcaaaattgaggcaattataacagctatttagccaagcattatgatagcaataatagcaagaaaataaattagttaacaaatgagtctcagaagcccaatgatttttattttatttttattttttgaacttttattttagaatcaggggatacatgtgcaggtttgttacccgggtatattgcatgatgctgagttttggagtatgcatgaatccaacctgtcatccaggtagtgagtatagtacccaacagatagtttttttaacatttacttcactcccttccccaatcttgtattcccctgtgtctactgttcccatttttatgactgtgccaacaataattttttttcttttttctttaaatagagatgggggtctctatttaaagagcctcccaaagtgctaggattacaggtgtgatccattgcacctggcccatgccaacaatatttgaaacccttatctgcgtgtacaagtttgctactggttttgttttgctcattaatacatcccaagcatctatacctggcttgtagtaccagcatgtagtaggtgcttaataaatatttattgaataaataaattagtttgacattagtttaacatctcaagtaaaacaaaataccattcaattaattctcttcttctacttttttcttttaagagagacaaatagtcacacatacatcagcaggagaggatacaatttcctgtgtttaagtttttatgagttactttagttcaaatgtcacagaaaattatattgaactcttgaccaatctatctattttttccattggagtattgacccaaataagaaatagcataaaggaaaaattattttttggcagaaaaatattctctctaaattcttgtgtgttttgttttgattttttccttagtgactggaggccagtttcaatccactgaagcacagattccaaattttcaatctggttttcttgagtagtgactgagtgccaaaaatgaagcaatgacacaacatcaccatcaagacactccccagcacgcacacacatgccagagtccaacaccaagatactccccagcacgcacacacacgccagagtccaggccatattcgggtggcttgcaagcttcttccccccaagtatttactctcaaaataatggtttttgttttgttttggtttggtttggtttgtttttttccaaatacatttcttccctatatctttaaccaattctcataaaattttgtctaatacactggtcagtgtattccagaccctaaaagataacataatgaaactatctatgactaaaaggtaatcaggatcttctacttatccttttttcctccctcttaaactttaattttgatacatttgggagtgaaatgatgacaataaatgcaaagtaattattgaagaaacagtaattttgtattagcttactgaaaaaaaaaaaaaagataaccaaatatattttggcagccccaaacgagtcacatgtgaaatgcagtgggagagcagtgtcctgaaggaaaaggtggcctgctggacagccaagagaacaaacatccactgcaagtaatatgagctctaagtttggactaggcctatgtctgctctgagacttggggcaattcacttaatcagagccttaatcagctacggactagcaatatccatacccgctacttattttgtaaatctcctttctaaagttaactctatttattgttccataatcccataaattctagaatcttttcctgttatagccaagttgtctatcattgacagagatattcacctggttgttttggcttctctaatcctcctggtgagaacacctccaagggagctttcagtggcatttaaggtcacttgtgctcttggtcctagaaactgccttgatagtggttttagctcacatgaggtaagtctttattatatgcccaacctctttatgcattacttcatttaattgtatactaatcctttgtcataggttatcagagtgtttgattataagttacaggaagaaaaaaaaaaacaaactccaattgactaaaacaatggggcattttttgactcacataacagagagtctagagagaaggcaccttcaggtttggctgatgaatcctgtatctctgccttgtctccaggcccccaggttctgcctctgtcctgacatccagtgttggattcctcttcacatcaactcctctctgtaggttgggccatcagaccctacctccttatttatgttgagcaaaggagagagaatgcctctacaaacaatgaaaaaagtgaaaaaaaaaatctttctcctccttataactttagttagcttaactttagtcagttgcttagctactaaacagtagctattgggaggtgggaaggaatactattgtgtaatcaactaaggctcatacagaggattagggttatctgaattgatttgaattaattagaatttactctcagagctgtggcaattccttgaaccacactgattgctataaagtggaagaggaatagattgaattttggggagtcaactacaatgtgtactacaggaacaaaacccatcagaagatgtcagaagataaggatttttgtcctgatgctacacttaccagctgtccctcagtgttctacttcttaaaaaaagagagatggataaacagaggcaacccgaggataaaggccttgctcagtgtcacacatttcagtcactaaataagacacaatggatgccagtattctcatcccctcacaaataaagagccttcaagctcttgcagtcaacaagaacttttggaatgatttcactgcctgaaaaggcagatacataggtgacacccacaaataggaagaaaatcaacctgaacctgagtgtgtgggctcactgactctaagcagtagagacagaagaaaaagttttagcaaagaagggttctgaaagaaaataaatatagctcgttatcaagtgctgtttttacacagtaaaacatgggcaaaattactcttctttaagtagtaattcttatctcttgattaagtcacctactcattcatttaataaatacatactgattgttttctatgtgttgagcactcatctctgtattggaaatataataatgaccaaagttgacaatagtaataacaataatagctaatatagcaggcactaataattatttgttgagtaatatgtcaaaattcagtgtgaacagcattctatttggggctgcatccactgactataacacagctaatctatctgaaatgttccagctttgggcctctctaacagaagaagctgttgttgggcctgcctctagttggcgatgcatccaccaatgagaatgaatttatgatcgaccactcttcctgtaaaggccgctggaactgacagcattgtgattttcttttactgttagttttaaattactagaaccaactcaattactagaacgaactttacttctttgtttcctacttatcaaaacagtaaaaacaacaagtaaaagaaatgccatcttaatattgttttgatgacaaaacagtattccttttagttgtgcttcaaatggaataagatgcaaacaggcttggtatggtggctcacccctgtaatcccagccctttgggaggccaaggtggaaggattgcttgaggccatgagtttgagaccagcctgcgcaacatagcaagaccgtgtctctacaaaaaataaaaaattagctgagtgtagtggtgtgtgcttgtggtcccagctacttttgaggctgaggagggagaatctcttgagcccagaaggtcgaagttgcagtgagccgtgatcgtgccattgctctccagcttggacaacaaagcaagaccctatgtcaaaaaataaataaataaaagacataaacatatctgagattaactttcagtggtaaatttgttccatatatgatttttaaggttaaatgctttggaagctttaaaaaccatttcagcccttttaaatgccaacttacactgatgatgctctcagatgttaggaaatcttttgagcagaaaatggaagtgggggtgttgaggcagggaggagagtgatgcaatattccttagtgtcatcctgtgatttcacaatttgtttttcaatctgtttggactttcaaaagggaagactctcatatgtcaacaagcccatgaactgaagcttaaaacactggaaacaacaactgtagagtttcaagtatatgtacatttatgtattcatgttccttgatgggaatgctggctggtgtgaatgttcaatctcctgagaaatgtaaatttttctctgacagatttattagcttgctgtatctgagcacatgagcaaaaacaatgcctaataagaaaactttctctctccttcaaagtcaaacttgggagaaatgaagggaaatcgagttttctttgcttgacagtgttcaacattcttgtagtcagtgtgctcatgaagattgcaaacttttttttttttttagagcagctaggactacaggcgcgcaccaccacacccagctaatttgtgtatttttagtagagatggggttttaactatgttggccaagcttgtctcaaactcctgacctcaagtgatccattcgacagc

SEQ ID NO: 2363 - DNA, 9271 bp, Homo sapiens
tggacacttacgttgagcctatacattggctattatgaattttgctcaaataaacatgggattgcaggtgtcttttcaatacactgactactattcttttggatatatagccagcagtgggactgctggaacatatggtagatttatttttagttttttgaagaacctccttactgtgttcatagtggctatactaattttcattcccaccaaaagtgtatagcagttccccttactccatgtccacatgagcatgttattttttatctttttgataataactattttaactggggtgagatgatatctcactctagttttgttttgcatataccttatgattagtgatgttgagcattttttttaatatgcttgttggccattcgttttcttttgagaaatctctcttcagataatttgcccatttttaaataagattacctcaaaatatagttttaaagtattatcagtaaaaataggtgttttcctcaattgggatgcctactgtaagaaatctattagtgcattaaatgtgtcagaacagacaggagatagtctgtctgaattctagggggaaaaaagccaggaagttggtttcccagaactaagggaaaagggagataaagaagaaaggcaggtttgtccaagtgaaaggctcagccaagaacaggcactatttttaattcatggatttattatttgttcaatttatttattaatttaatgaatgattcagcaaatattgattgagtttttttttatatggaggtttctggagagctaggtatattaaaagacaggagagaataaacttcggcacatactgtaatggagggacaaatgctcaatgaatgttagctatttttactgctaatattattgccaagtgccatgaagatgccataaactgggatagcagagagctgctaaggaactcattgaaccacttttttactgaaaagtcaagttggtgctggttgagcaaatgttgtgttctggtccccaagtttgaaagaaattctaggaaaagagtagagttgagacagatagtaagtatatccagtggctggatgacagtctgcagagatgcaatgtcattgtcacatttccagtagcaacaaagcaagaacaggtaagaaagagtcagaattttaaagaagcaggaaaacatgacttgtgtaactgtagagaacctagccagatccaccagacaatatgagtgcataagactcagatgttagtttgtgttatgataacacatatcatagaacaggggaagatgtatgaagttagcatctctaggctttttcccaagtaaacaatatctttagaatcccatgtcccctggagacagaaattttcctaaacctcttaaatgaaagaggctgctttgtttagctaatataaatacttcatttcagtttaatttttaaaaaattactgagaatctaatgctgccagcattttactgggcactggtgatacagaaataaataagacaaagtctttgctctcaaggatctcgcagattaataggagaagaaatcgtataaataaataagtaaataaataaatacaatgatccaattcccttaggaaggacaatcctatcattataatgactttatcaagtgattaatttgatgttatcattgatttgtaatttaattaatttgttatttcggcaaacatttattcaatacctattatatccttgtaagatattaccaatgtcatactatttctgtaatctaaatctatactcatgtaacagccttttgaacttttagctcccctttgggaagagaacatgctaaccacttggtactgggatctactttgcaataatatattttctgagtaaataattgtgttgccatgtaggggttttttttcacaactctttcaatttgattaatgtgaactaatcatctttagcttgagtactctagaagataaaacaaaatcaggttcccaaatgcacaaaactgaaaactagctggtaaagaaagtgtccctacgtcagtgttgatgctgtgtgtatcttagcccacgtcaatccacctaagctcttccttccatatttcatatgcaaacacttttattgcagtactgggcactgcattcacttgcagtttgatttaatccattcagtaaaatgaatttcttgtgaaataaaatgtttatactatctgatctgatatatattgcctttttcatttggacaactaaaattgattaattacccacactgaaatttgttttaaccagttgattgtggaggattagatttaatgtcacagttatttgtcctaagataagatttaaagtatattatgaggcatgtaaaaggaggtttaatgtgtgttagaaacagaaaaaacatctgagaaaatttcgaatcacatattactttgccctattaaaaaaaaaagttagtgaaatagatttctctaggaaacaaagaaaaccatccatgttttattctgactcaggatagatgaacattaaagaaattttgaattactatattttgaattactaaaaaatattgaactcaactgatgagagagacgctagagctactgtcttttcaaagtgcacttcttgagatttcagagcaatctgagaaggtcagtgcctatcattctcattgactgcaaagtaatagaagactgcctctaattgtgagattaaatgaacatatggccagtaactttagaggaaaaatagataatttttttagacagataatttttctcaaagatggtaacagaacagagaacaaaattgagaattacttttgatttttattcaggcaaattggtatgtaaacataatacatattgttaagtaattataattaggttatgtattatacaatatattataaaaatgattgtgttattccagtctcacactggactaatataaggacactatctgagactgggtaatttataaagaaaataagtttgattgtctcatagttctgcctggctgggaggcctcaggaaagttacaattgtggcagaaggtgaaggggaagcaaggcatgtcttacctggcagcaggcaagagacatttatcaaacaaccagatctcatgagaactccctcactatcatgagaacagcaagtgggcaactgcctccatgattcaatcacctcccaccaggtccctcccatgacatgtggggattacaattccagatgaaatttgggtggggacacagagccaaaccttatcagtgatctcaattatttagattttacttggacattagatgtgtcttcaaaatggattggaagatttaaaaaatcacttaaggagcctaccttttgctgtcattaatgttgttgttaaaaggtaagcatcaagggcatttttatcattttaatattcctagctctattgaaacctgtgacttaggtgccagattcagccctgagcctgaatttaactgattttcaggttttcaaaagtgccacagctcaaaagataatttctatgagaatcacctttgtaattttctcaataagagtagaatctttctaaagattaataattaggcatatgaaacactgcaaagaatggtaaattagttacataaacatttaagtgtacagtagataacaatacttattttgtaggtccacaattaaagcaaagaaatacgtctaaactccaactgagaatccaaatacacagagctgatagttcaaagatgatcttagcaagggggtttttctttgacctttctattgaaatgacagagagttgttttataaagaaaaagaagatccataactgcattacaaataggatgtgatgctgtcagtacaattgaaactgaaattatgaatgatttctggagaacataattttattgacagataatcaagattagaagacacaactggaagtcctacatagtcaaaggagatgccttacatatgttaggaaagttttaggtttagttagcaggcctctgggaaaggggttgtgaaacagcagtcaggatagttatttaaaagtctgtctgcaggctaacaggaccaatgtgaccctctggaaactccgcacagagtaagtgacatcagtggcatttattccctagattaagccagataacttcttttgaaaggaactaagtagagtgtaggatggggtagcatgttcagtatgacatttgtcacctgagacagaagcagagctcacttctgaatgcatgaaagctctacaaccatacagaagaaatttaaaagaaaaccttttgatatggtttggctgtgtctccatccaaatctcatcttgaattgtagctcccataattcccacatgttgtgagagggacctggtgagagataattgaatcatgagggtggtttcccctatactgttctcgtggtagtgaataagtctcacaagatctgatggttttataagggaaaatccattttgcttggttctcgttcttctcttgtctgccaccatgaaaaacatgccgtttgccttcctccatgattctgaggccaccccagtcacatggcactgtgagtccattaaacctctttttctttataaattaccaagtctcaagtatgtttttatcagcagcatgagaatagactaatttagtaaattggtaccagtagaatggggtgccgctgtaaagattcccaaaaatgtggaagtgacttggaagtgggtaacaggaagaggttggaacagtttggagacaggaacagacgaagatggaacagatggaacagatgaagacaggaaaatgtaggaaagtttggaacttcctagagacttgttgaatggttttgaccaaaatgctgataatgatatggacaatgaaatccaggctgaggtagtctcagatggagatgaggaacttgttggaaagtggagtaaagatgatccttgctatgttttagaaaagagactggtggcattttgcccctgccctagagatatgtggaattttgaacttgagagagatgatttagggtatctttggaggaaatttctaaacagcaaagtattcgagaggtgacctgagaggtgctgttaaaagcattcagttttgaaagggaaacagagcataaaagtttggaaaatttgtagcctgataatgcaatagaaaacagaaacccattttcggaggagaaattcaagcaggtgcagaaatttgcataagtaacaagtcaaatattaatctctgaatcaatggagaaaatgtctccagggtgtgtcagagaccttggcagcagccactcttatcataggcccagaggcataggaaggaaaaatggtttcttgggccaggtccagggtccccctgctcagtgcagcctagggacttggtgccctgtgtcccagccactctagccatgactaaaaggggccaaggtacagctcgggctgttgcaccagagggttcaagccccaagctttggaagcttacacatggttttgagtctgtgggtacacagaagtcaagaattgaggtttgggaaccactgcctggattccaaaagatgtatgtaaattcatgggtgttgaggcagaagtttgctctagggttggggccctcatggagaacctctgctagggcagtgaggaagggaaatgtgtggttggagccccacacagagtccccactggagcattgcctagtggagctgtgagaatagggccactgtcctccagactccagagctgtagatccactgacagcttgcactttgtgcctagaaagctgcagacactcaatgccagcccattaaagcagcttggagggagactgtaccctgcaaagccacaggggcagagctgcccaagaccatgggaactcacctcttgcattagcatgtcctggatgtgagacatgaagtcaaaggagatcattttggagctttaagatttggctgctccactcaatttcagacttgcacggggcctgtagcccctttgttttggccaatttctcctatttggactgggtgtatttacccaatgcctgtacccccattgtatccagcaagtaactaacttgcttttgattttacaggcttataggtggaagaaacttgccttgtctcagatgagactttggactgtggacttttgagttaatgctgaaatgagttaagactttgggggactcttggaaaggcatgattgattttgaaatgtgaggacatgagatttgggaggggccaggggtagaatgatatggtttggctgtgtctccatcaaaatctcatcttgtattgtagctcccataattcccatgtgttgtgggaggaacccagtgggagataatttaatcattggggcagtttttcccatactgtttttatggtagtgactaagtctcatgagagctgatggttttataagggaaaccccttttcacttggctctcattattttcttgtctgaggcctccccagccacatggaactgtgagtccattaaacctgattttcttcataaattcccatcttggatatgtctttatcagcaacatgagaacagatgaataaaaattctcagactgggagaaaaatatgctaaagtgcttcattcccagaataatattcttgttattttgtcatatgggcagcctacctgcttacctcctgtccacacatcctaatatgatgccaaccagttagtatgtcctcacttacttgctgacatggattctttgcttggccaaattttagtcacgtcttctgaacattcttctaggcccatctgtgcacttccttgtaaaatactgttttaactaagtcagtttagcaacaatccccaatctcagtgtctgatcacccttggtagctgatcatattacttatcctcccttatcccccaggtgatttctgatctttctggtctgtttttagcaagatcctgttaggttggtttagccagaattccccttacccctgatgtttctgcttagtaattttccatcctctgactacctcatctgcttcttggctacagattctcacttgcccctgctgtattcggagttgagttcaatctccctagcctattgttaagacttagttgtagtcattcctgtagctactgcaatgatcctaaatgaagtcttttttactgtgctttaacaagtatcattgaatattttttttctttaacattacacaaaaaggaaaacagcctgttcatttcatggaaggacgttttggaaaaatagatccagacctacatagaaaggtttcccacttcatgctaaaaagtggtaacattgcatgtcagactgaagaaagacacctgagtctatgttgagttgtgtttggccccttgcaaggttgtcataaatgattcattgttttggcttaaggggctttcagctggatgacaaagcataaggacaaaaaatatgaaatttgtcattaaatgtcttcatcatttagcctgtttaattgtgctaagatcttttaagaaacaatgaatacagagatttccagattatacttccatgaaagcctaaatcttctcaggtattcacagtttaaaaaaattgaagtataccaaatgatatccaagtttactgtgaaagcaaatggcccataaaattttgcatttacatttgaattttaatctagagagaaggagaccacataagtaaaacacaatctatctcataggctgaagcgtcaggtattacaaatgtatgtggttagcttctctttatttagttctcattgatttaggtactaattctacccattctttgctttaatcatttagtattaagaaatattgactttcatcagagcttaatatacaactggctccaaatctagaaaatcaatttaaattctttatagtagtatgtaattggttaattcagtcatttttaaaacaatatatttgtttaaaaatatttattttgctaaccagctaccagacattgttctaggtaattcttacagaagtgcgtaagacagatagtgtggcttcccacatagggcatatagattacaaagagaagacatagctaaagaattaaaccaataataaaaacatcaaattctctgaaaaaaagagctgctgccagtatcagtgaatacttctttcatgtaacacaaactgacacttaaagaaaaaaaaaaaaacactcagccatgcaaagatgtaagtaaagagaattctgggtggaaagaataggataagtgaaatatttcaagcatggaagatctaggaatctttcaggaactgaaaggaggccagtatgattggaatagagaaaataggtaggccaggaggtcagatgatgtaggcattgaaggacaagataggagtttgcatgctggtcaacaattttaaatcagagggagggagagggagaggaaaagggagagaggcagagagtgagagagaggtagagagaaagagagagagggagtgagaaagagagatcaaatttacttattttgccaatagaactgttgtgtgaaaaatgaactgaaaggaagtaaggggagaaaaacagcaaagagcacatttaggaagtgaagataatgagagtccactcaatgataaaggtttggacttggacagtttagtagagaagtacacaagaacggttgtgaaatatatcttagaagtataatttgtggagttttgctgattgattaaatatgaggcatgagaagaaggagagaaaggaatgaaatatgtctaccaggaatatgggttgaaccattgagtagatggtggtgcaggtgcaatttactgaagatctgggatgaacaggttttggagtgaagatccaagtccacttttttatgtattaaatttaagatacattttagacattaggagacatttgtggccactatgacatataaggctttagcttatttgagaggttcagactggaaatatctatttgagtagttagtattttatgtgcaagccatataattgaatgatattacatagagaaaaagtgtagagtgagaaaaggagaggatcaaagactaagcactatagaatgcctacatttttattgtaattattattattattattcttattctgagacagagtttcactcctgtcgcccaggctggagtgcaatggcacgatctctgctcactgcaacctttgcctcccgggttcaagcgattctctgcctcagcctcccaagtagcttggattacaggcacgtgacaccacgcctggctaatttttttgtatttttagtagaaacggg

SEQ ID NO: 2364 - DNA, 2637 bp, Homo sapiens
gtaacatgacataaagaaccttttattaacacaacaatgatattttaaaaaggaagaataataatttccaagaaaaagtacaggaatttattttatgtctttttgaatttagacagagaattatttcatagacatcatttagacaaagttagactggcctgaatttaactgcaggtcctgagacttattattaaggtcatatttgccaatgtctggtgagaaatagactgggaagatgaaaagcatcaaaagatttctaagggctaccaagattattgaggggatactgaagaacatgttttttatttaaatatttcctaggactgaccttcactcttttttcagtgaatctaccattaaaaaggaagaatctgtggccatcctggaaataaacagagtgacatggtgacaattgtggatcctctcctttgggataatgcactgtgtatcccattgcaagtgcttctcagacatcagtgcaacgacctcttcagtaatctgacctaaaatgtaagagacttgagagcaaagatcatgttttgttcattattttactcctagtacctaggacagtccccaccagcaaatgcctgttcagtgatggatatgctaaaatctcctttattatagatgcatttatttcatggaaaaatagaaaggttacgctactgagggctcaacagctttatgaattaatatagggcttctcagaaacagtaaatatttctagcactaatctcctaagaataaaaggagtgggttgtcccaaatagtgcataggtgatgaatctggatggctttagataagagcagaggaaattgtctatttatcactgaccctaaaatgaaattcaaattgaatttatgtctactttatagatggtgactaggaacaagaaaattgagacaattgaaaccactagaatagattattacctggagatataattaatagtccaaattacatgatgtcatgttactctttgtgcaaacttctgtagatgttgatatatgtatgtggcttttaggtatgagttttactgtaccataaaataatacaacatatttttccccatttaataattgattcattatttaccctacaaacaatcatgcataaacacacttgaccctccaccacacacatacaaacctttcttattattgtcactaggtcctttatatattggggtcttgacatctttcttttattattaatacaattttagcattattagagttgcattaagatagcattaaaatctgattaactgtgtgagttcaatttttttaaaagcagtttttttttttaaatttgataaggagttttgctattttgctgactggtctcaaatttctgggctgaaacgatcctccagcctcagcctctggagtggctgagactacaggtgcaagccccatgctaaaaacagcaatttttggaggggaaaacacctcaaatacattactttccaaaagtctttgatcattaacttttataaaaatgagaacaccttaatctaaaatacaagttgaagaagttattaaaaaaataaatttaaaaagagaagaaccatgtcaaatatagaaaaactaatgcaagcaagagtggggaagggcagttagagactgctagggaatctaatataatacacacacaaaatcactcttatagtttaagactctaagtatgttgaattatgttgataaagttgaaagaaacaatagagtctgaagccagaaatatattactaagaatattaaaacatagaggcatgtctggcaaaccaatggtaattcctgtgccactattttaaaattattttactggacatgaatggaatatatgccatattatcatgaggttgttccctagtatcaattaggtaaagtaaaaaaagtgttgaaagaatacaaagttctctttgatttgactctgaccaaccaacattctcagactcaacacctaagcagatcaaactgtacactttttcttattctctctatagcaaactatcacctaatccaaaaccatccggctcattcctcatccacatgctccaccttcagtgtcaaaatctctggggaatcctcttatgaccccctcagttagctgaatacctctcagttttctcttctggactgtaagtcatatggcatcatgggttattttttcttctactcacttggcacaagatgaagagagaaaaatgtatccttccctgctaatttgtactttgtttcttccatgttcctgtattgggacccatctccttccaagatgaatattcatcctcatagacatacaataccgcttagtgttacttcgttggcatagcatagaatacacagaataaatgattatttgatatataaatgaattaaagcatttctatccttattttacttaaagaaaaattaagttatggaaaaaatgattagaattctgaagaacattttaaaatcgaggttatatgatttctaacctataatagggtagaaattaactgtgaattaagcaaataaattaatcaaataaaaattattggtgttttagaaatatgaagtgtagttgaatctatttgttgtcatttgcttctcattagctatttttaccaaattgtctaacaaatatgt

SEQ ID NO: 2365 - DNA, 233 bp, Homo sapiens
gttggttaactgaagtcagagaggctaggtgacttaaataaggccacacagcaaaatctgggttttaagcccagattttttgaccccaaggtcagtatgccttatgccttctattgtctttgctttactccccaagaaaggtgaccctgtgaacgtgttaggcttccaacacgtgttggctatgaatgcattaggctagaaacccacctctttcccctgcatcaggtcctgcc

SEQ ID NO: 2366 - DNA, 3164 bp, Homo sapiens
acaccggcttcagcgcccgagcgtgcgcgcgggtctccgctcgtcgcccggctcggcgtcgggagtgcactctgtgtggccgctgctgcagtgttgttgtggttgtgagaaggcggcggcggcggcggagtagcagccggaccagacgccctagtagctcagtcgctgccctgcgccgggcctggcagggagcctggtgagatggtggaggaggaggctgtgccgtggcgggccttgccatgtcctgctgcctgtcatcaagagttcatataactagacctgtcttggagcaatttttatcttttgcaaaataccttgatggtttatctcatggagtacctttgctgaagcagctttgtgatcatattttgtttattaacccagccatctggatacatacacctgcaaaggttcaactttccctatatacatatttgtctgctgaatttattggaactgctaccatctacaccaccatatgcagaataggaacagttattaaagataatgcacaccttaaaatattactactgggttattaatcctgctgacagtagtggcattacacctaaaggattaggaccttgacatttttgaagaatacagaccagttattttttcgaatacccttaaatttgaattttctatttgttcatgatgatgcaggtttttcatttttacaagaaataacacagaagtcatattgtctgtctccttgtattatgtcaaggagacacatgatgttgagttgtgcttttacaagtgatgtcaactttaaacatttgattaaggtattatcttccaggtttcttcattataaaaatcacttctttctctttggtagttaagaagtatttgatggagaaatacattgaaactatataaatatcctgttcctcaacaaagtttcacctgcctgttttagtgtgctgatgattcttactaaaaattatctttattatgatgactgacaaatgatgttttctaagacattgattaagttggcatatctactgtaaggaagaacttgttttactactccactctatctgtctatctatatctatctatcgatctgtctgtttattgatctatctgtctatcatcttttatatcagtatggactcatgtattcaatgtgttatatcaacagttggcatactttctttgcaaagggccaggtagtgttttaggcttacggagccataaggtctctgttgcacatagtcagctctgacattgtattgcagaaataaccacagactgtatgtaaatgaataggtgtggcttgttctagtgaaacgtacaaaaacaagtggcctgattggtttagtcctagggctgtggtttatctgtctcctgggttgtatcattattttgatgctcgagatttggccagtaggacccttcacatggattatgggacaaatgcccataagtttataatactttcttactttctgaaacaagatgtttttgacttttcttacactttccttatcccagccctgaaattagccatttttccaagaagccctggtttgcttggtggatatggtttttagaaaccaagatctggatgtgaggtgtgcttcttggtttttgaatgtcattgcttctacattctcttagtggacagatctaggaaatgatgtttgaatctatgtatataggtacatctcaactgatttatctatattaaaaccatgagttcacagcagtaccttcaattccagtcacatggctcgacctagcctcaaacttcttaaatgtgtagctttcttcttcaatagtgagaagtcttgctcctattgtctttaatatatttatatgttttcttattctactttacaaaaccaatattttgatacacatgccataaccttctcagctttaacattgctagtcatctctaatcataccctcagatttgactctgaatggtccttgttgtctcttcagccccagttgtttctttggcactggccatcctcctgacctctactgtctccttggccctcaccctgaaagtccttccagactcacttgcctctggctctataagatcctgggtatcaccagggcctctgctccctccatagaacccgtgtccctgaggcctcactggctctagctacatcaaagagagggaaaggaagagaaccagtagtacatatattttaagtgaaagtgacaggaaagtggaatgagcacttatttttctttatcatttaaattattactttaacattttaatactttgaaattaattttgttatatagtagaatgtaaggttctgacttgaagtgtatcattttctaaatgacagcatttttcaataccattttaaacaaatgctttcttttaaggacactctaaagataatgtgcactacactagttttcgtagaactgttcatgtgtaggcactcaccttgagaagtaggattttttttttacttaacgcttttgtctcaaattattattatatatagttaactgtaaaaacattgagatatattaaaaatattataggacaggtaatacatattcatggtagcaagtgaaataatacaaaggtttatgaataaaaagttactactctcctaggtagccaatgttaccagtcttgcatatccttctgctgctttttctctgctcatacaaacatgaacttactcatgcatacacataggtgtttcaaagttttattctgaatacatcacgaacacaaagtggtataattacatatatcaatgtaatatataaacatgttataaatatgaatataaatgtaaaatgaaccctatttaaacatcagtaagcctaagacacagaacattaccaatgagcctgaatattctcatgcgtggccacatctcttttctattccccgtcatagaaatcactccatcccaaattttacgttatttcttttctttacttgggtgcttattattttttactatgctttactcttttgctatttatgtatgtattattaatttattgtttagcttctatattttacataaatagtattattttgggatttgttttttcattgagtttcatatttgttagataaatcggtttgtattttattttgcagaaatggatttatatcatacacaaagcacacaaatatatatatttctttgcaa

SEQ ID NO: 2367 - DNA, 798 bp, Homo sapiens
ggtcattttagaacaagccaccacaagccaggtaagtgcctctgctttacttctagtatcatcataaaacaggagtccttgatgtcccaattaggatctcattctagatgacaagtatatagtattgaataaagaaagactcaagaacattaacaaggaagaatgagcataaaggagagaaaactcccattcacaaggagttgaaaattaaaatttcaaaacataagaagaaaatgaaaattcttttttaggaatgctgcttaaaaagcaagtggaagatgaattcttccaggtgaaatgaaaacatcagagcaatttgaaaacatcaaagcagttttaaaatgtctctaaaatgcatatattttggacttacaaagagatgaagaagaaagcataatttctcatgagaaatcatgaagccagaaggaagcagcacaacggtcttcaagtactgaacaaaatgaactatcaactgtagaattcaatattcagtaaaatcatcctttaggaatgaaagagaaataaagtttttctttatccaccattagacaaaggaaaccaagagaatttgccagtagcagatataccctcactagcagatataccctaaatgaatggcaaaggaagtcctctataaccagaagaaaaaggattgaaaaaaggagtcttagaacaccaggaagaaaagaagaataatggaaaaagcaaaaatggcaagttgagcagtgaagtggcagcctgctgtgttggggtgatggcctcacttttgtcatattaatgtgagatacataagcaggt

SEQ ID NO: 2368 - DNA, 1047 bp, Homo sapiens
aaataagatagattttgctatgattaggaaggaaagatatcagtgcctagattatcccatataaaggagttcactcacttttaagatgcaatctatttttgccttaaatgtcttctgcaaacagccttgccacttcagtgcttgtgagttgatgtatgtgtcaagagaactgagccaggtcccggctgtgccgcaaatcattcacgtggtgcagatggacacacgttctgttagtcaaataagcatattagattcaatgactatgaaactctccttccaggtcaaatagcctgttatttgtgcattccagtatgatcattgccatttatttaaagtatttctacctatacagatattagttactagcgactcaagtacacgttagaattaattgtttaaaagagcaaataaacctctcaccgcaatggcaattaaagacacccagtcctgctgtgtgcttcctccatttgcttctagtggcagtttcgtgtgcatttttggtgatgatgctccacggaacatctgcagatgtgctgtcaatttggacagctctgactaccgagtgaatgggaagtactaacgagaactgtctgcttgggaactccatgaagttcgtggcttttgtgattgaaatagcatcaataaaaggttgacactgtggaacaacacaagcctgcatggacctggttatctctgacctcgcaccactcatgagaccatacctgagccctactccactttggcagaactgttgcatggcctctcttcatataatacctctccgtacaccgtacaccgcagctcaaagaaaggatatatgctccctgtgaagactaatggaactgtccctcctgatcctcctacagacttcctctggcctaatgggtgcaccattgcattatatctgccatctatacacacatatacctttcaaccctgcactctctgagatgactggactcatgcctaaataactgatgctgtccctagtgtaaggaagctgcctgacgaggagctgtacggaaataagagtaattcagtgatggg

SEQ ID NO: 2369 - DNA, 2236 bp, Homo sapiens
ctggattgcttctgtctggcggcggcagcatggcggcgggggcggctgaggcagctgtagcggccgtggaggaggtcggctcagccgggcagtttgaggagctgctgcgcctcaaagccaagtccctccttgtggtccatttctgggcaccatgggctccacagtgtgcacagatgaacgaagttatggcagagttagctaaagaactccctcaagtttcatttgtgaagcctccaggcatcttttgaaatgtgcaacaaaataaaaacctctgaacctgttttgacactgcaaactcagtggatgacatgccagcccattggaagctgaaggtgttcctgaagtatctgaaaaatatgaaattagctctgttcccacttttctgtttttcaagaattctcagaaaatcgaccgattagatggtgcacatgccccagagttgaccaaaaaagttcagcgacatgcatctagtggctccttcctacccagcgctaatgaacatcttaaagaagatctcaaccttcgcttgaagaaattgactcatgctgccccctgcatgctgtttatgaaaggaactcctcaagaaccacgctgtggtttcagcaagcagatggtggaaattcttcacaaacataatattcagtttagcagttttgatatcttctcagatgaagaggttcgacagggactcaaagcctattccagttggcctacctatcctcagctctatgtttctggagagctcataggaggacttgatataattaaggagctagaagcatctgaagaactagatacaatttgtcccaaagctcccaaattagaggaaagtggcttagggagagaatgaaatcaaggaaaatgtcaacgcatttgcttgtttaataccactcaaagctgtgaactgtcatcctgccatccctcaaatatgcatgttactcacgaagcggaggaaaagtggtgttgcataattgagctgagccgttttatatcaattttctctctttaggctcaaagtgctgacaaataaagcttctgtgatgctctttatgaaaggaaacaaacaggaagcaaaatgtggattcagcaaacaaattctggaaatactaaatagtactggtgttgaatatgaaacattcgatatattggaggatgaagaagttcggcaaggattaaaagcttactcaaattggccaacataccctcagctgtatgtgaaaggggagctggtgggaggattggatattgtgaaggtaaggccagttcttctgctgttctaaagaacggaaaagattttggtatgtttaaaaatgatttcatattgaatggaaacttgagagttgtttttgactcctgtttccagcctgactctcagacatttctagaccagtatcaccgtttctgtgtgcatgactaccctgccattctcactgtccccacgtggcagcctgttcttactttcacacctgagctaaccattgcatctcctttctgtggggtgatcttccctgtcactcagggtccttgttagatcctgcttcagctcccagacaacaaattgttttttcttgccttactcatctgcccttgggtgcatggagtgacagcagtgtgaggcctgtggcccggtgctgcccatccttgccacagaggctgaggatcactgcccctggtcccccgaaagaaaaaatgtaggtcctttttggttttgagatgcttggaaatctgttatctgttagattgtgttttagataagacaccatttcttatgtatcttgagtccttcctgatgctttgtgtattttaggagttcagtaaatggttgttggatggataagtgactttacttcttgattgagttttaaatggacgttactttgcatgtatttaatgtctagaattcagggcaggcccaccaactaacacctgtgtgctctgtagctctttgattagcccaaaacaataaacagaagctgtagctttaatatctacacacagaccccactgcaccccaggcccactgtgggcatggtggcatcgaggagggtggtagctggttgggtatagagaggagctagacaggaatgctgggcaggaatgccagggtctgctcaggggcatgaacaaaactgccccgaaaagtgggttgctgactgccctcaggccttcctcttgcctcaatccatgagagaattttctgaggtcagatcttcgactttttatgtggaaaacaaat

SEQ ID NO: 2370 - DNA, 4997 bp, Homo sapiens
ctcccgtgcggcctcgggctgagcgtgcgcgccaccggctacgtgcccagcgctcgcgtccggtgcggggcgctggcgacggttttgctgcccggggcctagtctctgaaggagacacgcacttgcacgacgtgggcctctgtgcagctctactttgtccttctctgactcaacgttatcgcagtttgactctggagccactcaggtttttcctaagctcaactctagccagctaggttcctggtgctttggggagaccgtcaattggcctagcacttggccatcctgcccccaaattcttgtcccagttccgtgccagctgcatgatgccttttgatagtatccttccctcaagcatagtagggtttcagaccacaagttttctgaagcttttcgcatgcagcttgatgcgttattagtaggggctgctcgtgggaaaacgcttgtaattacacttcctcaagaagttaatgaaaatgtgtgagaagagagatttccaacaggtgatgaatatgccagccagttattcccttcttccttcaaatatccagcctagactgatttctggataggtattgtagaaataaaaatttcagacaaaacaaacttagattttgaatcggacaacagcaaactgctctagctgcccaggcatcaaactttataggctgaacacgaaagtaaagagattggctttgccttatttgggtatggtcacatgggaggtccctaattatataaccacttggctggttgtctgtttgtgattggttgaaactccattcaaaatcaggtacaaggggccgggcgcggtggctcacacctgtaatcccagcactttgggaggctgaggcaggcggatcccctgaggttaggagttcgagaccagcctagccaacatggcgaagcaccgtctccactaaaaatacaaaaattagccggacgtggtggtaagtgcctgtaatcccagctactcgggaggctgaggcacgagaatgacttgaacccgggaagtggagattgcagtgagcagagatctcgccactgcactccagcctggatgagagaacgagactccatctcaaaaaaacaaaacaaacaaaaggtgcaaggaatacctctaaattttgggttgctttctgggtacaaaaacaactccaaactaatggcctgctacttattttgcattaacagtatcaagtatcaagactccagcaaaagtggcagacagcatgggaatgctaaagagcatacaatatcaatacaggatagtactccagaaaatacgttaccctgcatgtggcgttccctcaatagatgtctcccctccccccaattttttttagctctgtgctttagtggatacaaaaattacttgctttcccaaagcctccttttgaagatagagctagcattaggttgattgctaaattttcagggattttatgagccaggtcataagcacaaccattattagaaatcaaattatataagctacaattaaattatcttaaaaataaaagtaataggccaggcatgttgagtcacatttgtaatcccagtgctttgggaggctaaggcgggaagatggcttgaggctagaagtttgatgttgcagtgagctatgatcacaccactgcactccagcctgggcaacagagtgagaccctatttctaaaaaaaaatttttaaatataataaatattaaaaactcatcactttgtagtttttttcttcattttactaataattctgctcttgaggttatttgtccattgtattccctgtggaaatactacatatgttgtatgcatctcttcccaactctattcagaaatgtcacattggtagcacgaaattggctgtaaggggagtatttacaccatggaaatgggcaaatgcagcaagtcagggcgtgatttattgttttgttgatttttctagaccatatgttagcaaaccttttgtgtaaacagccaaatagtaaatattttaggctttgtgggacttatagtctctgtcacagctactcagctctcactgtagtgccaaatgtgccaaagtagccatagacaatacttaaagaatgggcatgggccaggtgcagtggctcacacctgtaatcccagcactttgggaggcccaggcagggatcacttgaggccaggagttagagactagcctggccaacatggcaaaaccctgtctttacaaacaaataaaataaacagacaaaaaagctgggtgtggtggtgtgtgcctgtaatcccagttacctgggagtgtgaagtgggaggatgccttgagcccaggagttggagattgtaatgagccgagatcacaccactgcactccagcctgggcgacagaacaagaccctgtctcaaacaaaaaactcataggcctttatctgatagtgaagggaacaatagagttgaaagggaaaaatggagtagatacaggcaaatgtttacatacatgatacggtgcaacaagaatagcagaacatactgcaaaagaaattatgtcaacatatttaagaatcttggaagagaatggcaaatatgcactataattgatgagacatctacatattggaagaaaattacctagagatttatctccagtacacagttgaataagcttctgtactggtaaagatatttgttgctttaaaagaattggtgtcagctgggcacggtggctcacgcctataatcccagcactttgggaggctgaggtgggcagatcacaagtgggcggatcacgaggtcagaagttcgagaccagcctggacaacatggtgaaatcccatctctactaaaaatacaaaaattagccaggtgtagtagtgtgcgcctgtagtcccagctactcaggaggctgaggcaggagaatcgcttgaactccagagacacaggttgcagtgagcagagatcacaccattgcactccagcctgggcaacagagcgagactccatctccaaaaaaaaaaaaaaaagtaattggtgtctgccacacagattatatttctactacattattgtctattttactttttttcttttgaggcagagttgtgctctgtccctcaggctggagtgcactggcacgatcttggctcactgcaacctctgccccctgggttcaagtgattctcctgtctcaaccaagtagctgggattacaggcgtgcaccaccaagcccagctaatttttgtatttttagtagagacagggtttcaccatgttggccaggccggtctcaaactcttgacctctagtgatcgaccagccttggcctcccaaagtgctgggattacaggcgtgaaccgccgcgcccagccgatattgtctactttaaatgtggcttcagtaatgaatatttgaaatttaataatgaatagttgaaagtaagctgcattttgttttaatggtgctttcacaataatgggaaagaagactggagtggccacagatttgtcagaaaaatttcctaatgtcatcatttggttctgttaccaattataattcagtatctgaaataaaacaagtcaatcatttaaaaatattctggatagtctgggcacggtggctcatgcctgtaattccagcactttagaaggccgaggcaggcggataacttgaggtcaggaattcagaactggcttggctaacatggtgaaagcctgtctctactaaaaatacaaaaattcactgggcgtggtggtgcacgccagtagtcacagctactcgggaggctgaggcaggagaatcacttgaacccaggaggcggaagttgcagtggactgagattgtgccactgcaccccagcctgagacagagtgagactccgtctcaagaaaaaataacaatattatggataaaatttattctgtttaccaccaacccaaaaaaaggaaacagttggaaattatagctaaataacttgaaactgaaattattaaaattagccaagtacttaggttgagatgggtggacatgtactttaccaaccgctaatgctgcatggcacacatatcctacattataaatgcatttttctcattctttttattctggcctagcaacaagatcagctaatattaatttcttgtaataccttactttaatgattgatattcttaaataattttcattactttcagttgcactgcagttaagatcaaccaacattcagaaaattaaaaaattaatagaatgcactataaaagctttggaaaaattaaaaattggcattagaaagcatgactctcaagttgaatatttggttaagtcatcagtttgaagtcattccatttaataattttttttttgaggcagggtctcactctgttgcccaggttggagtgctgtggcacaatcatagctcattacaacctcacactcctgaactcaagtgattctcgtgcctctgcctctcaagtagctgggacgacaggcacatgccactacacctggctaatttttaaaaacttttggtagagatggggtgtcacatgttgcctaggctggtcttgaactcttggcctcaagcaatcttctcatcttggactcccaaagcactgggcttacaggcatgaactgccacacctagtcaaaaatagatttaaacctctgcctaagaatgtgttactaaaaagtaatgaatacatgtcttttattagaaacatcattttaagttgtttttatttgttaaaatcaccttcttggacttcttcactgtggaaaataatatcatttaagtgaaattttaaaacatgtattttgaattattttttctttttttttgatatggagtctcgctctgtcacccaggctagagtgcagtggcgtgatctcagctcacagcaacctccacctcccaggttcaaacgattctcctgcctcagcctcccaagtagctgggattacaggcgcctgccaccacgcccagcaattttttgtatttttagtagagacagggtttcatcatgt

SEQ ID NO: 2371 - DNA, 5813 bp, Homo sapiens
gggggaatatgaacaggtgagtggccacagtggggctgagacccgtagacagtgggaccagcgggggcttcccaaatcctgggccctcagactgcaggatcagaagagggaaaaaaccccataggaccggctcagcttcccgaggctggagggtgaggctgccccctagtggctgaagttcacgaccggacggacgttcaaggagtcccgggcgttccaatgctttctcccaggaagtgggctctgcaggctggagttgccctagtgtcagggtgaaggctgggagccaacgtctaatcatcaaggtgatggaactctgagggctgaagggatgttaaggcactgagggccagagcacttgttctcatcagcatcatcatcagcctcagcatcattgtcaccgtaatcagcatcattggcatcagcatcatcagcatcaccaccctcatcatcatcagtagcatcaatatcactatcatcagcattagcatcagcatcatcagcagcatcagcaccatcagcatcatcgtcatcaggatcatcagcatcatcagcagcatcaccaccattatcagcatcaggatcaccatctaacattttttgagggcttcaaatgcacaaggcactgggctgatttctttacatgcattgtctcacttgtttccaacaatgacagcccccaaagttaagtattattattgttaatatcctcatttacagatatataaactgaaacttagagagattaagcaacttgcttagggccacagagctatgttaagtgtaattttcaaaaatgtaaatcacaattctcaggaaaatataaaatgataccatgtcaaagattttatttaactcaataaccaatgagagaaccaataagaagtttaaacttattcaaagagcattagagaatttagatatatgcaggcaatttaacaacaaaaaaataaggcgagtatgataggctaaataatgttccctctggaaaaaaatcaatcctgatccctggaatttctgaatatgttacttatgttactttataaatagaaaggactttacagatgtgattaaattatgggttttgagatggggagattattctggattatctgggtaggtccaatgtaatcacatgcattcttataggagggagacaggagtgtcagctgagagagaagacataagaacgaaagcggaggttggagtgatgtgctttgaagacggaggaagaggccataagccaaggaatgaacctcaccagcaccacaggacccaccaccaccatcacaagccttatcatcacccctgccttctctatccctgcagcagtccggggatagacacagggagaggacagccatcttaccagccgaggaaggaagcctcagagaaaccaacactgccaacactcggatctctggcctccaggattgtgaccgcacccaccacagttatcacaggggcagctataatggcagcagctgcagcagcagtgagccccatgccaatagagagacataggcagtcacacccattgtagaactgatcacttaggccaagttattaattttgtactggaggaaactgaagtccagagaggtcaactgacttattcaagcctatggagctcttaaatagaaaactaagtccaaagatcctattttttggcctcacattttctttctttctactggtccacatgacttcatcccagcccatcagccctggaggctgggctaaggacagccccactatttgagcctgctcttccttcctatcaggagcaaaccatcatgaaaatcagccccattaaactctgattgtctgtgtctgggccatgtgtttcccttgtcaaggggttgaaatgctttgatttaagggtaggcaggatacttcttttaatgtttttagttaggacttggtcagcaaacaggaacaaacctgatcaaatgtggcataagcaaactgcaaactcggctcatgtaacaagaccaaggcagccctggctgcaggcatagcaagattcagggctcacatgatgcaatcacgtgtctctcctttctgcttgctttgcaatctgttgactccagtctcagactccatttggtagcgagatggcagcttcagtttgtgaattctctggtgcagcaggaaagaggtagcctgtttctcaataacataaacgaaagtcatggaattaattaatgcaaaaatatttattgaggtcctagtatgcaccagacattcttctacatgctcgggatactgaagtggacagagagaagaggttcctgtcatcatggagcttacttgagtcttcttgggctctgacatgactgtttttggccatgtgtaatctgtgagccaatcactgtagccacgagtacgcgatgtgctgggtcatgtgccccacttaaagaatgcaagcctcaggccaggcgtggtggctcacgcctgtaatcccagcattttgggaagccgaggtaggcggattgcctgaggtcaggagtttgagaccagactggccaacatggtgaaaccctgtctctactaaaaatacaaacattagccaggcatggtgctgggtgcctgtgatcccagctactcaggaggctgaggcagaagaatcgcttgaatccaggaggcggatgttgcagtgaaccaagacgatgccactgcgcttcagcctgggcattctttcaaaaacagaatgcaggtctctttttgagtgccaggactatgtcatagttatgtttgtgatgtgtccacaaagcataacccaagggctgtccataataagcacatgagaagtgacatcaaacgagtgaacaactgagtaaataaaccacagagagagaaagttcatgaaaggcaaatgtgtaaaaacacacgaaaaggggacaaatccaagtaaatcgaacaacgaaatgctagctctcagttgccaatccaaaaagagacataatattcactatagatgtcttgctaaaaatatttgcccagtgtgtttcatatcaggccaagaaaatcctgctcattattcagagaaacattagacacaaaatctgaagttgcagttcatttcagagttgtccctggggggtgtcaacaaaccggggtcactctggacctcacactttgaggagcaagtgaaagaagaaatgaagacagctcacagctggcagctaaaatatgtcgatgtcattatgtaaatatctgccacccacagccctccatggtctctcttgcagcctgctgtgggcacctgggaaacacttctccctgttgtctggtgttcttggacatagcctcttagttcctttgatgttctgcccttgatgttcattttatgcagctttcaactggtaaaaaagtttaaggcaaggaaaaagtctggaagaaaatttatagctcctaaattgttaacatgtaaaagagccattcgttggtcctaaatcctaaaagcgtggctctgtatatcttgtataaaacctatgtgggttggcacttggagggatgtatgcaattttagtcattacactgcttaaggaaggacctataaaggacacgtagaaagaggcaaactaaattattaagaggaacctacatttgagcatgagctcaaaggaggtggactccagcatggagagaccaaagctctaagaagaaataagtacatgctatgaattcatgaagggcatagaaaagatgcctgtaaacaaacttattcaccaaatttcaatagaatcaaataagaggggcaaccatggggtttcaaaagggtcaaaattgtacaaatattaagtgtaagtggctttaaacgatggtggcaaacatgaaatttaaactaatttttatgttttagagacacagtcttggacttaataaaaagagctttaaaaggtatattggggacaattggtaaaatttacaggtaagtcacatattaaatggcaccatttaaccgaataaatgttagctttcttaggtatgatggtggtgtgcttatttaggagaatgtccatattcattcaagatgcacggtgaaatgttgggggaaacatggctggattttgcagctgactttcaaatgaattagaaaaaacatctataaatatatgagagaatgacagagcaattgtagcacaatacagtcatgtgctgcataatgacatttcagttaacaatggattgcctatctcgacggtggtctcataagattataatggagcagaaaagtttctattgtccagtattatgctatgctatgctatgctatgctatgctatgctatgctatgctatgctataccataccatactatactatactatactttatttatttatttattttttggagacaaaatttcgctcttgttgcccaggcacgattctggctcactgcaaccttcaactccccggttcaagcgattcttctgcctcagcttccagagtagctgagattataggcgtgcaccaccacacccagctaatttttgtgtttttagtagagacggggtttcaccatgttggccaggcttgtctcgtttatctatttatttttgagacagggtctttctctgttgcccagtctggagtgcagtggcatgatcgtgactcactgtaacctcaaactcctgggctcaaggaatcctcccgtctcagcctcccaagtagctgggacttcaggtgtgtaccatcacacttggctaattaaaatgattttttttttgtacagacaggggtcttactatgttgctaggctcatcttgaactccaggcctcaaataatcctcccacctcagcttctcagagtcctagaattagcactctgagtacctagcatggaatttattacctttagaagtagcactgtttgaaaatataaagtcctttaagaatttggatatgttcatgagtgatgggtcaagagtgatgggtcagatatgttcgtgagtgatgggtcagagacttgaagatgcttttgatactgccctacccacagagaacaatcacacccacccttgacgcatctattggagaccgagtgttagacaagagtccagatggctcacaggcaggtctaggacaggtctcagcaatgttttgagaataaaacaaggaagatctgctgaatgtttaagttttttttttttgagagggatagcctttaatatcataaatggataattaagggaataaatgaaggaatgagtagatgataatgagtaggaggcttttggtaactttttttttttttttttttgagacggagtctcgctctgtcgccaggctggagtgcagtggcgtgatctcggctcactgcaacctccacctcccgggttcaagcgattctcctgcctcagcctcctgagtagctgggactacaggcacgtgccaccacacccagctaatttttgtatttttggtagaaacggggtttcaccatgttggcccggatggtctctatctcttgaccttgtgatctgcccatcttggcctcccaaagtgctgggattacaggcgtgagccactgcgtccggctgtaactttttatttttaaatagttatagactcacagaaagaggccataagtacagggtcacatataccctcccctcagcctccccgagcagtgacatcttataaagctgtggtaaaatagcaaaaccagggagttggcactggtagtgttgaactatactgcagattttattctgttctcagcattttttaagcttgcatttgtgtgtatgtaatgttatcccatgtatagattcatgtaaccaccatcccaatcaagataca

SEQ ID NO: 2372 - DNA, 3135 bp, Homo sapiens
gctgaaaagaggcttagggccgggtgagccttccagccagggcctgcctccaagtgatgctcccccagggcagggggcataaggatggcacccagccaggtgggagcctgggccctgcccagcctcaaagctttgagctcaggaaatccggaggcaggggagggggacatcgttgccacattccccagccctttaagacccccaaggcaggaaggctgcccgggcctcaccagcttccctcacaggctccttcctgggaggaaggggctgcctgtgccctcgaaggcgcaagggagggcaggagggaggctcggaaggtgttgcaatccccagcccccgggcctgtcagaggctgagccattaacgacagagctcggggagagaagctggactgcagctggtttcaggaacttctcttgacgagaagagagaccaaggaggccaagcaggggctgggccagaggtgccaacatggggaaactgaggctcggctcggaaaggtgaagtaacttgtccaagatcacaaagctggtgaacatcaagttggtgctatggcaaggctgggaaactgcagcctgacttgggctgccctgatcatcctgctgctccccggaaggccttcgcatccccatcagtaaaacgggcctaagaacacctgagagaggacagaaagcattgcgggcaaagtgtatgttgatttgtttgtttatttatttatcaaaaaaaattcatcggccgggcgcagtggctcatgcctgtcatcctagcactttgggaggctgaggcgggtggatcacgaggtcaggagatcgagaccagcctgccagcatggtgaaaacccatctctactaaaaatacaaaaaaaaattagccgggcatggtggtgcgtgcctgtagccccagcttttcgggaggctgaggcaggagaatcgcttgaacctgggaggcggaggttgcagtgagccgagattgtgccacagcactccagcctgggtgacagagcgaaactccttctcaaaataataataataataaatattcaccaaggtcctactctgtactaggcactgggaatacagtaataagcaaacagccaaggtctgctggcctcacagaatttatagtctagctggagtgatagataagtaaataatcataagactctataattatgaaggataataagagctttgaggaagtacagggaccttggcctcctccagttcgttagtgcctggtctggtttcttcaagatgcctaagcgttaaccaggtgaaacaggggtgggagagagaaagaagagtccctccaaaaagaacagcatgccgggcacagtggttcacatctgtagtcccagcactttgggaggctgaagcaggaggattgcttgagcccaggagctcaagattagcctaggcaacatagtgaaaccccatctctaccaaaaaaaaaaaaaatcaaaaaattagcaaggtgtgctggcatgaacctgtagtcccagctactcaggaggctgaggtgggaagatcacttgagcctaggaggtcaagggtgcactgagccgtgatcgtgccactgcactccagcctgagtgacagagcaagaacttgaagaaaaaaaagaaaagaaaaagaaaaccaaaacaaaacaacaacaacaaaaaaaaaaaaacagcagggacaaagatccagagattagaaagattttggagttttcaaagaatagcaagaatgagccagaatagctggagctgagagaccggtataagctggaactgagagggtcaggcaggggccaggccacaggagctattgaaggatttgagtgtttatcctaatgatggcagcaaatactcacatgccagacactgctctaaatgccttccatatgttatcgcatgtaatccttccagcaacactaaggtagggacgatttttatccccattttacagatgagaaaactgaggcacaggaagtcttagaaatataccaggatcatgtaattaataagcaatagaaccagaatttaaacctaggcagtctagttccaacatccacactcatccatcacaccacactgcctttcagagcaataatgtgccattgaagtgctgcgatggagatggggtagcagaatcagatttgaattgtgaaaagattgctgtggctatgggttcttatcactctaatcactgcttgcaccatccttggggagggcactggggagttaacagtctccatctggtggtgtgctggtgctggcttgcaaaaactaattgtgcacatctcttcccaactccccgatcaatgatgtcacatcaataggctgaaatcagctacagtgagagcacttacaccgcggaaaggcacacactacaaaccagggtctgcttttctctgccaagctggctgataaacggttaccagcacatcactatctctgtgtcacccccgtagcctctcgaagtctccgtccccatccttccatttccagcccccatatcttgaagggtgagacaggaaggtgaggcctctgagtctaggagtacaaaggcctagattatagcccagctctgctaggcagaggcgtcgttcctggcccattctcttccaccccaggtctggaggagtgcgggcacatcagtgtctcagcccccatcgtccacctgggggatcccatcacagcctcctgcatcatcaagcagaactgcagccatctggacccggagccacagattctgtggagactgggagcagagcttcagcccgggggcaggcagcagcgtctgtctgatgggacccaggaatctatcatcaccctgccccacctcaaccacactcaggcctttctctcctgctgcctgaactggggcaacagcctgcagatcctggaccaggttgagctgcgcgcaggctaccctccagccataccccacaacctctcctgcctcatgaacctcacaaccagcagcctcatctgccagtgggagccaggacctgagacccacctacccaccagcttcactctgaagagtttcaagtgaggaggggcccccaccttggtcccctccctttggattctggggtagggcatgggtaggatgctgggcatgcctctgggagggagaagggagc

SEQ ID NO: 2373 - DNA, 8220 bp, Homo sapiens
cgccctgcgcggagggagatccactacaggctgcgcctctgcccctgcgaggggcacccctgggtctctgggaaacggaatggagggtcttatggaagagaaggtttggaaccaccgctggagggaaggggagaagaaagcaagcaggagtggcgcgaacaggaagggactagggatagaagccgggcttggacacagtgaggcacgaaccccgacagacacagagacagacaaggggtgctgatctcctcactgggcggggtgggcaggaaaaggaacaggagctggagctagagcgagggctgcgagcggcgagtggatacccggcctcagggaggagcttccaggagggcaggggtctcctttggagcagcaccggggacgtttgctcggcaagggctttttgtgcgaagtaaccgaagccagtcaggctaatggcggcagagagaaggatttattcttgcacccagggtgtgcggaggagcccaagggcatttggacctgtgttgacgtccggaagggcccggaacccaggaagctctgcccgcagagggtattcctctccctctgaagaccacctcaaagctcaactttatcacctccacgcatgagaccgccggcggctgaactaaaatctcaccatcccaattccagtttctgggaattgtcacctccattcgctctcattagaaatccagcttttttcacgaggtgaataacagggcagttgacagttcccaagttttctgtgtccaatcttcagccctggagggactcttctgctccaagtccagcgatcccgggagggggcccactggtccagtacggctcagtacccagccctggatccaccagctgacgctggaaggagtgggtcatgaagaactcagcacgaacgcagctgggtacgaattcccagagatgtcctgtccctccacggtaccaaggacccctcctttaagaaactgcttcactgaaggcgcagatggagggagggatcggcaacagagttcagaggggttccgggggcacatggctcagccggaggaagcaggctgaggcaggagagtcgcttgaacccaggaggcagaggttgtggtgagccgagatcacgccattgcactccagcctgggcaacaagagcaaaactccatctcaaaaaaaaaaaaaaaaaaggctttgggactaaagcccgtatgcagccgcccctgggcacatatacgtggttttatgactttggtactgactcagcctaactggaccccagatacaggagaaactgagaaggacggagaacataagcactgtccccggtgcactgtgtcccatgtcatcctcacatcaatcctgtgtcatagggtccctgcacagtttgcctgcacagggctgggcccgcaaagcctcgctccccaacgcacttgtttcatcacttcaattgagcctgcatcctgctcctgtggctgactggggaggggccagctgcatccccatctaggggccctgctcccccatcctctcatgcctgcagaaaccttcaccctggctcttgggtttgggcaggtccagcctgcagaggggagcggatctcctcctgggccctggcctgccctccctggctggcatgtggactaggggcctgggggctcactggatggtgcccgcccagactcacggcagctcctcctgcgtgcactctggcctgtgcagctgtgtaagggtcctgcggttacatgatgggaaaagcaagagggagcatctggggccctgaagtcccaagtcacacccaaaccaaaccacccagccaggaagatagcaggaagcaaattggaggcgttctgggttgaactgtatccccagcaacaacaacaaaaagatatattgacatccccagtacctcctaatgagacagaatcattacagaggtaatcagactaaaatgaagtcaataggctgggctttcatccaaggtgactatacaaaggggaaatgtggacacgggcacacacagagggagacaccacgcggacatcctggaggaatgtcaaagcctgctggcaaagcaccagaagctggggacaaggcctagaacagaccctccctcacaggcctcaggaggaaccaaccctgccgacaccctgacctgaacttcagccttcagaaccaagagacaatgaatgcctgccattgaagctaccgtcttcagcactttgttatcacagccctagcaaactcacagaggaccctatccagctgctgccccatctccaagagcctcgccctgctggaagtgcactgctagtctggttcatcagccactctgcacaggacccctgcccaggacccagggtctgcattttaggccatccttgctggataggcccagagcccagggtccccacctgcctgtagaagggcaactgccagccggtgccagcgtgccttccaatattcagccatctcctcatgaagcctgggatgtgattcttgtgcctctagctctttcctgaggggcactggtacctccaggacctggagtgtactggaagaaatggtgcagtccagatgctgcagctgctccaagcaggcccctagttgctggtggctctggcccagctcttctgagtctcttgttcacctggggagatccccaccccaccgagttgtggctcagcctccaccagggttgtggagctccagcctttacccatgcagcccctcctcagaggccccgaactccacttcctctgggtctcagcccttccaggaggcctctctgaccaccccagcccgcagaggcttctctacactccaggctacgactctggaccagtgcctggctgcacactagcaggggggccagttatgtgaagatgaggatggtgctctctggagtgtcactgtgtggacgccctgctagaatctctctctcctggtcattctcctttcctctgtgcccctagagccccttgccctacattggaatcccccaggaatggggcccaggctcccttgcctctgccccctggtacagatgggcatggcctggatcagctaatgcccagattccctttcctgtggggctgcccctgccagctgtcttgaccaacctcagtgagtatcagcaactgctcctgcagacggactgtgtcctgagcctgggcaggggtctcagctgctggcatggagactctgggtcccgaagctcctgggccctgcctccatcccagctctgctcttggatctgcaggcctggcaccagcatctcctgtagatacacttggtccagaatcctggggtctccttccagcttccagaccacactggggtggtcttggcagaccgttgatgcctcagggcatgttgtggcagggtcctggccccaactcaagttatgactctgaacaagctctcctctgctctctggtctcagttttcccatctgaaccaggagggaagtcactgaatgatcccagggtattcccaaatgttggaagaggatccctctcttggctggactaagcccctgcgctgccttccttctctagataatgcttcaataatgaggaccagagaataaagtgtggggcagagtcaaaggtacagcagggccagtgcgcagggcctgccatgcacccacttgggggatccccaggctgggctctgggccaacaggctgttgggtcatttggtccaaatgccgctaggccttttccacttctgtctgcagcagcaggatcctgtgggtagaagggatggtctgcctgttccctgccaccccacccctcccccacagcccagccccactcacttgtcttctatgttctggtctggcctcctccactcagcctgtccctgggatccctgcatctggtgcctctcctgctccaggcaggccagggagcactccacctgctaggaggaggctgagtgggagggctgaaggcagcacagagcctcagataggtagggctagcttccctgcctcccaccaggcagggcagtgtctgcagcctttgataacgcaggcggactggcagccagcagcccagctgacagcccaacatggacccatgccctggcttatatacaagggactgtgccctggggccctgaggggctgcttttggctgttatctatcacgacaggctccagctgtgcatctctacctccagctgggcccgagatacaccgcctctccagctgctctccagctgctgacagcttcagggtggaggccagcaggactgctgtggcatgctaaagggcaggcagacatgaggttgtcaactgggtcccaagggtcccccaggcctggtagggagcagtggctccaggtgggccagctgtgagctaagacacagagtcactgaaggcttgcgtaactgggccatcacacggtgtccctttcctaccctcacatgaggcagagatcctggtaaccttcccaagaaccctcagcttgcacagccatctccccctctctggggctcgcctgtttcactcggggagattgggcttctaaggaagctcttcagtctatggagctaaaaccagcccctccctccctcagattctccctggggggccacagggaccctggcccttccttcacctccagcagtgtccctagccacccccagcatatgcctctcaggcaacaccctgcacccttccaggggcaccattcagagacatctctgttcaacaccgcagccttgctggggactccatttccctttctcctctgggtgccccagaccccggaaagcctccctgagaatatggcaccagatgtggacaccagctctgggcattctggagcttcagcctgctaaggggatcttgctagctcaggggacctcctttcagctacagaaagcccaggaagaaggaatgggggaggacagggcctcactttctgctttagggaccagccaagtcccagcttgtgctcccgcctctgcagcaccagggcttgctccgacagggcctccggcactgcccgaagacggcttgccagctcggccctctgctgcctgctttctgccagctgctcccacaggtccttctctgcccgcctccagtcccgctcgggggccctgttggagcacatgccagggaaagaggagccagacttcagcccaggccccagggggctgccatgcccaactttcctatgctcacctgcacccttcagtggggcttggtgggcagacacggtccaatgccccgaggaaataggagttccagagacagcgggcagggctgggcatcaagtccatgggctctgcctcagtgggacctgagaacaggacagatcctggagctggggtagtcttggcttcccaaagcaccaggctctgaggcctcttctcagactcagaattgaggccctttggctgagcacgcactaaaacccttcaaccctgatcctctggcccgaaagtctcctggtgattggaacttcactaaacaccagcctcaactccactaaacagttctcagttcccagtggtttccatgagctgtgggtgctgccaggggtggccacttgctgaacacaaaccccattatcctcacagcagctggtctggggaggcgcagcaggcactcctgaggggaaattggtgcccaagtccggcagggagtcccgtgaggagctgcaatccccacccaacactgtctgcaccagagccacgttcccccttccagtgtggaagtctggaaatggcaggggagcatttgggggccaccacagtttagctatgatgtgggggtcagagcccttaagtcaagtcactgctcaggtacctctctggcttccatagcttcagctgtaatatggaggccctgacggacctctcacccaccagcttggtgaggaaggtcagagggtagacaggggctattctgccagtgttgccatccctacacccctcaccatcaccctcctcacctctagggtctgggcccaagtccactgcctcccaactcccaaccctgggcacgaggcaccctgccctggctctgaaagggcacaggagttgtcttcacctaagcagtggttacacctagcacctctaccacccccaccctgacctccccactcctcacattcccaggccttctccactcaggatggcaccatcgcccaccaggccttctccccactggacagcttgactctcctctccccttactccaggcccaggctcctgcagccccctccaaaattgtctcccctccaaaatgtcactgccacacaaggcttctctaagacagaccatgaggactggccgctgcccccacctcccatactgggtacagctcccacaatgccactctacctgggtgctctgtcttgccagttagaagtgacaggctttccatggcagccccctgcccttagtgagaagctgagctgtgcccagcttggtccgggaggggctcatggtccacagaatggagtgcacatgcaggccagattgtcctgagcaggggggcaggccagggcagccccaggaaggctttccagggaggtgaccctggggccaaggctcagaggtgaattaactgcctccagagaaggcaaagtcagatgaggcagacagaggagacagtaaggacaatagaacaaggagggcatcagagcagctgggcctggcgggcagtgaactgagccctaagcttggtggaagtggaggtggggggcaaaagggagaccaaaaggggtgagaggagctgtggggtttgggaggatgcagggcagcggcacctccccagtgcccttgagatatgctacagacctcaactccacagaggctgaggacccagacaggagcttgggcctgaggggcagtggaggtggagcaagcctcctctgaggtggggatgggagtggaggagttacccaaacctcacctgggggcagatctttctccaagtttctgaaaggtgtgaaagtcacaaaagaatgaagctctaagggtagaatctcaggcaggatggcctccaggctgcaaagtgtggagagggagacagctgggagatggcttctgttccacctcagaaaaagagagttgcttcgtggctgggaggtagggactcctggattctcagtggtgggcagttttgtgggaaggtgactaacttaccccatcagagcctatagctcagggcagggctggggacagaagcttctctgagaacatccatcccggggacagaagcttctctgagaacatccatccctcagggctagtatcctggagccatggaaactcaggcaacactaagtggtgggaggaggagacaccagagaggcctcctactccacctcatctgagctgatgaaaccccgagatggaacctggctagtgtggtcgaggccatgggtaccaggcaggaatggcatctcagatggcctgggatttttcaaaatcttcagcttttgagataggaccttagggggcaggacctcagcagccaatctgggtcacccactgtacactgaagcggctcctaactttcttttttgagacggagttttgctctcttgcgcaggctgcagtgaagtggcgcgatctcggctcactgcaatctctgcctcccgggtttaagtgattctcccacctcagcctcccgagcatctgggactacaggcgcgtgccaccacgtctagctaatttttgtatttttagtagagacggggtttcgccatgttggccagactggtctcgaattcctgacctcaggtgatcatccacctcagcctcccaaagtactgggattagaggggtgaaccaccgcgcttggccgattttttgtttattttttgagacagggtctccttctgtcgaccaggctggagtgcagtggtgtgatcatagctcactgcaatctcaacctcctgggatcaagcgatcctcctgcctcagtcccctgcaaggagctggaactacaggcatgcgccacccagtccggctaatttttgtaattttttggaaggggacccagttttgaattagcttctgttgtttacttcggatagccatggtggagctggcagagatttaggggatactaaacacccctacaaatcacgccttgaaaccccccgtttcagggagagccgctggcgaaggacttgatgcgcagccgcagctcggaagcggggggctcccctgcgacacctccccgcttcaggggcgggcccagac

SEQ ID NO: 2374 - DNA, 13719 bp, Homo sapiens
gtgaaatatcacctgaaactttaaaatttacttttacatttattattcttcaataaagtgaataaggtatggacttttgcagtgataaaaagaatacttctgccagcctttctacttcacagctgaacataatcacttaaatgaaccatcatgcacttagactgcaaacatactccccttacttttgtagtacaaccatttgtgcccattgaattgtaagttccaaaaaaatctgactctggcttactcattaataaatgttcagtacccacatttttgtgggtactgtgttttgctgacagtagatgctcagtatatttttaataattgaattgattaaattgtttattttaaggtctcttcaatagataatcagaacttgaaagagaagtgtaaataatagcagcatcttctttgtactttgaaactacatctagaaagaatgactgtaacgatgtattcctaatttgtatatccaaagacatttcaggtctgctttagtacgatgtcatagtagggtcacatgtacaattagacatagactttcagagttgaaaggatcctgaaatgtcattattccagctttccatccaatgcttgagttccttctgtagcagttgttctcaacttttgctgtatattagaatgagttggcaagttttaaaaatctcagtgctcaggtcccacctcagcccaattatatgagaatttccaggggtgagacctaagcattgatatttttttagaaccccataggtgattccagtgtgcattcaaggtagagagctgttgttctacaagatctctacaaaatgtttttccaatctaattgaactcctctgaagatgagcacctcactaccaaagtttgacttgtgtttattccatttattcaaataataagtataagagtgtttaaattataagctggtgaagtgaaataacacaaatcaagctcaccaattttaatactcagctgttgataaacaacactgaagagtgacatttaaatttgaattatcttctttgaagtagcattgcagcacttttgaatgacttccaaaaggctgatcataaaaatcacttcaatcattttcaaattttactttagcagcaatgaagttatttggtatgactcagatgaaccttctgctctgtcttggagttattatggtcatttcattttctgcaacctggggaaacagagaagggatgagcagacttgtttttacatgtaccttacatatttaccttacagtgtttatagttaaaagttaggcactttcagaaatgtgctagcttcacaggaaggtaatttaccatgtagaaaatttcaaatatactgaaaaaattgagtggaatagtgaaggcttggattttgtaaagctctttgattttagagaagaattttcagaggaagcgccatgtgaccacacacacaaacacgcaagcctgtattcttgcttaggaacttatctgtcctgagaccatccacctgtatgacagctcttttgagtacctttacatttttggttctttagtaggacctgggtacgaaaagtcaatatataacatcactgataaatatttaagtagttctaaggtcttaagagctgtgtttgagtttcacctcccttcctactcatggtgtagccttgggtaaattattattttcagccttagtttccctatttttacagtagaaagaatgccatatatcttgtaggaatgttatgaagatttatagtagtaatgcatataaagcttcacagtagcccctgcgttgtagaaagggctcgtggacttaaattttgtgatacattggaataccagcattgctgggcagactacaatgacgatacattttcttgtttttcctgacagtggtaggaaaaagtcctgagactagttctgtagagaacatcatctgtatgctcctttataaaaaaaaaactattctgagacatgatcttagattgttcctttaccaaaatgagtttcctgttggaagtcctaatgccacagcacatgggtaaacatgggtctctttaagaatatagaggataggggatggttgacgcccttagattttctctggggaaccaggaaagctagcctttctagtggcatacgtcaaccaagactttcctggcatgtcttcatcgctagtcttctcgtctgctgctttgtagagttgccagataaaggacagccatttaaatttgaatttcggatgaataactagatttctgttagtataaataggcctcagatgttgcaagggacttttatatttattcattatttacctgaaattaaaatttaactgagcatcctgtaggtttcttattttttctaaatctgacaacccctacctacgtgctatgtaggaattttggggttagatgttgggcaggttttatcctagactaatacattactatttttgaatgaagtagagagaaatacttcttagtaagtgaaaagactaaattatagcattaaaatggattcattggttaaaatactacaaatatgattgttacaaattaatatcaataaagaaaagtagacgatgatccagatagaagaacatcttcctacttatctgatcccaagaacttcagggaatcttgaacctaagcatcttccaactacatacttaaggcatattaaagagaatgtgtgatagtataagtatatcctttttaaagaaagtctgaaattaaacagggttgaagtttgattattctttgtttaaagcttgttatgtacattttatttacatatattttacatatatgttagtgtagcaattcctaattactccataacacactgaattctcctttctgtaaacttgtaaagcatttactttgttattcatttattcatattaagtaagcatcttatttaatattcttggcacatcgatcttctatgtgccaagaattgtgcttagtgctaagggtataaaaataagagcaaatctctgtccatgtggagctcatcatacagctctggaaacagatacaatattgacattataatgcaacgtgacaagagctataacaatgaaatgaattgcttctgagatccagaaaaagtagtctgatggaggtttcactggagaagggacatttagactggattttctaggatgaatagaagtttgctggctaagaagggaataaggctattttaggcagaggagagagagagataatgagtaaaaaagaataaaaaaaccctcaaacccagcaccccatcctgtgaaataacctgttgtgacttggaaccagtgagaagatggcatggggaggggcatcctggaaacagggtagaatgtacagagttggtgattcgatttaaagacaggcaagaggagcccatgaagaacattttgtatcaggttataaattttgtttttattgtatagtcaacagggttttaaataagactgaggccttaagtcggtaagacctaattgtttgtttcaggaatatacctggaatatgaaataacacgtggccagaaattattgcaatagttcatgggatacatgaggacaataggaatagtgtagttgcactagaagtggagagatcttgaatgcaagacatttctaagttagaattattaggatttgaacaatttttctgttggttttttttttttttggtatgcggaagaaggtatgaggataaaaaatagggatagttcatgtatgtgaactatgtgtgttatttccttaaggccttaaggtcattagaggcagggtttctctcctaacaaacagtactcaatacattcttgttcaatttaagaagaaacacaaaatgtttaagatgggtgcatttgtgtgtctgtacttcattattattttgacaaatctagtcggtattataagaataacaggatgcacattggcaaacccattttttatctcacttagttaaataaaataatccagttgtctgacacataatgattttatcaaaattaacctttgtctttgataacttctgccctgtgattgttatcatttactttaaaatataatcatggccaggtgtggtggtgtatgcatataatcccagctactcaggaggccgaggtgggaggatcaagaccaacctggcaacatagtgagaccccatctcataacaaacaaacaaaaatatttgtatcaaaacatcacatgtaccccataaatatatgtatgtatctattatgtacccataatcactaaaaatttaaaaaataaaaatataataatgtatagttcttttcattttttaatgtgtcaatagaattgttctttgatgccaggcatggtggcccacaattgtaatcccagcactttgggaggccaaggcagggatcacttgaggccaggagttcaagagcagccttagcaacatagtgaaaccctgtctctacaaaaaatttaaaaaattagctgggcatggtggcatatgcctgtcattccagctactcaggaggctgaggtaggagcattatttgagcctgggtagttgagggtgcagtgagttgtggttgcaacactgcactccagcttaggcaacaaagcaagaccttgtctcaaaaaaaaaaaagatttattctatttgatagttaaagaattcaatgctgggtaattctgaggcagaccaaattgtggactttgaattcgtagttttagctttgtcgctcagcattaaaatcataaaacctgagacaaagaagcaacaagcagtaatgctttatatgtaaggactttcttgttccaagaaatgtatcaccttatatacaacacaatgtactatttaaatgtaacataaattatatattcctatgcattatttttctgttcatgtatatttttatattcacaaatgctatttgtgagtcgagttttacatgggtgtattaagggaggcacaccagttgatgaggtcttgtgtgaggtctttaaacacacccagactctaaggcagcaatggataaccttgaacaggtaaggagcaggtggccttagggtagggagaaagtgcgacattgtaacatccctttggataatgtctgcagccagatcctgtgtcaccatgactcagcatcgaacagacattgattgcacagcataaggagcacacaggaggcaaagctggtctgtcacatggcaattagtttgagacaccacacctgtattcccacagcacatctcattcccccatatctttggctaccacagaggaaagcagaatggatctgggcaatttattgtcttacttttgttgaggagagggagagcagcagaatgcatgctgttccactttttctgtgctgcagtgggcatattggtcattgctgggagcccttcaatgaaggacagtgacagaacaccaaaaagtgtcaggagcttccatgtggctgaaaaaccacattcaaaggacatcagccagtgttctagtgttaggctgtgacttgggcatgtaaatgggccaatgattccagttttgcatggaaaagacacatgattagtttttcagtgaggaagtagacaagttttactaatctgttgactgagaggttataatatactcatgatgaaatctctctggagcaagtcctgtgaaacagtgtaatgacttggcacaggatggctggattcgctttaaaaaattattattattcatgtttatttaggtccaaaggatccattatacttcagctttatatgctattaaatttagagatgacacaagtcaggacacatcttacatagttcctttcatgggacaaaagacctgatagaataaggtggcatttatgggcctttaatatcaacattacaaaagaaggggaattgcattttctttatatgtaagaaaataatgactaatttagagtaattctgaaatgaaatcatggcattattgtcaggattggtaaatcttttaagctattatcatttctgtcatgcagctgcattcaatgtcttaagtaggcaatgtgatattttcacaggaattatcaaataaactcagtatgttagcttctcagggactctggagctttgaatatagaggaggagaaggtccgatgaggggaaaaagaccttctgaaccccccgtggtcataattccagggaaagaaggagaagaaacttaaatatttattaactccttactggctgttaagatttttaatgtatttcattccctttaattttgaaagcaattctgtgagttgaatattatttcgatttttttgctaatgagaaaacaagctcagacaaggtgaacagaaactgacatattaaaacccctatcatgtaggtactgtgtaggaagttaagatgtattttctcatttaattatcaaaataagtattattttatgtacgtgaattaaaataggctagattatactttgttaacaaatagaccccgaatctcagtggcctagtaatataaaggtttatttttcgctcacacaaagtttactctgatgccaggggacttcccaagccagttcctcctgtggttccttggcagtcgaggccaagggaagggaattagcaccacgatgcggtcacactccctggaatgaggactccttgcttgttgccgcagggaaaagtaacaggagaagagtgcatgggttcttaaggcctcagcccggaacttaggcacgtcctcttccctcttagtccatcgtccggggtctagtcacatgggctcaccgcaccgtgggcaggctgggaattgcgagagagaagatggatagcagtgaccccaactgggtctgccatggcactgtcacccccattttaaaaatgagaagactgaagttcagagaggttagatcatgtatccttgatcacttccttggtgatctgtagacttagttcttgaaactagatctctctcagtccaaagaatctgtttttttgccctctactccatcttacccgacacacactccgagtaatttggtggtttggagttaggtgtggatctgtggtcgccagccttcaagatggctcctgtcatccttgcctcttggggttcatgcccttgttgttccctctgtcagtgaatagagctgacctgtgtaaccagtgtggtattgcagaagggacaaagtgtgacttctgggactaggtcataaaagacagtggtgttttcatgtgtcagtgctctctgttggatcacttgctctggggaaagccagctgccatcaggtggggacactagaggagccccagggagctcccatatggcaaggaactgagacctgctgccaacacccaggaccaatttgccatccatgagagtgggccgtctcgaaagtgggtgagtcaacccaggtcagccttcagatggctgagcccaggccaacatcttaacagcaaactcatgagagaccctgggccagaaccactccactaagctgctcccaaataattcttgacccacagaaattgtgtgaaatgataaatgcttactgccattttaagaagctaagttttggggtaatttattatgtggtaatagataacagtacaaacctttttggattatttcctttctctgtgtttttccctcaactctgggacaattcctgcttttaacggtgagtttttaagttagctaaatgagaaagtaattgccacacaatgttattaaattttagttaaatacatcttattatttactttaatcttgtagttctaggcaagctctgtatgaaggtctatactaaaaaatgatatactctgctagttcagaagagagaagttttgaaatttactttccatcagatgtgtatttttctgttttaagatattacctgcttgagattattttatagtttaaattacattgtgaagttttgagaaagaacaagccaagtacatttttattaagagtttactgtcaggaggaagacagaatctagaagtaaccgcttttttttttttttttttttttttgcaaggagaatgtggtcagtgtttcagccagtgcttgctgctgaggcaggagagaataattgtgtaaagagggggctcccgcagtgcaggacaggaagccaccatgtgagcaccacatccacgtgcaggtcgcaggcttcatcatgtcctgaataccatgccttagcattttatctgtgaagataagctatcaatttacattgccaaggtgaaatccaactgaactcctttaagataaagatcttgagtcccaaaaggaatttcctagtgggcaaattgtgagggagatttcaggtttctacttctacatctccagccctgaatactcatggaatatcgctgtacctatgacaggttgcatgatttttccccctctgtgcactcaatttgtgtattattgtatcatatgacattctgaatcaagtgctgctagtaccaagctgctatcatcagctgatgccaaaaatattcgttataacacttctcagcatgcaagtgagagcacttcaaatcacacagacagaatttccagccattgttcttttcttctttgcttattatacagcaacaagaatcaaaacaaaaggggatttattagaaaataatgcttcagtaaaatgttataaaacatgaggtttattgtttgtgaagatagagtgaaattcagtaccacattatagataccacctcagaggcctattttccccttcttttctcttttctcaaatgtttttcaagtggcatctttttttcagtctttgattacattaaggtgcaaactatttatccatctggaaataagcaatactgtcaacagagaaccaggaaatgaaaagtgcagccggccatatgccttctctacggcctctttatgttactgtgctgatcaggacaaatgcagtacctatggtagcaatagggagagtgaaaatatgtattctccaagggaagacaattaaaagacaaattccatcaggaagatttgtcattttttgagagtgctgatcctgcatctatcagcaaatttcacataaattaattcattttacagagtgaatgctgaaacttggaagccaactgacaagatgccagggatggcatggcaaggaagagagagccttcatggcaattttgaatacctgatctcttgctttcatcatcttgtctaggggaagaaacacggagcctggtagttgggaggtgagaggcaggaatggataccagagatggacagacagtggggtggtgagaagggagctgcaatttgctaatccttgtagtactacctgtcaatcatcttgctttccttaatcatcgatcctggagagactttgaggaaagggctggtggagttgcgcagatgtgatcttcatttcagccttatgaatacataccaaggtctctttaaatctgtggttcctgcacaaagtgctgtgacttcaggctaatagagaggtccagatgtcacatgtgccaattagaaagaaatgaggaccatggctatggcccactgtgttcagaagacacgcccaagccacccattgtcattcattgtgtctaatacttgacctgtcctgctgtttattatgtggggtggctccatattttaaaaactgtattcataaaaagatatttctcatcctgctgagtctcaggcccattgttgtaggtgaggtggtttcttttgtttgatatataacgttttgctgactttcgacttgggaattgcaaaggcttacccaaaaccctgaaggaaaagctaagaattcatacttattaagcacttggtaggtgtctgacactgtagtagatatatgcgagagcccagaacaagctgatgtccatgtacatatctttaaaaaatataatgatctagtcttatctgtggaaactgcttcagatactgatcttactctttcctgttacatcagaaattctggaaggtaatatcctgaaagatttatcctcaagaataacaatacattaaaatcttctgctttgaaaatgctttgaaattgtcagtttttttttttttttttttttttttttgctatagagtataaggtaggaaatatttggcaggtaaaatgagacatcctctcaactctgtcagtttttgtcaatttctgggatgatgaaagatatgagaactagaaggctggtttagtactgactcctggtttatgttaaataatgaaatgcaagccagaaaaacaaattggcgggggctccggccagccagccattctgcaagcgcttgggattgggcaaagtgagagtccaggtcacagacaaggccggctctaatccagataactgtggagtcagcattaatgtgctgactcactgcagcgactctcaagcatttctcttaccctttaaatgcttccaagttttatactttaagtccaagtaggcaccacaggcaccatgtggacaagcaggagggtcggcctggggtcctacaataagtgataccacctcccttttgaggtggtaaaaaccagagcattggaggagtcagggcagaggtgcagacaccttcctgggacctgttgaatcctttcaggtgtacgtagctgctgggctctgagctctgtatttttttcccagccttattcttagggtctgattttattccaatcaagtctttaacattctttccttggtttcttcagtatagcacaccccacagtatggtattgtgtggggactctcagcttgatggatgctgatttttctggttctaaaaaatgttatttattgatctatctattttaatttacacctatgcagttatttatttactctggtgaatagagaacacattcttgacacggggaaggaatacactcctttaagcttctcctagcaccactgtgaaaacttctagactttttttcctcccaaatcctatgaacatgttagcgagttcctctctgccttctactcagaactcaaaatacagtttctctaatctgaaggtaggaccaaaccccatatataaaattaccagagtaatatttgtaaagacagtttcaaaagaagaaaaggcttaattgtaacttgtaaatgatggttcatgaaggaatgtagataatttataagactggtttgatttcgttggtagaaatattttcaacagcgtgtggctgaaaagttagaaaatttctatcagtcatgctttttagcaaagcatctttttactgcttttagagtcatgcacaagaaaacatgcagcttactagctataaaatactattgctccattttaactctctctttgttttgattttttctttttatttttcaaaatattattggttatagaatttgtacttggtttctgcaacatcttatgctcccctaaagaacaattcaaactatataggtttgcatagatccacagagtaggtctcacaaagacagagttatcctttgctgctggtatgtcattttgtaggcatggtagctgtggcaagggctggtgacaactgcgtagggtgaaaatgactatatgattttaaggattgtggagggacgcagcaataaatctgctctggtaggagtgacagtagccctggacctagctcggggctgtaccctatcacttactccagaataaagctgaagaccacagccaagtcttgcatatgcagaaggacacaatactacattggtgctgggctcaggcacagcactagaatttaatggaaaagttggtagttggcaccagaacaaagtagatcgggtccagagagccaaagatatgtttctctcaatcttaggagactgttaactgttgcactcaggctgctccaggaaggtagcagtgacaattttgatgatgtgctgtgtggcttattaccatttgtcttagtctgctcaggctgctataaaacataccctaagatgggtagcttataagctaaacagaagtttattgtccagttctggaagctgggatgtccaatatccaggcactgtcagggtaggtgtctggtgagggctcatactctggctcttagacagtgccttttccttgcttcctcaggtggtagaagggacaagagagctgtctgtttcctttataaaggcactaatcccatttgtgagggcttcagtcttatgacctaagcacctcccaaaaatctcacttcgtaatcccattaccttggggattagactgtcaacatgtgaattttgaagggacataatcattcagttcattgtaccatttgagttactcaactgagctcttctttgaaaactaagtctctttctaaatatcctgaacttaatagaaataacttaccttttaaagtaagaattaccctttaagaatagaataaccctctcaggctaccacgttctgacttcactagaatcttagaaagaaagagagagagaaaggcagagagagagagagggagggaaagagagagagagagagaccaaaaaaatcattcacacacgaacaaggtaaccatggtattaagagaaccataaattatttagcagtgattcatcctctaagcatgtgttgagcatgtacaatgtatagagcattgtctaaggcctgtacctatgttggcaaattaagatatgacacagaatctcttcttatgggtctgaaagtctaatgcaggggtcagcaaactacgatctgcaagctgaacctacctcctactggttttcgtacaaccctcaagctaagactgaaaaacactaaaagaagactagtattttgtgtcatgtaaacaattatgtgaatttaatttaggggtacagacactgaaataaaattttatcataacatagccatccttattcttttacatattgcctatgatgtttttcatgttataatgtccaacttgagtagttacatcaaataacttttggtgcacaaagcctaaaatatttaattttagctctttaccaaaagagtttcaatgggttttctaatggtctagaaagccattaatcagattatcacaccattaaaagtaagcatgtgggaaatgctgggaatgaatggtgtatcaatgtatgaatgtgtacaatgagatctagaaatatagtgatggcaagcagacccatggtggaattaaaaccttcatcactttttgtttaattctttacagggctcacaagagaccacactcaaggagtgatgaacaaattttaattggtaacataattctagtaatactaagtgttgaggagtttctgactgaatccctacttctctgatgttgaaggtgttgtaaggcaaagggtcaataaatcaatttagtgacatcctataatgcccaggctttcattggctaaccttggcatttattggtactccaattgaaaaaaaaaaagaaacctgacaaattcacagaatatagagaaaaatgttgaaggatacaagcttttaaaaatgagaaaagagggtgaggagtggtggctcatgcctgtaatcccagcatgttgggaggccaaggcaggcggatcacttgaggttaggagtttgagaccagcctggccaacatggtgaaaccccatctctactaaaaatataaaacttagctgtacattgtggcaggcgcctgtaacctcagctacttgggaggctgaggcagaagaattgcttgaatccaggaggtagaggttgcagtgagctgagatcttgccactgtactccagcctgggtgacagagtgagacgccat

SEQ ID NO: 2375 - DNA, 11189 bp, Homo sapiens
aggagacatacaatcaacactccactcagacaatgcccagacctccagaaaccatgtgtcaagctcggattgccttagacaggtgcaatttaagaacagctttcatcctcttttctctcatattgtcacactatgtgttctgacttctggctcctttcctcacaagaagctcacccagctggaactcttatgggaccttggcaccagagaccacaaattcctctttgaagttttctaacagcaacaatggtatttctgacttggctttcttgtatttctctcacgttaacaaaattggttcagcatctaccatgggctacatgctgagctacaggtaaggtttggctaaaggatgaataagaacccctccttgtcttcaggagtttgtctagcagaggagtctgtcatgtaatcaggaaactccagtacacaacgtgatagctctaagacaggtatatacaagatgatgttctggaccttaactgtttggggagtactactgcctttgtctaaaagccatcaccctttttatatgccatttgggaggaactggggggacgtgggaggcttcaaagggttatgggaggatggacattttaaaagggcttttcttttctttttttttttttgagacagagtttcgctctgtcgcccaggctggagtgcagtggcgcgcgatctcggttcactgcaagctccacctcccgggttcacgccattctcctgcctcagcctcctgagtagctgggactacaggcgcccgccaccacacccaggtaattttttgcatttttagtagagacggggtttcaccgtgttagccaggatggtctcgttctcctgacctcatgattcacccgccttggccttccaaaatgctgggattacaggcgtgagccactgtgccctgccaaaggccttttcaaatctaacgatgtactcacatttccacctgtctgccagcccttgtccagtttgacctgggcactcactgctgctctggtggtgagtactgctgatggttcttttccctgcccatccttgaggtgctcgcttcaatatgtcaaatgaggactctcattacatttggctgtcatacatcagccacaactgtcctgcccagaagagctggccttggctttaaagcctacatcctggctgaccttctttactgctttattaaggaatccaacttgctgtttgctatcacatgtgctatacatgctgttgatgaaactgctaaaggggctgaatgtgactgacgtctttggaaggatgagacttagcgtgcctgtacagttgtgtccaaatgctgtcctcatctcccaatgaaaagatacatgaaaagaaagaaggagagaaggaagaaaggagggcggaaggaaaggaagaagggagagaagaagagaagaaagaagcagagaaaggaagagaaaagaaattacggccagtgcggtggctcacgcctgtaatcctagcactttgggaggcctaagcgggctgatcacctgaggtcaggagttcgtaagccagcctggccaacatggtgaaaccctatctctactaaaaatacaaaaatcagcagggcatggtggtgcgtgcctgtaatcccagctacctgggaggctgaggtaggagaatcgctggaacccgagaggcggaggctgcagtgagttgagatcatgtcactgcactccaggctgggcaacagagtgagactctgtctcagaaaaaaaaaaaaagaaagaaagaaagaaagaaagttaccattagttttttgttgtatttgcaagcaaagacaaaagcaccaaggtacttgtttccttctgtaattagagtttcaaatagactaaaagtttctgctcttaggtgggtctagagactctccagtacctcaggacctcaggacacatggggtctcttggttgttttcttttcattgttgttgtttattttatttttgtttttattttttaactttaaaacaattttttgtagatgaatatgcttacatatgtttgggggtttttttgagacagggtcttgctctgttgcccaggctggagagcggtggtttaaccacagctcactgcagcctcgacctcccaaggtagggactgcaggtgtgtacactggggtgcaccaccacacccagctaatttttaaatttttttttgtagatattgtctcactctgttggccagactggtcttgaaatcctgggctcgagcaattctcctgcctcggcctcgtaacgcgttaggattacaagcgtgaacaccgcacctggccagcatgtggtctcttaaccagaggaggcctcttctgaactaggtagaggtcctgagaattgattctgagagtaaaaggctctttgttctcctcagagtagattagaatccctaatgatagagcatctattattcctctagtggtccatgcccaacagattcatccaagaatagatgaagatctttgtaatgttgtgcaagtaatctaatcaccccacagaagagctgtgacttaaattatcccagagtcggcccacctgttttcataaagatcaatgtaacttgtaaatttcttcagttctcctcacctatcatcatttgactaacaaaacccagaaaactaggctagttatggtggcctatgcatataatcccaactctttgagaggccagggtgggtggattgcttgagtccaggaattcgagaccagcctgggcaacaaagggagaccctgcctatatcccagctatgcaggaggcgaggccagaggattgcctgagcctcagaggttgaggctgtagtgagccatgattgccccactacactccagcctggatgacagagtgagaccctgccttaaaaataataataatagtaataatatttcataaagatacaggaaactagattataattgacattttcaaagtgaaatactgtctagaatggtgcttggccaacagtaagctttttgtaagtggaagtcattactactactatttctttcattattattaccattactacttttttttacaaaaaaaaaaccctggacaacacactgaaaccattactacttctactactataacttaggttgcacctgatagagccagcaatttttccaaggtatgacaatggccatatgtttaatgatataattctatggctcagtgtatctcagcctttttaaaccctgctcttcttttgacaattgtaaaaatcttaaactgacctccagttgaaatcctctgtcaagaagatattgtcggccaggggcggtggctcacacctgtaatcccagcacttttggaggccgaggtgggaggatcacttgaggttaggagttcaagaccagcctggccaacatagtgaaaccccatctctactaaaaatacaaaaattaggcaggcatggtggtgtgtgcctgtaatcccagctactcaggaggctgaggtaggagaattgcttgaacctggcagggcagaggttgcagcaagccgagatcacgccactgctctccagcctgggtgagactgtctcaaaaaaaaaaaaaaaaaagaaagaaagtaagaaaaagaagaaatcccaatctcttcttttatgtggattcttcctcacttgaataatacttttcttccccagtattctccatattatcccagagtcagcccctctgtttttgtaaagatctacgtaacctcctctaagtttcccagttctcctcacctatcatatcatttggctcaacaaagggcaggaagctagattctaattgatattttgaggccgggagcagtggctcatgcctgtaatcacagcactttgggaggctgaggcgggcagatcactggaggtcaggagttcgagaccagcctggccaatatggtgaaacctcgtctctactaaaaatacaaaaaattagccaggcttggtggcttgtacctgtaatcccagctactcaggaggctgaggcaggagaatagcttaaacctgggaggaagaggttgcagtgagccgagattgctcaattgcaccccagcctgggtgacagagcaaaactccatctcaaaaacaaacaaacgaacaaacctgatattttcaaaattgaggcaattataacagctatttagccaagcattatgatagcaataatagcaagaaaataaattagttaacaaatgagtctcagaagcccaatgatttttattttatttttattttttgaacttttattttagaatcaggggatacatgtgcaggtttgttacccgggtatattgcatgatgctgagttttggagtatgcatgaatccaacctgtcatccaggtagtgagtatagtacccaacagatagtttttttaacatttacttcactcccttccccaatcttgtattcccctgtgtctactgttcccatttttatgactgtgccaacaataattttttttcttttttctttaaatagagatgggggtctctatttaaagagcctcccaaagtgctaggattacaggtgtgatccattgcacctggcccatgccaacaatatttgaaacccttatctgcgtgtacaagtttgctactggttttgttttgctcattaatacatcccaagcatctatacctggcttgtagtaccagcatgtagtaggtgcttaataaatatttattgaataaataaattagtttgacattagtttaacatctcaagtaaaacaaaataccattcaattaattctcttcttctacttttttcttttaagagagacaaatagtcacacatacatcagcaggagaggatacaatttcctgtgtttaagtttttatgagttactttagttcaaatgtcacagaaaattatattgaactcttgaccaatctatctattttttccattggagtattgacccaaataagaaatagcataaaggaaaaattattttttggcagaaaaatattctctctaaattcttgtgtgttttgttttgattttttccttagtgactggaggccagtttcaatccactgaagcacagattccaaattttcaatctggttttcttgagtagtgactgagtgccaaaaatgaagcaatgacacaacatcaccatcaagacactccccagcacgcacacacatgccagagtccaacaccaagatactccccagcacgcacacacacgccagagtccaggccatattcgggtggcttgcaagcttcttccccccaagtatttactctcaaaataatggtttttgttttgttttggtttggtttggtttgtttttttccaaatacatttcttccctatatctttaaccaattctcataaaattttgtctaatacactggtcagtgtattccagaccctaaaagataacataatgaaactatctatgactaaaaggtaatcaggatcttctacttatccttttttcctccctcttaaactttaattttgatacatttgggagtgaaatgatgacaataaatgcaaagtaattattgaagaaacagtaattttgtattagcttactgaaaaaaaaaaaaaagataaccaaatatattttggcagccccaaacgagtcacatgtgaaatgcagtgggagagcagtgtcctgaaggaaaaggtggcctgctggacagccaagagaacaaacatccactgcaagtaatatgagctctaagtttggactaggcctatgtctgctctgagacttggggcaattcacttaatcagagccttaatcagctacggactagcaatatccatacccgctacttattttgtaaatctcctttctaaagttaactctatttattgttccataatcccataaattctagaatcttttcctgttatagccaagttgtctatcattgacagagatattcacctggttgttttggcttctctaatcctcctggtgagaacacctccaagggagctttcagtggcatttaaggtcacttgtgctcttggtcctagaaactgccttgatagtggttttagctcacatgaggtaagtctttattatatgcccaacctctttatgcattacttcatttaattgtatactaatcctttgtcataggttatcagagtgtttgattataagttacaggaagaaaaaaaaaaacaaactccaattgactaaaacaatggggcattttttgactcacataacagagagtctagagagaaggcaccttcaggtttggctgatgaatcctgtatctctgccttgtctccaggcccccaggttctgcctctgtcctgacatccagtgttggattcctcttcacatcaactcctctctgtaggttgggccatcagaccctacctccttatttatgttgagcaaaggagagagaatgcctctacaaacaatgaaaaaagtgaaaaaaaaaatctttctcctccttataactttagttagcttaactttagtcagttgcttagctactaaacagtagctattgggaggtgggaaggaatactattgtgtaatcaactaaggctcatacagaggattagggttatctgaattgatttgaattaattagaatttactctcagagctgtggcaattccttgaaccacactgattgctataaagtggaagaggaatagattgaattttggggagtcaactacaatgtgtactacaggtaaatactatgaatttccaattcacagatgagaaaactgaggcatgtggtgggagggaggttatgtaatttgcccagtgtcacagttgaacctaggcaaaggcctatctccaggtctaaacaattcagtggcctcctgtgtacatttctgtctctccttttttatccactgtgtcaccgaggctggattgcagtggctcgatcatggagatcatggctttctgtagccttgaactcctgggctcaagtgatcctcctgcctcagcttcctgagtggctgggactacaggcttgacaacacacccggctatcccgtgtatatttcttgagggcttatgatatataagagaaactccaaaataagaggacggtgtgctaaggggaagaccaaagcactatcaagaggtagattcaatcgtaccccttctatttactagttgtgtgactcttttgaaaatgagaataataggccaggctcggtggctcctgcctgtaatcccagcactttgggaggctgaggcaggtagatcacctgaggttagaagttcaagaccagcctagccaacatggcaaaaccccatctctattaaaaatacaaaaattagccgggaatggcagcatgtgcctgtagttccggctactcaggaggctgaggcaggagaatcacttgaacccaggaggcagaggttgcagtgagccgagattgcgctactgcacttcagcctgggtgacagcgagactccatctcaaaaaaaaaaaaaaaggaagaaaagaaaagaaaatgggaataataaaacttacttactggagcagtagcaaagattaaaatttagaccatgcagaagaatgtttttcaaaatgacatgacctggtaataggatagaaatgcaaattcctgttactgcaccagacccaccaaataagaaactctggggatgggacccaggactaagtactttaataagcactccaggtgattctaatgattgttaaagtttgagaaccactggtctaacacattgcctggtacataagctcttattttgttgttattgttctaaggacaatgtgtgtattgacttctatttccaggagttcatgacttggagaactagggaaaggaagacaaaaattctttaatgcagaacgatactgattgataaatacctgaatataatacaggttaaatgtgctttgaagatttataaaaggttgaatttatttccagcaagatgactctcagaagcctttatagattagagaagaaatggaaaggggtaaaaataattaggaactataaagcagggcagacaagttttcaatggttactgccaatgtgtatacagaaagttagcttggccaggcaaagtggctcatgcttgtaatatcagcactttgggaggccaaggcgggcaggtcacctgagatcaggagtttgagaccagcctgaccaacatggtgaaactctatctctactaaaaatacacaattagcccagcatggtagagcatgcctgtaatcccagctactcaggaggctgaggcaggagaatcgcttgtacttgggaggcaaaggctgcagtgagctgagatcgtgccattgcactccatcctgggaaacaagggtgaaactccgtctccagaaaaaaaaaagttaccttgaaatatatcaatacaaacaaataaattagatatttcatattgtacaggaacaaaacccatcagaagatgtcagaagataaggatttttgtcctgatgctacacttaccagctgtccctcagtgttctacttcttaaaaaaagagaggttggtcctgatccctggttcttaaccaggggaaaatgaagtggggccagggcatgtgcagacttaaaaattacacaggggaatgtaggcacgatctgtttaagaaatactggactaaatggtctctaatctgtgattgtagattaaagaataatctacaatctacaccgtgttggccaggcacggtggctcacacctgtaattccagcactttgggaggctgaggtgtgtggatcacatgaggtcaggagttcgagaccagcctcaccaatgtggcaaaaccccctctctactaaaaatacggaaaattagctgggtgtggtggtgcatgtctgtagtcccagctactcgggaggctaaggcatgagaattgcttgaacctgggaggtggaggttgcagtgagccaaaatcacgccactgcactccagcctgggtgacagagtgagactctgtctcaaaaaaaaagaaaaaataaataatcaaatgtaaagttagcacataaaggaggcatgtacatattattaaaatctatatgactacctctcctttttcatttttggctcaatatctgtatctgaacacctaattaatgaaaggaaaacatttgtaatatgtagcaactaaaatgtcaccttctctgtggggatcacaaagtccttggcaatcacttccataccagacaagtgagtattgtccttctccttttccagatggataaacagaggcaacccgaggataaaggccttgctcagtgtcacacatttcagtcactaaataagacacaatggatgccagtattctcatcccctcacaaataaagagccttcaagctcttgcagtcaacaagaacttttggaatgatttcactgcctgaaaaggcagatacataggtgacacccacaaataggaagaaaatcaacctgaacctgagtgtgtgggctcactgactctaagcagtagagacagaagaaaaagttttagcaaagaagggttctgaaagaaaataaatatagctcgttatcaagtgctgtttttacacagtaaaacatgggcaaaattactcttctttaagtagtaattcttatctcttgattaagtcacctactcattcatttaataaatacatactgattgttttctatgtgttgagcactcatctctgtattggaaatataataatgaccaaagttgacaatagtaataacaataatagctaatatagcaggcactaataattatttgttgagtaatatgtcaaaattcagtgtgaacagcattctatttggggctgcatccactgactataacacagctaatctatctgaaatgttccagctttgggcctctctaacagaagaagctgttgttgggcctgcctctagttggcgatgcatccaccaatgagaatgaatttatgatcgaccactcttcctgtaaaggccgctggaactgacagcattgtgattttcttttactgttagttttaaattactagaaccaactcaattactagaacgaactttacttctttgtttcctacttatcaaaacagtaaaaacaacaagtaaaagaaatgccatcttaatattgttttgatgacaaaacagtattccttttagttgtgcttcaaatggaataagatgcaaacaggcttggtatggtggctcacccctgtaatcccagccctttgggaggccaaggtggaaggattgcttgaggccatgagtttgagaccagcctgcgcaacatagcaagaccgtgtctctacaaaaaataaaaaattagctgagtgtagtggtgtgtgcttgtggtcccagctacttttgaggctgaggagggagaatctcttgagcccagaaggtcgaagttgcagtgagccgtgatcgtgccattgctctccagcttggacaacaaagcaagaccctatgtcaaaaaataaataaataaaagacataaacatatctgagattaactttcagtggtaaatttgttccatatatgatttttaaggttaaatgctttggaagctttaaaaaccatttcagcccttttaaatgccaacttacactgatgatgctctcagatgttaggaaatcttttgagcagaaaatggaagtgggggtgttgaggcagggaggagagtgatgcaatattccttagtgtcatcctgtgatttcacaatttgtttttcaatctgtttggactttcaaaagggaagactctcatatgtcaacaagcccatgaactgaagcttaaaacactggaaacaacaactgtagagtttcaagtatatgtacatttatgtattcatgttccttgatgggaatgctggctggtgtgaatgttcaatctcctgagaaatgtaaatttttctctgacagatttattagcttgctgtatctgagcacatgagcaaaaacaatgcctaataagaaaactttctctctccttcaaagtcaaacttgggagaaatgaagggaaatcgagttttctttgcttgacagtgttcaacattcttgtagtcagtgtgctcatgaagattgcaaacttttttttttttttagagcagctaggactacaggcgcgcaccaccacacccagctaatttgtgtatttttagtagagatggggttttaactatgttggccaagcttgtctcaaactcctgacctcaagtgatccattcgacagc

SEQ ID NO: 2376 - DNA, 1181 bp, Homo sapiens
gccggctcctcggttcctgcgagctgttgtcatgggggtgggcgggctttcttcacagccccagaacctgggctttggcagaggtccggacactgtttgtcagcggcctccctgtggacattaaacccagagaactctacttgctcttccggccgttcaaggggtatgaagggtccctgatcaagctcactgcaagacagagcctgttggttttgtgatctttgacagccgtgcaggagcagaagcggccaagaatgcgctgaacggtattcgctttgatcccgaaaatccacagactctgaggctagagtttgccaaagccaacaccaagatggccaagagcaagctaatggcaactccaaatcccagcaacgtgcaccccgccctaggagcacacttcatcgcacgggacccctatgacctgatgggggctgctctgatccctgcatccccagaggcctgggccccctaccctttgtacaccacagagctgaccccagccatctcccatgctgcgttcacctacccaactgccactgccgctgccgccgccctccacgctcaggtaagccctttaaggttggggagggcgaagaacaagggctcttagctggccagactttgcatgtgcctggccacttggccgctgctgtcccagagctgcagcagaactcttgtcttccttgatggtttgaaagcccagaccccagggacctatttgtcctccccttgggtttaggatttgacagggagggagaagataacccacgagttcccatggaggatgccaggcagcccagctgtggttccccagccccaagcacccctgcccaggcaccgactatgttctcccatggtgatgggactatgattccagtcctaacctgggtatggtctctggagtcagaccatctgcctctgccccttcctgtccctttcatcaagctcttacagattgctgtgcctcgattttttttttttagtcatctgaaaaatgggaatgatcagataatctgccttagggttgttgtgaaagttagatgtcaagacgaagtgactactgagtgctaggatgtaacctagagcgccctgagtgttggctctcgcttccatgaaggctggacgctgtccactgtgaacctgtgccgggcaggaaacagggagtgaatgcttctggggag

SEQ ID NO: 2377 - DNA, 30044 bp, Homo sapiens
atttttttgaacgaagcatgagagtgataaaaagtgaatgaaagctcaagctcagatgtaaggcatctggattttaatttcgattctatcatttactagctaggacaacttcataacttccctgagtctcagtgttctcatttgaaaagcactaattacgctaaaagaataaatacaatacctgctttatattaatagaactgttatgaagatgaaaatagaaaatgtatgttaagtcctcagcacggtgccccccaatagagtgagttacttttcatattgtccatcatcactgggaaggaaaaaatgcccgagtgagagctctgtggccccttggtcagtgctggtaccgcctgctcctccctcctcccccatcactgtgaaaaactctgaaacagatgaaatcagtttttggttcctcccttgagcctctgtagccctcccctacttattctatttatctctgttccactgtaagatccctcatttcaacggctcatttctgcggagttgccaagtgtccttcaaggggtaacagcacagttgaggagagatttgcacattaaaatggattcagcacatggggatcctcacaccggaggttcctacctgggtttacttcccaactctctgccctatcacctccttcttcccccacctcaaacagcatcaccctggggcacctctcaacagaggacatgaatgaagacttggtaccagcttggccaaccctagcactttatgaattaccctaaatggatccatgcaggaaagttggccagtggtcttgctcatggatttttttattgcattcttggtcccacgatgccaacacccttggttcccttggttgtgtacagctgccttgattttggaattccccatttttgctttaataagatgtttcttattccactttggacactggtctaggtctacacctctacatagtagaaagagcaaaccctggattcatttaccaggttgaggccttcgatccagaagacacaagccgaaacattcccctcagtgaagaaatgagccttgggaataccaggacgaatatatatagtctacagactctgaaacaaagctgttataaaattattggatacaacttaaagtaagggaatagtctgtttttattagaagatgatccttctgtgtaaaaaaaaaaaatcacccattcattcattaactcattcattcatgttaatatttgcatgaataaatgaatatgcaaacatttaatgggtgtctatgtgttaagagcaatactaggtgcttgaaatgcatacttcttaataacatacttctcatactagttaggaatgtgtttgtctgcaaataacaaaacttaaccatgggcgtgtacatgggaactttttttcttctctaataagtctagaggcaggcaggcagttcagcactggtgcatctgctaccatcaggagcctgggctcttcctatgcttctatttttctaaccagagcttgtttgttggcactgtcctctttttctcacctcatgattgccagatggctgctgcacctcccggatttacctcagagttccatgcaagaaaaagaaagaagcaaccagggagggatacaggatagagcaggcaggcccaatctgtccctttttttatcaggaaaacaaaaactctcttggaagccctacccagaggacttctgctatatctcactggccagaactgtgccctatggccacttttgcttactgatgaccagggattcttaatggagataaggtcagaaacccaaagtatagcacctcacttacatatttagttcatttcaacatttacaaagaactctctatgtgccaggcatcctattagatactttggaaacagagatgagtaggacacattgacctcaggaagcgtaaactgaatggcagacattcatgcgtaggggagaaggaacagcttttcctcacttgtcaaaaggtttacagctgacactcctataacaaagaagagattaacaagaagagtaaattaacaaatttatttaaccaaagttttacatgacgtgggagggcttcagaaatgaagacccaaagacccccagggaaaactgtatttttatgctgaagttcaatgaagaatgggcagtcgtgtagaatcgtaactggacaaaaaggggtatgacataaaggtaataaactggggaaacttagcaaggccctgtttgttcagattcttcttggtctctggttgtagggtctggaatcctctagaatcaggttcttatgacctacttttaggggtggtaggtcagagaattcctttatgatcatgcttcaggggagaaagttgggagaaagagtgggcttcctgcttctgagaaggttttcttcaattgccaagatgtcatattttggggtatcgtgttctgatttctgatacatgcatacactaattataatccaatatgacaattactataacgtttgtataagaaccagtgggggaaaagtggaaagaatttcagttgtgaagacaaacatatatttgtttttaaatctccactttaaatgtatctctccaaattatgcagacagaataaggtcatggcccctttaaaaacacctcctagatcaggtagctaccctttcagaggaaggaaagctgcccaggtaggaaacaactgcagcaggtgttgctcccttcagaaaaaaaaatgtagtgccatcaaaagcattctgagagcagctgcgggggcttgtggcttctgcagtgagttgaggagttgtttggggagggggtactcagagttgcagcagaaattgttaatgaaatatttaacacctgtgctggaactaacagctgtacagaaagtcaacagccagcctgcaggagcggtggacataatctggaagaaaactttctcagattaggaaaaggtaataacagtttaggacataacatattatggcctttgtacttagacgttttattctgggtgcttgggggtactaagtagaagcaaatgacatcgttaggttcgtaaaagtagaagggaggtgggttaatttgctactgaccaacctgtgcttctcaaccttggctgtaaattgaaaccactgggggagctttaaagaacacggatgtctgtgtcccaccctgtgaaagtctgatgtgattggacttggatatggcctgggcattaggactataaagcccccagggaatctaatgtatggccaggggtgagaactgctggtttgccacatcatctcccaaaatttccaagtcccactcctggagttttcgagtctgagtctgcatttctgcattgtctgagaacaattttgcatatttggcaaatatcttaggcaattattctggacgaaaaggctgggaacactggtttgtttatttttgagacagggtcttacctctatcacccaggctagagtacactggtgcaatcacagctcactgcagcctcaactttcctggctcaggtgatccttccacctcagccttccaagtagctgggactacaggtgcccgccatcacacccagctaatttttgtattttttatagatagggtttcgctatgttgcccaggctggtctcaaactcttggggtcaagccatccacctgccttggcctcccaaagtgctaggattacagacatgagccaccacacccagtggaaacaccggtttataagtgttttgcaggctttagaagtgtgttcaggcattagaacatacttaggctgattttaaaaatgcagattcctggacattgcctgagaatgctgagtttgaatacaaacctccccggtgattctgatgtaccatgtacttcaagaaccactggactgaacaaacaaggacagagtttaacaaaacactaaagcacatgcctgaagcgacctaggcttggtttgtgtctgtcatcttaacctggtggggtccacgagtcaccctgctggtggcagcaactagagaatgaataatggatttttaaaaatagctataggatgcattttgaaacctcaacccctttaaaatgacaaatcttacaactcttctccagcttaataaagtgaaactgtatcacagttaatgaaaaacaggtactaatctggaagccacttgtatttgctcccttctttttagtgaaacttaaaaagcatgtgctggtacattgtttggaccaacactgatcaatattggaccggctctgtccaataaagctatactgtgagccagaaatgagtcctgcacatgtaattttaaatgttctagtagccacattgaaagtaaaacaaaataaatgaaattaattttaatagcttatttaactcagtatactcaaaatatttcagcatagtcaacataaaatgattaatgagatattttgccttctttttccatactcggtgtccaaactcagtgtgcattttacacttacagatcatctccgtgcagaccagccacatttcaatgctcatagtcacacgtacgtgagggtagtggctactgcattggccaggcacaggcttagatctagcattggttcccccttcctgggcaccttctgtgttgtggtgggcatgcaggtagagccggggcttggcttggaggtatgcattaataatgggctcagaacatagagaaggatgatctgcatgtgaataattatttttactggcatttcttctttgggtacccacccccccacctcttctccactttctgaaggaggctctttgagaccaccctcctcccattcaactcccacactctctgcttccccctctgcttggaaatggccaccgtgactgcagaagagcctccttggagactcccaggatgttaatcaatctctcagctggaggcaaaatgatctagtacagcaatttctccattaaggggctttcttttggcctttccattgaggaagggcttttgcataaaatgaaatgtgctttgtcttcaccaaggcagacaaaggattaaattaagagagcaataacctagctactacctggacttttgggagcgcagcaggggccatccttctctttctgtctttatcttgctcatagctctaggaagtggcagccagttgtgagttttggttttcctgtgtataaagtggtcatcatatgccagacctggccctatcaagggtcccagctggatgggatctttcaggtccattgggcagtccttgatttctggatgagggagggaactgaggggtcaggtaactccagtgagaacccaggtctcctgacccacctcccttctactctgttctggcaagttctgccactggcttcctaccccttgcttttctgagtgacagcatccctgtccccaccatacacccccacctgccccagtcattcagctcccctggtgtctgcctgccaactcaggagtcaggagtcaccacctgaagtcttagcaaaaggcattcttcattctactccaggttcttgttcaaaggctcataaaaggaaaaagcaaaggtactggacaattcccactccaaatatgtggtcactgctggctgtttgcatgtggggtgggacactctcaaatagatggggatcattgttattaagattagcaaagcctgaatcttgcagcacagaacccaggccaattatggaaaaagaatgacagaatgtgagggcataggatctgcagctttatcggtgaaggattacattaataatagcattttgcatttgtcatcgtgtctcttcttaaaaacattcaagtacttgcctgtaacccacttagctcatcctcagaacaatgaaccacgagcaggagccacgttaaggacttgcagtgggtagttttttaacgatagttttttttcttctaggcactcttcctccttcctcctccacgtcccacctctgagctgagacgagggtggaataggggaaaacaaagagaggaattgaggcttttacaaaatattcagcttccattgaaaaatataggaatgtggcaacatatttgtaacttgccacagtcctgagtgctctggccctctggggtgggtttggggccatgtactcagtggcttgtggagccattgacactccctggatgtgggccgaataagggtctttccttctggaaactcagcctgcggtggcctggtagttgactgctctattctataaaagacaagaagctgaattcttgttgtttgtttctactgaaagcaactgatagctgcaaagtggcacaggttgaatcattggtcggtgactcctactgcagtggggaagcaagcctggaggtggcgttcccctcgtaccccagggagctgacatttctggaaactgggccagctccctctcaccttcctttctccctacaccaaggcacaatcaagggtgaatggggcaggaaggatgggcttcttgtcttccaaactaaagcttttgtgtctgagagcaaacctagctgcaaaggggcggcaaatagagaaacctggggtggtggtaaagaaatattcccagcaggaaaaccagagagcttgtctgacaagcatttgttaactgaattgatctgattactcaggacttttcttagccaggactgggggcagagaggggctgcagttgcttttcattctatttaatttctgttttccaagaatgaatatcaagggagcagctttgattaaacaagcctttaaaaagggggagaaaatgccaggttttacagagagccttgctgagtcgctggcaaatggccacatgacacaatatttttagtctttggatattatctcctctctaagtacaaaactgctattcccattaacacagctcttaggttcagagaaaaaagaaattagcctggtgttaaaaagaaaaaaaaaatcaagattccaggaaatcatcctcttcatagaaattaaaaagaaaattctcatgtgcctagttctacagttctccacatcctttttatctgctgctgtttttcttttttcctttctttcctttctgcataagttgttgagactgtgggcccaactggagaagattttaaagccaagtctagcattattacattcaaatatttttaaaaaatgttttacaggatggttttttgttgttgcttttttgttttaagattctctaaggtgggaatgttggtcttactaagatgggaaatgaacaagaagaaaaccccaatatttaacatcgaacaaatatttattgagcatctattatgtgctagtcactaaggatatagcagtgaataaaatgaagccctttccctcatggatcccttctaatgggacagcagtagttaacatttattgagggcttgccatgtaccaggcattgttctagcactttatatgataacccgtggggcatgccctagtattattactctttgcaggcactcacatggctacaaagtgatgaaccagggttcacatccaggtattctggctccagagtcaccaaacttaatttattaccctaatttgtgactcttgtattccagatgagtctaagagtccttcttctcagttcccgtcatatcctgtatgtatcccctttggagcacctccccaaacctttgttccctcggttgaccataagattttggagtgtagggcctgtctgcattctctgtatcccaaggccttacagtgcttgggaccaaccagaattggagatccagctcctagagcatttcaaaacacatgtggaaggacgccctgattcaggtacatacagtaaatctcctccccaacccatgagtctctaaaaccctgtcattctatcatatgtagcttaaggtgctgatttatggatatgcgaggattctctgcagggaaggctctgctcaaagacagaggactgctctgtgtgtgggcaacttcaggcctaggcaattgctgtcaggccgtgagctggagtgttaatggggggcttgggatttaaaccccacacctgggagtactgccaaggtgcttgcacaatctgtggggctgggagaagggtgctctgtggcatcacccaaatatttccccttaaaaatgagcagaaaacacctaaatgatcagcaagaaagatttagtaaaataaacccctgtggtaggatgctgtgccatcgttaactaaccaggctataaaataagacttaagaataggggtaaatgctcaagatataaacacaatgaacagatattataattttgatgataacatcattgctatttttggagggtatacgtttgcatagaaaagaacagaaggctaatcaccaaaatgagatttaataggtggcatatttcatttcttttttatacttttctgtcttcctcagttttgtataaaatatggtcaatacaactagaaaaacattattaaataataaacaaaaggaaactttaaaaatggcttaaaaacgttatattggcctcaaaggagacctttaatctattttctgtgcacactgtcttcttgtgctgggagctcagcagcgatcataacacagcaaatcgctgggttggaaaccttggcaggtgtttcctttgattctagacttcaggggctgtggctgtggttgcaaaacctccactgatgatctgatccagagatctaaggccttgaggatagaacatccctcatcctagcaggaaataatgaaaccttctaaccttaaagccctttggaagaaatgaatataaacatgtgagtctctagcgttgctgcgatccttcatattttacggcacgcattctcatttaatcctcaataacatgaaggagcaattggtcacatcagccctaagttataggcaagaaaggcacttgtcccagatcttgtggtgaggaccagagcttaagctagacgcagtggctcatgcctgtaatcccagcactcagggaggcagaggcaggtggatcacttgagctcaggagttcaagcccagcctgggcaacatggtgaaaccctgtctctacaaaaaaaaatataaaaaaaattagccaggtgtggtggcacacacctgtagtcccagccactcgtgaggatgagatgcaagtatcacttgagcccgggaggcggaggctgcagtgagccatgatagcaccactgcactgcagcctgggtgacagagccagactctgtctcacaaaaaaaaaaaaaaaaaaaaaaaaaaaagaagaagaagaacttggaccttgaaccaagctcttctgatccaggctcttcccctgttttcttgactccattgtggaagaaacagagcaatcctgatgggctgccatgggtggcacgggcatggtcttcctatgggctcaccctcagcgggctgtacacataaacctgtctcttcctatcagatcaaggagatctgggcagggtgtcatcaagagagctgggctggaagcctatgatgacaaagactctcaactacccaaagatgtaggaaggactttccttatgccacgtgccagggattagatttcaaaacagctcttctgaatccctaaactggcttccaacctggactgtaagccctgttatgtttcattctcagctcacccttgtcccttgttccttcaggcatttcaataactgatgctcatgcattttgcgccctgctatattgtaagttgtttttaagggtagtgaccagatcctactcactttggtatagtcctattacctagtgggtagtagctgtattaaataggtaataggtatagtcctattacctagtgggtagtagctgtattaaataggtatagtagctgtattaaataggtaataggtatagtcctattacctagtgggtagtagctgtattaaatacactgtatttaaatacagtgttggttaaagccaaggcatagaatcaaagccagaagttgtccaggagtgagaacacagtgatagggataagaagattggactcagaagcagagcctgccttgacaggggccttttatatgctttctgtagttagaacaagatccactcaccagcttttcagggtgtggtcaaccagggctcagaccaacagagccagaagtttctgtattcaagagcgattaaattggataactgctctttgaaccgcatcctgatgcatcgagaacgttccatgggctaagaacataaaataggaaatgagcacacacatcttctggggaagggtgggcaggtgggctgatttcatcaatttttttcccttgttttttagtatttcctgatttctcccccaaagagcttcagaatgtctgctaatggcaccctcttctccacaacagaattggactttgaagcaggacacagaagtttccatctcatcgtggaggtgagggacagtggaggcctcaaagcctccacagagctccaggtgaacatcgtgaacctcaacgacgaagtccctcgctttaccagcccgacacgagtgtacacagtcctggaggaactgagtccaggaaccatcgtggccaatatcacagcggaggatcctgatgatgaaggttttcccagccacctcctctacagcattaccacttgactggtacaatccaagtggcccaaaggatagaccgagatgcaggtgaattgagacaaaatcccaccatttccctggaagttctagtgaaggacagaccatatgggggtcaggagaatcgcatccagataaccttcattgtggaagacgtcaacgacaatcctgccacatgccaaaagttcaccttcaggtatgcacactttgaaagttgggctggacattctatctctttggtggccctctgcccttctgcttctctggtatattctcaggagaattataagcatttggagaaacagctcagtagaataaatcgatgtgaactgttcactgttgtccacaggtttccttgttatcgtccttttttcttccctctctttcattttccttcttcattatctcccttgttcactttcttactcttaagaattattttttattttgctcccttctatatctggctcatctctgttggtgaaaaggaccacagggacttgttaggccctccctggactgtgcctgttctttgtttattgccacgggtggcaagatggggctgttagttagcagttataatagacgtttgagacttaggatcagtgaataggaactcccaggaaaacataccaccagccagatgaataaatcaaaccaagtacttaggtaaaaccaaacaaagcatcgaattcaccttacacaacttaattgaatataaacaaaagacatccgaaagggaaaaaatgcagatacaagtgggatacaagtgatcttgtatattttgactcattctttgtcctacaatctatttgctattattttacaataaagtcccttgtgattctgggttaataagctttttgaaaacaatattgtctttctactattttgtcaaaaagccacatgattagtacttgcccatattagcctcgtctctgaggttttgttccagccagtctctggtctcctgagaggctgaagagggctctttgggaggaattggggttgtggggagcaactccacagcagcccttgctaagagacagccctgtatctggagcaaggctgaagatcagggtgagtctcagctccagatgtccccatggggagagtctcctgagtttatctttgagtggttttgtaagttttctccaggcgactctggacatagacccaatacatgcagaggacaaaggaccctagaccaggattgcctaggagaagcaggagaaatagaaattcctttattatactcatgaatgtctccctgttgtcccaaatggcatgcccagtataatgttaaaggatccatgtgacctcgagtctgatatcaaaacggttaaactctgttctggatgcacccctgacttatccctttagatccagtctccaccctgctctgtgctccaagacgctgacctggatggataccgtattagactgttttcatgctgctgataaagatatacctgtgactgggcgatttacaaaagaaagaggtttaattggacttacagttccacatggctggggaagcctcacaatcatggcagaaggcaaggaggagcaagtcacatcttacatggatggcagcaggcaaagagatagagcttgtgtagggaaactcctccttataaagccatcagatctcatgagacttagtcactatcacgagaacaactcaggaaagacttgcccccatgattccatttcctcctaccaggtccctcccacaacatgtaggaattcaaggtgagactttggtggagacacagccaaaccatatcatcctgccccagcccttcccaaatctcacgttctcacatttcaaaaccaatcatgccttcccaacagtcatccaaagtctttactcatttcagcattaactcaaaagtccacagtccaaagtctcatccgagacaaggcaaatcccttctgcctatgagcctgtaaaatcaaaagcaagttagttacttcctagatacaatgggggtataggcattgggtaaatacagctgttccaatgggataaattggccaaaatgcaggtgctacaggccccatgcaagtctgaaatccagcagggtagtcaaatcttaaaactccaaaatgatctcctttgactccatgtctcacatccaggtcacgctcatgcaagaggtgggttcccatgatcttgggcagctccattcctgtggctttgcagggtacagcttccatcctggatgctttcatgggctggcattgagtgcctgtggcttttccaggtgcatggtgctagctgtcagtggatttaccattctggggtctggaggacagtggccctcttctcacagctccactaggcagtgccctactagggacttcgtgtggggactccaatctcacatttcccttctgcactgccctagcagaggttctccatgaggggccacccctgcaacaaacttctgcctgggcatccaggcatttccatacatcctctcaaatctaagcggaggttctcaaacctcaattcttgacttctgtgcagccgcaggctcaacaccacatgaaagctggcaaggcttggggcttccactctctgaagcaatagcccgagctgtaccttggccccttttaatcaaagctagagcggctgggatgcagggcaccaagtccctaggctgcacacaagagagggacccagggcctggcccatgaagccgtttcttcctcctaaacctctgggcctgtgatgggagtggcttccacagaggtctctgacatgccctggtgacatttaccccattgtcttggtgattaacattcagctccttgttacttatgtaaatttctgcagctgtcttgaatttctcctcagaaaatgggattttcctttctatcgcattgtcaggctgcaaaatttccaaacttttaagctctgcttccctcataaaactgaatgcctttaacagcacccaagtcacatcttgaatgctttgctgcttaaaaatttcttctaccagatactctaaatcatctctctcaagttcaaagttctacaagtctctagggcaggggcaaaatgccaccagtctctttgctaaaacataacaagagtcacctttgctccagttcccaacaagttcctcatctccatctgagaccacctcagcctggatttaattgtccatatcatgaacagcattttggtcaaagccattcaacaagtctctagggagttccaaactttcccacattttcctgtcttcttttaagcccaccaaactgttccaacccctgcctgttacccagttccaaagttgcttccacattttcaggtatctacagcagagccccactctattggtaccaatttactggattagtccattttcatactgctaataaagacatacccgagactgggcaatttacaacagaaagaggtttaatgggcttacagttccacgtggctggggaagcctcacaatcatggcagaaggcaaggaggagcaagtcatgtcttacgtggatggcagcaggcaaagagagagcttgtgcagggaaactcccccttataaagccatcagatctcatgggacttagtcactatcacaagaacagcacaggaaagacttgccaccatgattcaatttcctcctactgggtccctctcacaacatgtgggagttcaagatgagatttgggtggggacacagccaaaccatatcagataccaaccaactcccttgccttccagcttctagttggccaatggggagtcctggaaagagaaggagaggagggtcaggctctctctttgtgagctgggtgcatcccttccctgcctgaagatctccattcccaaaagcagctctctgtcgcaggacctgcttcctccactggcttccctgggcctagtggtggtaagggtgcttcactctcacgagccctgagatattgcaccatctgatgagatttccatatactctgtgagcaccttcttcatagtccctttactgacccctcctagaatgatcctaattcaccagctgcttcctgctgacaccccaataacgtcagtcacaatcttaagcatgtagtaggttcctatcccaacctaagccctacaagtccattagatgggtggggacagctgcatgggtagttaggattgtgacttccacacctttacgtgcataaattgagagatgtctgggcccaggggatggagtggagacaatttgcagcatcacacttacactttctttgacattttaaatctgtgctagaactcttgggtggttccagtacatcctgggaagctcctgccctcttctgccctcctgctcttccttgttcctctgccctaagaggtagggggtgaaggttaagaagtgagaatgcctggagagggctgtgctgtctcaaatcttccttgtccattttctctcttcagtgcatatctgttaattgtatatttggcttcctgcagtccagagtcccctggagtatgggaggacagtttgcagactgtgttccatattagctggtgaaactgcaattcgaatatcctagactgtccaggcaagaccaaacagagtcctgcacttgataatcttccctccagattagccctgaaggccaatgtgaaatccgtagctggactaactgcatttattactgaagataatctaaccaaggctcaagttccctctttgggctcttctagcgggaggaactctcagccaccctatgaacgccaagatgtgaggaagggcaacgaaagggacccctcctctgcagttccaggggcggaggtcttcagcctaaagcccagcctcgcgtcccaaggctgcataagggcgggtgcggagagggctgagaagccctgacctgcagcacccgccatcctcccagccttataccttctccagtccaactatgtcaaagccaagcacgcaagcaggtcaaaacagaacaaagtgacaatggcatggttctgccacagtctctgacacttgctcttgaatgtttgttccttccttggaggctgtgggcgcggtctctgctgtggagttcttgagagcaggtggcagagcgggtgaggtcagcgcggctgctggaggcggtgtgctgtgctcccgcagggaggagggcggcgtggaggaggcgggcgccccctgctgcccgcgcgggctcctgcaggctcccagcctttcgtaccgtggcccctgaggctttcccaggctgatgatgaatgagcccagggcccgacggaggcatccgaggcacgtgacaacccccgctctggttgtaaattgtcaggcgattcagtgaaagcgctttgcaagctgtttgtgagcaagaggcggagcagtttggctgattcagaatgggctggacacagtcaactttgcatggggagagaaacatggtctgatggctgggagcgagggcagctcgcttttgaggcagggattgctgaatgaggggagtggctttccaagttaggcgtttaggggaagaataccaactgtcagggacgaatgagagaacaggccaagcagccctggagggccaagtgaggaggcctctgttggagtgcctgaaatgtctggcttcgggaccttggattctttaaatgatgcaatctcctggcttctgcagagttgaaatcaaggcttagatccccaaaccatctgtgagcctggatacttatgcatggaagttaaagtttacagtgactctaacactgcagaggatcaagtctggatacatccactttcctggacaggccttgaaaatgctcggaaccactctttcttcccctgtgcagtggggacaagaatacaaacctctctgagatgaggaaattagagatagtgtttttaaagtgcttggtatgatacagcatgcagttggtgtttaataagtggtgtctcttctaagtccctatgaatgaaaccatgacattgtgcaatcaaggcaggaatgttcagactccaatcctgctgaaatacagaggtgatctttgccaatgaggcatcgtggagactccattacacgctccagcaagcaaacctgttatcctcagtggcccatgaccattcttgctgtcagactttgctccgtatgcactgagcccagagctgattttatctgccatgaaaagaggatgtggaacaaagaagggaacagagtttggttgcagagagaagtgtatgctccaagaaccagatgctaagatgggattaaatgtgcaaggctattattaggggagatgcctgtggcagaaaatggggagagagatggacaaggctgggcaagtcatcagatcatgatgcaaggctgatctgagtgaaggaaagagggagaaaaggtagttggacatattctaggctgccatgcagttaaggagtgttcagctagggcattgggggtcctggagccagtgtcaactgacataggacaggaatgagccttagtatctttgccatgaccagttgttggtacgtggcctcaccacaaacacagtgatggatttcagagcccagcagctgaggccgatggtcagttatgctctcatggttaaaggtcttccaggcacattctcatgacagccacgatatatttttgtaagaaattctaccaaggcaaaatatgattaagataggtagccaaaacaaacaaaaaagaaagaaaagccgcaaattcctccctgcttgctctttatgcatgctcctttgcaatgtgattttgctattagctccatcaagagatgggtctccttgaatctgagcttgaccacgtgaattgctttgaccactggagcattcacaaacatggcacaacggaggcttgaaaaatgcatgtgccttgggacttgccctctcttgttacttttggaaccagagacctccatgcaatgagcctagactagcctcctagaagatgaggacaagaagaagcagaaatcaagcaccttcccaccaccaggcatgtgagtgaggccatcctagactgtccagccccagccaagctgtcagtgaccacagagaccagctaagccaaactaaaaccgaaaggactgtgggaaaacctatagtactgtgagaaaccataaatgcttgttgttttaattcactcagttttgggacagtgtgttatgtagtaaaaactaattgatatcatttatgtccattttatagatggaggaactgaaacctggagacatgagaaagcccctcaatgaatggaagtctcaaggtgttcattggtcttcctcagagcctcctacagcaagctgggcttgatcggaaggctctgagtttgggggtagctttactcatttgtgttatttgcctaaaccctggagtctactgagatcaagacccccgaatttgatcattaataaatctcttttggatgaataatataaaggtgttaggaggcccttctaggccattgaagccactagaacagaagtcaaggaattctcaatcttcaaagcatgggaaatgaggggtacagggattctccctagcccagttagaaactccttcaggcaggacgtaaaatttatatttctcttctattcttcttcactactgtgctagtcttataagtctattgttcattcattcaacaaatacttattgagtgtgccaagaaaaaagcaaagatctttgccctcatagagtttactttctaggagggaaatagaaaataagcagaataaataagagaaatatatggtgtaccagataatgatgtgtgctaggaattaaaaataaagaggggaataggagaggaagtaccgggcagggaacattgccattctagatagggtagcctcactgataaggtgacatttgattagatagatgaaagaaagtgaaagtgggagtcacgtgagtatttgtggggagaggattccacagctagtgcagggaagctgaggccagagcctcatgaagagctcagggagcaccagaaggccagagtggcaggaggagagtgaacaaggagaagagctagtgggagacgagttcagagaggaaaaggagggcacgtcatgaagcgtcctgcagatcaaaggtgggactttgagtgaaatgaggagccatttgggacttaggagcagaggagtgacgtgatctgacaacatgttagcaggatccctctggccgctgtgtttaaaatagcccaaaaggtagcaagggcagaatcagggagaccagttaggaggtgactgcaatgaccatggacttactttgaattgcagttaaagtagaggtgtctagcccagggcccatgtgagaaggaacagtcgattaccatttattgggggaaatactggattgtgtcttttcaccagcattatggtgccggaaagaacagccaaggggacgttgcttcttgacctaaacaagttctgctttgatgatgacagtgaggcaccaaacaacagattcaacttcaccatgccatctggagtggggagcggcagcagatttttacaggatccagctggctctgggaagattgtggtcagttaatggtcattgcatcattaaaagggcatcgggaattggtccaacatgcatcatgcttttgctgccccatagagagaaatttccaaggtaaccccctctcagagcgactgtaactgacaggcttaatagtgagtctgtgttccccattcgctctttattttaccctggttccaggaatcatttgttacacatagttgtgcctgggctgctgaggactggattcttccttgcatagcatgcagtttgtgtgcctgcttagcgtgccttcacagacacgtcagtgccctctgtgctcaggcacttttgtttatttgaatgctcattcccggcccatagagctgtgaggtgagagaaagcagggccaggaccttgagtatgtctgggtaaattccacaccgtagaaccactggagaccagaggagagtgagacagtgaggatgtgtaggaagccccctccctggcaacttcaagggacaaaagctgcattggaagaaggatgggcatgaaaagtgggtcccaatgatttgagttagacctttccttacagagctactgctggaaggtggtggggaaggagaagagaaaaatgaaagggctgggaaagcagcagcctcagggagggaagccagcaacccgctacccttcccctcacccagctttcttctccacctcccatcccaagcccttcttcaatccccaagaacatctcacccagtttattcatagtaccatcttaaaaataatttctatttttttctgtttaggaaattaatacatgttctctgtagaaaatatagaaagcacagaaaagcatcaccattcactgataaccagtgttagtagtttggtacatgtccttcttttcttttttctatagatatattttatgtgtattttatacatatatgcataggtattttttatttttattatttttttaagagaccatgtctcgctctgtcacccaggctggagtgcagtggttcaatcatagctcaccacagccttgaactcctaggcccaagtgatcctcacatttcagcctccctagcagctgggactacaggagtgcgccactgtgcctggcttattttttagctttttctagagcttttctcaagctcctggtctcaggcaatcctcccacctccacctccccaagtgctgggattataggcatgagctactgtgcctagcctgcatatgaattttagatacagtagtgctcccttatccaccggggatatgttccaagacccctagtgaatgctcgaaaccacagatagtaccagaccctacatatgttatgttttttccttctatacatagatacctatggtaagtttaatttataaattaggtacggtaagtattgacaataatagtgaataataaaatagaaaaagtataacaaaatactataacaaaagttatgtgacactgggcatggtggtgcacacccatagtcccaactacttgaggctgagatgggaggatcatttgaggccacgagtttgaggctgcagtgagctatgattacacctgtgaatagccactgcacaccagcctgggcaacaaaggggacccctatctctaaaaaacaataaagaaaaccagttatgtgaatatggcttctctctctcaaaatatattatagtactgtactcactattttcagactgtggttgactccaagtaactgaaactgtcaaaagcaaaaccacagataataaggggggactactataatgaaacagccctgcatataagattcaattttgtgcttttcttcaacgaatctgaagttgtgatcctgtgctgttgagcaatagtgcttaatgaacatctttgtacatagattctgtctcctggtaaattatttccataagttcactagcagtgagcaaaggtatggtcataactttttaaagctcctaatttttatgggcaaagtgtttgccaaaagcgttttgccaatttatatatccactagcagtatatgaaaatgtctctcgcagcccaataaataggattgtttaatctgtataatctactatctctgttttaatctagctgattggtgatctagactacgaaaatccaagtaacctagcagccggcaataaatatacggtgataatccaggtgcaggatgtggcccccccttactataaaaataacgtctacgtttatatcctaacaagcccagaaaatgagtttcctctcatttttgataggccatcctatgtatttgatgtgtcagaaagaaggcccggtaacgtcaacaatcatttcaccttctctcccaatgctggttccaatgtcacacgcctgctgcttacatctcgctttgactatgctggtgggtttgataagatctgggactacaagctacttgtctacgtaactgatgacaacttgatgtctgacaggaagaaagcggaggctcttgttgagacaggaacagtgacactgagtattaaagtcattccccacccaaccactatcatcaccacgacccccaggcccagggtcacctatcaggtcctgaggaaaaacgtttactctccatctgcatggtacgtgccgtttgtcatcactttgggctccatattgcttctgggtctcctcgtgtacctggtcgtcctattggccaaagccatccacagacactgcccctgcaagactgggaagaacaaggaacctctgtaagttgccagtgggctgggccctcttccccacctcctttaggacactgtttctggtgacatcaggagaaggaaaaatggagaatcaggatttctctacaaggcaggttgcctggagtgaaggcaggaaaaggagatacgggggaaggaatcccagctcccctcggtcctggtgcactttctttgtcacctgctaggccaggaaaccatccttttggctttccctggcaacctactctgtccttgaggctcttaataagactggggcatcaaccttctgatgaccttgccctggataaaatcttcagcaaagccctgttgtaaatagcgatagaatatgccgtgctcttatttgtagaatatttaaaggatagtatggaattaaggcaagcacacaaaaccaataagggaattaagcttttgtctccagtgactcagccgggtttttgtgtgaccaaataattcttggtgttttgcttgtggtctcagtctctcactcttaagggttgtaaacgcaggcctgttttctctttttccagttttcagctgcccactaatatgcctcttattgtgccaatctgtgatgtgtcttttactggctaaagtgaggtagtagagtgacgtgaagagagcaccaaagaatcacaaacttctcccagagccaagctccttgattctcagtagctcttacaacttacagcttagatggttctgagcctgagttttggagttagatgggcctgagctcaagtcttagctctaccattttcttggaatatggctttgagcaagtgaccacctctgtgaacttgaattttcttatttgtaaaattaatcaactaaatgaacaaatgtaaacaaggcacttaactgtattcctgatatagagtaaatgcttagtacactacccagccagtttttacaaatcttgtttcattattcttcacagatgagtcccaatgagttcaggattctagattccaagtttagctctatgcccaagtatcttgaggtgttggaacctctgagttctaggatctctcaatggcaaaaagagggggtgataagacatgtgtgccttttacgggtattttaaatattaaatattaactgtcaaataagaaaatctatggatgaaagactgtataaaagtacaaggcattagaataaagatgtgcgttgcattttgccatatttattgcggaagtttgttgctattggcaaccttgacttcaaggtaagaaatcctcgagcatctgctgaaattaaaaaaggcatttttgtttgaactctattcacaaattgatttttttaaaaaaaaacagctctaaaagagtaattgcttgtaaggatggtggtgtactgtactgggatttggatagaagttcttgaagaaacaaatccaatagacactgcaactctcatgtaatttatggctaaacgttaaatatgcaccttgaacctggttcttttaacttatgttgtaaatattaattgttttcaacatggttgacttaaaaaagaaaaactagctagaaaaccagactcagactcaacctctctggaaattagttataccatatgacagccaactttgtcaaatagcaaagaagaaaattagggttacagagctatagaatccaaggtgatcatgggaaatctcgtagggtctgagtccagctcttcatgtgacaggaaaccaaaatgtaactgccagctctcaaacctccctgttgtgagccaagccttctgctctgctggctcttggggagaaagggatagggcaagaagactcgctggacagtctgactagggcaggcatgtcctcaccaggttttctcatcagaaacaatgtattccctgaagtttataaggtgatacttttcaactcatcaaattcccagaacctccctagtccaaagccaatagtgatgaagctgctttgttcgaagcaggcgtggtgatctagttttctttctggcccctatccctggcacctctttcagtcaacccctgtatctcaaagggcatagttgcccaaagaaccccatggtgtcatgtgtgtgccagtgcagcatactttcaagtgaattaatagccattctttttccccccataggacaaagaaaggaggtatgtacagtacctgtttcccttgtctgttgttttttgcttgctctgttgtgctacgtaaaaaggttcctactcggcaaagaatcaggccgcgatcacatcttggagcattttcagctgcatcttctgtggctggaaggaagcggaggtcggttgcagctggagaatgggaagggtggggggacagtgccttggcctgcctggatatctcaatttggtcctgcctatgccctacctagagccctcgccaatcagctcagctgaacacctaggtctgtcccttgctgcatggcacaggaagaaagaactctccgtgtgttaaatgtagacaggacctgcttactgcagcccatggagggtgtcctgaggacagctaatgctttgtgctggacacaggcctcttttgaaagaacagataaggctgggcgcagtgactcacgcctgtaatcccagcactttgagaggacgaggtgggtggatcacaaggtcaggagtttgagaccagcctggccagcatggtgaaacccccgtctctactaaaaatacaaaaaattagccgggcatggtggcacgcacctgtagtcccagctactcgggaggctgaggcaggagaattgcttgaacccagcaggtggaggttgctgtcagccaagatcacgccactgcactccagactgggcgacatagtgagactctgtctcaaaaaaaaaaaaaagaacagataatatttgattcccagattctaatggatttgatcatttccacaaattatttaggttagactagtgagaagggggagatgagggtggtgagatgggctgagagctgactgacttcagagaagtgggtaaattgggaaggtccatctgagcagctccaggtctgaggaggtgtcctggcttggcctcaagtagactccagagtgtgggggagacaggacaaagaattggacagtgttttaattaaaaaaaaaaaaagtttgctttaatcactccatctacaggcatgtgtctgacatgcttaaggcatgtctcaacagggttagaaatttgattatagtggttattgatcatattgacagagatgattttaataaatgagattttcacaaactgtctctaatcccactttttaaaaaggggatgggggctgggcatggtggctcacacttataatcccagcactctgggaggccaaggctagaggatcacttgagcccagaagttcgagaccagcttgggcaagatagtgaaaccctgtctgtagaaaaaaaatttttaaattagctgggtgtggtagtgtacgcctgtagtcttagctactggggagatagctgagaggatcacttgagctcaagaggtcaaggctgcagcgagttgtgaccgcactctagcctggacgacaagagtgagaccctgtcttaaaataaaataaaataaaataaaataaaataaaataaaataaaataaaataaaataaaataaaagggcttgggaattaatgcacaaaacccacaccttatgaacagaggtatccaatcccatctttctttcttatcttaaaagccatgtaaaagccagttttctaggtccactgataataagctagaaaaagaataaaaaacaactaaattgttcgtatgttattgtgtgtgtgtgtatacatatgtgtacgtatttttttctgagaagatggaaagttgtcaagaaacatatctatagacagaacaattctttgctgtgtctgcaagactgagatcgaagcctatttaggggaaataccgttgtggaggtggaattttaaggtcaatttaccacccaagaagcttaacttctgcctgttctgttctctgcagaaacgaagactgcagagagagacgtcgtggtggaaactatccagatgaacactatctttgatggagaagccatagatccagtgaccggggaaacatatgaattcaactcaaaaactggagccagaaagtggaaagatccactaacccaaatgccaaaatggaaagagtccagccaccagggagctgccccacgcagagtcactgctggggaagggatggggtcactgagaagtgccaactgggaagaagatgagctgagtggcaaagcgtgggctgaggatgctggtctgggttccagaaatgagggtggcaagctgggcaacccaaagaacagaaatccagccttcatgaacagggcttaccccaaaccacacccaggaaagtaaacggggtctaaggaggggcctgtcaatcactgagatgctgcctcaccctaaattctatggggatggtgtgggcatggtgtaggggggaaaatgtgggctgaggggattcagacatccagggtcaaacatgggatgtttgacaaatttttaaacaaatagaaaggggtttgatcacatagttgcgtgttctgaaatgatacaggaacattttctatcagatttcagaactacctgtgcttctgataagcaagactgttaactttggggtgtggaattgttgtgtttcttctttgcattgactgctaggaagctctattctgttcaccatagaaagtttgtaggaattcctgacataaatagtgaagactatccttacatctggtttccaccttattttcctgccctcgttttaacatcacccagatttcttcagttataaatatgccatacacctttgtaagtcacctcaaatcttcttcaaaagaagcagaacagtgaaaaaaacagatgagtaagttaagagttggtcatctggaaagaagaaaactcagtaggcaccttcttttgttttttcttgtggtgtccggatcagcatcctgcatgtgagattcatccacgttgtcctgtctagcagtagttcagttctcttcatggttatgtctggtttcattctatgattatatcacaatttatctattctacacttgggtggcagctgcttcagattttttacttttaaaaaatatacttaaaagtgaactacaggcagggcatgatggctcatgcctgtaatgccagcactttgccaaggtgggcagatcacctaaggtcaggagttcaagatcagcctggcctagatggcaaaaccctgtctctactaaaaaatacaaaaattagcttggtgtggtggtgggcacatgtaatcccagctacttgggaggctgaggtagggagaactgcttaaacctgagaggtggaggttacagtgagttgagattgtgccactgcactctagcctgggtgacaaagcaagactccatctcagaaaaaaaaaataaaagtgaattacaacactatgaactttcttgtacatgtcttttggtgaacataaacactcacttttttgctcatatatctaagagtgggattgctggagcaattgctggatctgccaaagagttccaaagtggtggctctgattcacattccagcagcaaacactgagagttgcaattgctctctatccttgccaacacttgggattgtcaatccttttaactttagccattctggttaaaattactattgaagtgaaatcactttttcctcaaagctgaaacaccatcagccttacaacctacctgccttgctccttcccacttcctatgattggaaggaactgcaggactctgagtggggacatactggaagccccatctagacataaaactcagacttccacctgtaggcatgagcaatgaactgggaataaatggtattatgatggaataggaaatgtaactttccaatgtgtgcctagcagagcctgagcaagcttcactcgagctctatgccctgctgcccagctgctgcgaccctagtccagtaaccctaagaaaggtccaggtgagtgttcattagggaagcactcccttcccaactggggagtcaggtgagagcctaccaggtccacaaggtcctgtgggagacagactggatccagcaaatgtagagcttcagagagagcagcagcttgtttactgtgtgcctagtgccagtgtcacttctcaagcaaaagaagcatttgcaaaatgcctgtcctggcctagattgagcgtgatttattaataagggttggttgccagggaactcccttgaatggatttaaactttgcaaaagaaggcagaactgttcatttatgcaggttaaagtgagtgaagtggctgattgcccatttaaggcattgcaaatctgtggggcccggagtcaaatgctttccttggaagctctcagcttcaatgcaagtaaaatgaggttctgagaaggctgaagggggacttaataactgcttataagcccattaagaatgattaaaagggccgggtgaggtggctcatgcctgtaatcccagcactctgggaggctgaggcaggtggatcacctgaggtcaggagtttgagaccagcctggccaacatggtgaaaccctgtctctactaaaaaatagaaaaattagctggacgtgttagcaggcacctgtaatcccagctactcaggaggctgaggcaagagaatcgcttgaacccaggaggcagaagttgcagtgggctgagattgcgccactgcactccagcctgggtgacaagggcaaaactctgtgtcaagaaaaaaaaaaaaaaaagaataattaaaaggagagagtggtgagcagctggtctttcttctccagtgatgacagggcaagagggaattgtgcttaatggccagagaagagatttaagtcaggcaccaagagggacttcctgaagcctggggcctctctgaagagctcagtgtcttctctggtgataggcaggaagagctgagtgtcttcctagtcgcaaggcaagcctcgagaaactcaagaaataggggcaagagtgcgccaggaggagagaacacctgctgccccgtttcttttgtatatccggctatttggttcggggaaatccagaagtcaaagtgtcaccggtggagggtcttgactgcaagttgtccaagttcttggagttttgaacaaagaatggaacaaaatgcccagcaaagcagagaaagaatgaggcaacgaaagaatgaaagcagggatttattgaaaaccaaagtacactccacagtgtgggaacgggcctgagcaagtgactcaagggcccagatacagtcttctcagtccaaataccccttggaggtttccccttggccacttcatgctcacctcatggaaatgaagtagtggaccacaattggtctgattggttgcaggaagcaaccaatcagagactgaagtggagttacaaaggtcacgctcctgtgcaaacatctgattggttgcaaaaagcaaccaatcagaggctaaggtgaagttacaacgttgcaacgaagactcggctggcaatcagtctgattggttacagacagccaatttcccagcgttgaccaggttttggggggaacaaaattatctgaataaaatgaagacagcaaccgtcgtggatttggtgaaagttttctcccatctccctctcaaggccttaaacaggtatgagttgattatagccaatgtttacttttctcattctgattcattataaaactggggtaaatacgttcaggaattagaccacgtaacaattataattgtcgaagactttgaaactgcatagtagattgtgacattggagctttttgttgtgctcattagaaagcagggtctgaaactcagcctgtgtagcaagcacgggtggctcacaagcagaactgggaaatgacacttctgctccccagagccccctttcacatctggggttctcattgtttgcctttttacttaatgtattttgtaatggctgtgaaaattaagctacaaaatgagtgaacattgaagacaatgattgctattgaaacttaggatttctcatttcaaacttagcgtgtgtttatccttcgtattcattcaataaatatctgtggagcaactaccatgtgccaagcgttgactcattaggaaacacagcagctcccatccctgcccttgagcagcctccattctgtttctacagctgaatgtggcctgctgataagctattcc

SEQ ID NO: 2378 - DNA, 3736 bp, Homo sapiens
cttttgtaaacaattctaaactaggcacatgaaggagatcccacaaatggaagtggagaacaaagtaaaacttcaaataatggaggcggtttgggtaaaaaaatgagagctatttcatggacaatgaagaaaaaagtgggtaaaaagtacatcaaagccctttctgaggaaaaggatgaggaagatggagagaatgcccacccatatagaaacagtgaccctgtgattgggacccacacagagaaggtgtccctcaaagccagtgactccatggatagtctctacagtggacagagctcatcaagtaaggctaatgaatcagggacaagatcctgggtgtgaggtctgggttaaattaattaaaaaacaacaagttaaatcagccacaaggttccagctacttgataagagaaatggtaaaaatgtaagatatattaaatctatatagagttgctattgtttaaataatacataatatatttgacacagtcatatagtgtgtgaaaacttttaacactgtagtcaacggggctcctcgggatactcctcaaaaaagccatattaggagattaaacctgcatctttaaaataaacacctttgttggagtgagccacctttatcttgagtcaacatatttcaaaatgacttgaagtattcagataaatgaaatttattttctgctccattctctgtctctttctttctcccttcctcttccctgcgtccccctcattctttctcccccgaccactttccttttttcctgaagtactctgaaaaatgtagcacatttgcatcaatttacttttactgacatttactttttagatcttaacccagcattaatcagtaaagagtgaagcaatatgcaaataataaatggtaggactatgaccaattaggtggcaaaaagggatccaaagtaaccaacaaggattttctaatgaagattaatattttttctaagaaggaaatcactcaggatttagtcaaatttccagctacaatatttggatgaaacgattgatattgcagggtgccttatgactttttgtatgtagactgttatacatctctctaatcttttcagggtttttaaatgtttttgcaaagtttgtttcccatttccttttaaatcaactgcttctgttatctgaagatgtatggcaagaccagatgtttcaaatatcctgagttttattcctattttcctattggctgtagaatagttattttgtgacaaaagctaacacagaaacatttaaaggatgttttttgcatgtatgaaattcagatctcattagtattaatttctcctggaagtttaaaaactctatattgtgatgctggatgtggggagaattttattaactagaatggactgcgaaaagccctggtctggagttgtcatggaagggagggtgtgaagagatggtggtccattttaccattactgtataccacttaatttatgtgattagatgcaactcatctgtgttttacatcagttcacatacaatgtggagcatcttgaaggagctataccttatttccacaatgcatggtagtgaaacgtgggctattccctcactgaacagagtgatgaaaggcttgactgaaggaagatgtgaagtggtgactgagtatgagggtgggggaggagaattacttccactgggagccattcttgttcccagacaggtgacaaaatgctatctcttttctctgtttcctgaagtttaagatcaaaaataagaggaccagacaacaaggatttggagcagttttaaaggcccagtttagaagtttcaaaccacatggggatgcagatattcagacacactttctccttcccttgcactcatacaacaagcaaaagtgccacctgttatgacagaaatattgcctcaaaatggcctttggtacacagtgggaactctggggaggaaattgtagggaactttgtaatgtgatgcttttggcaagtgaccaatacttagtacattgtgcactggatccgattacggagactgaagtgagagggtacttgggttagtgatagaggagagtggccagattggcaggaaaaaggttcgaaatggctcagaggacagacgtcactgatggagagtaactggaagacagacaccaggatgggtcaattagaacttcctcaggagcctggcatccagtgttccagcattatcaatacttagttgtgtccagatgatgattcagaatgttataagtcttccatgacaactgtgaacttctgctttcatcaggtggcataacaagctgttcagatggtacaagtaaccgggacagctttcgactggatgacgatggcccctattcaggaccattctgtggccgtgccagagtgcatacggatttcacgccaagtccctatgacactgactccctcaaaatcaagaaaggagacatcatagacattatttgcaaaacaccaatggggatgtggacaggaatgttgaacaataaagtgggaaacttcaaattcatttatgtggatgtcatctcagaagaggaagcagcccccaagaaaataaaggcaaaccgaaggagtaacagcaaaaaatccaagactctgcaggagttcctagagaggattcatctgcaggaatacacctcaacacttttgctcaatggttatgagactctagaagatttaaaagatataaaagagagtcacctcattgaattaaatattgaaaacccagatgacagaagaaggttactatcagctgctgaaaacttccttgaagaagaaacacacatctaggtattttgcccaatttgcagatgaggcaaaaatttggagatgaatttcaaagaagtcgaacagctagatgagtgcagagatggagatttaatcaaagggagtctgctgtaaaactcctccacatgtgcaaattggccaatatgaaagcaatgaatatttgaaaattgaagttttctgctacttcaccaattttctcaagggctttgattcagttttctatatcagaaggtaaaaggcgagaggcttccatggctgcctgtcaacagggtttgtggagagaaggggctgggaacctgggcaagcagcactttcagcaataaacagtatcctcaggggcccacagagggaagatggtttcagtgccaaaggcttgagtccccttaattttttcattccacttcactcatcacctgtctcctttctatgctagcaaaagaacaattattcatagatggtaaaattatttatagagccgatgtaattaaaaagaaaaaaaaagaaaagaaacacctgatgcaaaattcttccattgcaaggtgagaagatgaaaatccaagtagctaagtggctttctcaagctcacaaatctataattcagtctcttacatctatcagaaacatgttccgccttatcctggtctctgaaaacaaaacatagtgtctccaaagcattaaatggtttttgatgtttgatataaaaaaggacatgtcccagaaattattcccctgcataaaactttagaaaatgatgcttgaaggtcactagaagttgattacttaatgacagccagtaaggtacaaacatacacagagccaaattctgggagatgaaaaatggaaaaaaaaaatacagattcaaccagtgcttcttgtcaacacactactctgagatttttcttattttaatcttatggtctagagtagtatta

SEQ ID NO: 2379 - DNA, 2409 bp, Homo sapiens
aaggcctggtttcatgctgacttcatttctggttggatggcctccagggtaaggtgagttgaactctacgtcaggagtaatccagcccctccagggccagcaggagtaaggtgcgcccctccaaggatctccatgagctgcctctgtgagcctgacctcctacgggctagccagccttcacccaatcactcactggtccagcttcagggtccctacatggatgtgggttggaagacaggacaggcacacaaccatagatactgatggacatgggccatttacagaactgagggcaagagagcaattttggccactgaggcaagttcctgggttagctgcaccgaggagggtgctgacctctgcccctcgggtccacaggtctgggcccctgctgctgacatcccccacatgtcagtctgcctgctagtgggattgactaactcatcaacgtggagtttaatgcccaaccaagtgcagaccacgctcctgttttgcgtcaccctctgcgaagcttcctgcaaacttgactccctgcccagtgcccccagccccaaggtgggacatatcccctgggcaccccctctggtcctgctaaagcccagcccctctgcaggtcacaacccctcctctgtcctaccccttctgctgcctgcaatttcctgaactccttggtaggcagtctcctcaccctgtcctcccagtgtctccccaccctgtcttccctgcttgctctgagggtccctaggagggaggtattaacaccctggaggcagtacacaggtggggcgccctcccctgacacacaggttcttctggactgggtcctgaggctggtggtgcatagggggtcacgactgcccttcccccaggtctgagggttctgcccctctgcctcagctgctgcccacttttttgccttcccatgaagcccagctggccacacctggggatgagtgtttaccggtagcctgaggacgcacagtggaaacctggcaacctggggcctccctgtgtctggcagcctggcaactgtcacgcggcgcccagcgctggcttctggggcactgcagtccagggagggtgtggctatcttcccacagggctcttctcttccctcaggctggtctccaggaggtaaggcccgccctgcaggcaacaccggtgcttgggctcctgctgagcagttctttcctgcgagtaacagaaccagggagggaggtgggctgtggcctcccctgcccctacagtcgtctcctgcagctcccaccatgctggactcatcagcagcagagcaagtgacccgactgacgctgaagctcttgggacagaaagcctcttagtcattcctggagcacacagggcctttgcgtggagccaccgtctctgtcacggtctctcttcctcacagaagctggagcaagaacggcagaacgtggaagggggacctgagggcctccacctcgagccaggaaatgaggaccggccggacgatgccctgcagactgctctgaagagaaggagggaccttctgcagagactccgggaacaacacctcctggacgagctctctcgggcccaggcctggagcgggccaagcagaggagccctcgggtcagccctgcccccagagctgccccccacgggcatcctacccactgcctccccatccccgctggccccagacccgccaaggatcatcctgcctacggtcccccagcctcctgccaccatcattcagcagctccctcagcagccactcatagcacagattcctcctccccaggccttccctactcaacggtcaggaagtattaaggaagacatggtggagctgctgctgctgcagaacgcacaggtgcaccagttggtcctgcagaactggatgctcaaggccctgcccccagccctgcaggacagattctttcattcctgaagttccgcacaaggaggaaccctgtcccagtgcttccatctttgaaagtttgcaggtaggagacaggatgaccagagagttgccactgagctgcagagctccccagggacagccacctggtgctgacatggacgggcaggtgtgaacaccgaagggcccagcgcagctactggcagtaacactcacttctctcagaaccatcttttcgtgcctcttgaaggtgattccagagactctgtgctctcgttaaaagctcaaaccaaagctcagactccatttcctcttttcaaggtgactttccagcatggcatttctttctttctattaaaaatgtttttttttgagacagagttttgctcttgtcgcccaggctggagtgcaatggagcgatctcggctcactgcaagctccgcctcccaggatggtcttgatttcctgacctcgtgatccacctgcctcggcctcccaaagtgctg

SEQ ID NO: 2380 - DNA, 4897 bp, Homo sapiens
ttataagataatcttaagggattgtatgtcatgtctaaaaacagtagaaaattatacaaaaagtcatctaaatcaataatgtacacagtatttacttactgtataagtttcctattgctgttataacaaaattaccagaaactcagcagcctaaaacaacacaaagtcactgccctgcagttttggagtcaaaacttggctccaaatgggtctcacttggctaaaatcaaattagcagcaagattgcattgcttttggaggccttagagcggaacctgtgttctcacctttttcatcttttagaggctgttttctgcattccttggctcatggccccttccatcttcaaagccagcaatgacaagttgagtctttctcaggtcgcactactgactcttctgcctccctcttccatatctgagacacaaccggataatttaggataacctccttattttaagagagacctgtgtggttcgatgcattctctgacgttattctgagaagaaacaattaaatgcatactggaagacattttgctcttctacatgttggaaattcggtgtcaccaatgcacagctgcagaatgcacagttctattgttttctttctcatcacagatctgacccctcaccatcttcccccgcccttgagcctgatccttttctgactttgagcctggcaccttgctggtgccggcaggcatcatgaaggcatgggctgggagccagactcagccttgcaaaggaggctcagggaagccgactgacatgggctcaataattagttcaatgccggacacaatgctcaataaggagctgctgggttaatggatgtgtgtgctagctagctgtagtaaacaattcaagttgataacatggggctgattgtctgaacagtacaaaagaaaatggaggactgaccagctctttggtcctccaaggtcaatacaacatttaaagccttcttatagagatatacaagttttgttcatttttaatattcatgtcaataatttaagcaatgtgaaaacttaaacattctcaagcatttatttattttttttggtagagaccaggtctcactctgcttcccagcctgtagggcagtggcatgatcctagctcactataaccttgaactcctgggctcaaacaatccctgctgtctcagcctcctgaacagcttggactataggtgcacgacaccatgcccggctaatttttttatttttattattgtagagatagggtcttgttatgtttcccaggcttgtcattttatgtattgtcttgaataataaaagaaacttggacagagaatagcaggtagcaaattttcagatgtagatttaggataatacaaaattttataatgtgaagtacctcagtaccaaaatcttagctatttataatatgatagcccttgatgtagagctaacttaaattcaacatttccatgactaaataatttgtgggctctaaaatattctcaaaattcctagagttagcatttcttaattgatttctttagcctttttcacattcaactatattataaatacaaaatgaatccattaacatattttataatgtgtctttcagtgtgcttcttagatttagtttgatttcagaaagctaagaaagaaaaaggaattttgcaagccacactcaatcatatctgcataggcatagctatatagacacccataaaattatgcataacccccaggttttcaaatgaacacctcccacagtctcagcaacacagggcaacctccaccctctggcatattcatgtgtccatttcactgtgaaattcttatcttcatcactgctcctcagggggcctctacaactctgcaatgttattgttctgagagaaaatggttattttgtaaaattttccttcaaaaaacctatttaatagaatcacaagtttattctcttcagcagcaagtttgctgaagtacattatttgtccaaaaatagttgaaggccacattgattgaggaagggatgaatactcatactaatgagctttctgtcccgttgttgtggaaattttctgtgaatttgctgggattttctgctgggtcatgcagaacctccttggaatgttatagcctgggaaatgtaattaccccatgacgtttcatttttctcacaatttctggtgtcagaggatggaacaatcaagtcctcactctgaaaggactctctcacatgcccatcagggcagaagggctatcattacagaaatacagcattctcctctgtttttcaagctggtttatctccatcccactacccgaaaagtggaattcagagttcccttagttctctgcttttctgtacatagaactacaacatccaacccagcaaacactcccttcctatacagatattctttaccagcagtattttatgtggaaaacattaacaagagattagtgacaaaagaaattactttgggggagtccattgatctttgccttctaaaatttataagctgctttatataattgtccatgattgccttctttaccctcatcatcaacttccacatatgaaaaagtaacaagaatggggactgagaagaaatagtaagatggttcagactgaacgaagccattcagtttttatacgtgtgtgtgattatttcactataaactctgcttccatgactaaaatcatcacaattaccaagcaatggctttatcccagagttactttagaacaaaaaagaaggcatttgtcatgcagtggcatatctcggggacagctcacccctgtgaaccatgtctgccctttcttcctccttcttttaattaacatttggaaaagaacagtgatgttagcagatagcagagctgggaagggagactcagaaagtgatgtgagctttgtcaatcttcaaccttgccaaggaggacacattaaagtgtttttcatggaaaatcaggctttgtcaacacaaattcaaagcaatgtgaccttgacggatggagatatatatatatatatatatatatatatatatatatatatatatatatatatgcatgctaagtaagaatagcacagactgaagcatctttagagaatataagtgaaccaaataaaaggaggaaaagcatcctaaaagaagatgttaaatccaggaaaaagttgtcaagtgtatttccttctacttaccttttctgctgactgggctgtaccaaaaaagatggggatgaaagctaaccaaatgatgcaggtggtatacatggtaaatccaataggtttggcttcattgaaagtctctgggacacctctcgttttaatggcataaacagtacaagtgaccatcaagaggatactgtatccaagtgaacaaatgagtgagagatcagaaatgtcacacttgagcactcccctggccttctctggatctagtgtccgctgctctccatagtcaatgatgatgtgggggggatccacaacaaaccagacaaacactccaaggagctggacggagatgaggctgaaggtgatcaccagctgagatgctggactaatgaacttgggcgctgtgacagatttcttcccctgctcaaatattcggtggatacggtttgttttggtcagaagggctgcatagctgaaacacatgccaagtcctaggaagacccgtcggaaggagcatatgattgtatctggtgctgcaatcattaaaaacgtgattgaataacagagaaaaatccccgttaggagcacgtaactaagttcgcgtcctgaagccctcacgataggtgtgtcattatagcggacaaaggtcacgatcacaaaggtggtggcgatgattcccaatattgcaacaaacacaggcaccacagcccagggagaatgccactccaatttgatgatggggataagctggcagcctgtgcggttcatgttgggtctctgatccagagggcaaagttcacaggacagctcatccacctggtagttgtaaccttcacagcgttcacagtgccagcagcaagggacccctttcaccgttttcttcctctcccctggcttacacggcaggctgcagacagacgccggacacagtaattttagcagaatgctaataggacaaaactgaaaattacagatgacgggagaccacttactatgaaaagcagctactataaaaggtaagctctatgaagtgagtaattttttcactggtgtgaacaaacagtgactggcatacaatttgccctcgatacatatttgttgaattcatgagggagaaaggatgggaaaggcactagagcagagccctgaggaataaggagacagcttggaagtactgggatatggaaatagagggtactcaagaggcacagcaaagggagatgaaggaatgtttcagaaaaaaagaacaacttattttcataagttcgcctttactaataatccaaaagaattactatactgtgtggtagtcagtctccaccgtggcccccaataacctcacttctgaaaattgatgtactcctgtggcccgctgccactttgaatagggctagtctgtgtaaacaatagtatattccagaaatgatgatacgtctcttctgaggccaggtcataaaaggcattttggtttcggccttgctctctgctggataattcactcgagtggaagcactccagtgtcactgatgcaggacagacgagccccaaagtgggaccaagcctgccagaattcttggctccacccaggaaagaattcaagggcaagctgatggtggttagaagaaaacagctttattgaagcagcaattatagctccatgactgttcctgcagagcaggagcagcaggcagagagcagcagctcagggcagttctgcaattgtgttta

SEQ ID NO: 2381 - DNA, 12645 bp, Homo sapiens
ttctcactctgccacccaggctggagtgcaatggcacaatcacagctcactacatcctcaacttcccaggctaaggcaattctcccatgtcagactcctgagtaactaggactacaggcatgcaccatggcacccaactaatttttgtattttttgtaaagatgaagcctattccatatttcagagaatcatttaccagccattgtctgctctgtaggtccaacaaactttgtctcaggccattgtatgttccccaagtccattcattttcccctaaaaaacatttactatctttcgaactgccacttttcctgcatctcccttcccctatgaagaagggtatataaacatctgtacccaggggttattgggtaattattctcatagagtttccatgtgctatgcatattaaaataaattgtgtatgcttttctcctgttaacctgctttttgatggttgatttttagagaaccttcagatttaaagggaaaatttcttcttgcccctatgttataaaccataaagacaacaattcctgcctttataggctatataatttatgcatatttaaaaaattcacgaaaaaattacctactctctgtgaacataaataaatgtattaaaaaatttgaaatgacaggacttctataaagcaacttatggcttttgatatgtccacagagtattatttctatcaaataaaataaatattataaaatgattaaaaatttaaatcatttctgtatgtttatttaccataacactgtggtttttctgtttctttgaaatcttccagaaaagaaaacatgctgtgaagtgtaataggggatttttaagataaatttagccatttattacatattcttttaaattttaacagtctttcttttaggtctatgatctaaaacaaaataaagatgctatattttgaccacaatgacagatatttaatagctatcctcaaacactgttttgcagatgaaaataatgagtatttaggataataatattttcttattcatggactggttttcaaattcatgagggcaagattttgtctttcatgtttactaatgcacccctgatgcctagattactgtctatcacatattagacactcaatacatacttgtcaactacatgaatgaacgcatcttgggtatgaatgaaaatgttggaagtagcaacggagaactagtatgcaaatatgagagccccttcctattacctcttttattttttctgttgttatgaaaatacatatgacatgtgccacagaaaaaaatggtatttgtccaactactatttttctttttttctggaacataaagaaatattacattgcctcccttgttgctagtttggaaccatgtaattgagttcttgccaatgggaatgtgggaggtagtgaagtgatgtgctacttctagtttgaggcaagtaagaatgctatggtgtctctattttcctctctcttgtctttgaggtagaagaaaagaagtgtgaaattatggatgtataagatggacaagtagaacgcaactcagatcctgactcacttttagaacgatcaccaacaaagagccactcaattagcagactgtaatatgagagataaataaaacttttggaggtaaatccatggatattccaggatttaggtgttgcagaagtggagtcaagtgaagcacttgttcctgaagtgatgtcaaaagagagtgaccagccggataatgtataaagaagatatagtattttataaggccattatggctctagacactgtctttcatttgtgcaggttcaagctcagaggcaccaacaaaacatccatgcacaaacttataatgtaagatattgatttattagcttctaatgaaatatgtttttattaactaagagattgatacataaaacaaatcttgatactttaagcaagaaatttccttgtagtgaatagctttactagaaataaatttattattcaagatagtggtttgtgaacataggattgtaagtgagaagatgtcaattaagttagttgtctctattaattgactgtgctggtgttgcagtagtttttcagaattaacataactaattgaaagcaaaaacatctctccaaacatctctgagaaaatgatacattactgtctaattttccaccttcttttctatgtttcctccagtttatattattatttcagttaggtacaatacaactgattgatgtagaacttcttttgtactgtttataatcttctccttggaacataaactgctattgcttttatcagaagaagccttactcctacaagtaacacacaaaccacacacctaggtaattcttttatgtaaaaagttaatctgatgtattgaatgttctctttaaatttcaattccagacatctattttcctgatatattttaccaattttggggagtgtgctctatactaattgtttttaagtataatgatgatcagcataagagttattattaatatccgctagctgtgagatttgtcttggaaaataatacttctcatttgtagatcagtttttcccagaacacattatgttgcatattagataagaaaacagtgcctctgcagcaaattacaaaagtcagagcaagagagctaggggagttgagaatcagtacctcagaaagaaactttgctagaattgtaccttatttgtttgaagacctatttcttatgttggggatggggatgaggatgggaagcataaatagacaccgcttgacatcagtgtctgtaatctcaaaactgaaaaactaaagtatcagtgaaaaaatttcttcagttattcatggtgttagagtatttgaaaagcaatagaaataaaaatgttaaggtattggttttagatttgttgggaggtgattcttcctgaatagagaggcattgatatcctttgttctgaaccatcttttcgagaatatttgtgtagtacttactatacttttatttaaacattctctccactatgataataaagataatgtctccctcaagagcaaaggttgaaaaccaaaggagaaaaaaagaaatgtttattatgtatccttaaggttctgttttttatttttgtgtttattgttatcaggtttccatgtaacagagtattttcgagtgtgaggcttgacaatggctccatggatttaatgtatgcattctcctctgcctggctatcacacactagagagagggaacacaatgatatgctccctcagttttataagtttctaagcattgccacagcataattataaagtatatgctgatactctttaggggaaccatggtggtgtcatgaccatgtgaactccccatgcaggtattcagttccccttctttcaactcccagctttaacttaccctcctggctttagaaagcagaacttaaaaactgatgagtaggtaatgcaaaattacaatcattacattttagatttgaaagacatcatggagagcttctaatcttatcactccattttataaagagggagtaaattgatcagaattgctaagaagatgctagtcagttgtgaaatctcttctacccagaataggacaggagtctatgatttactctactttcttcctatgtaaaataactttacccagatcatctactttcgtactataatatagactccccaaaggcaataatgacgttttgttcaacatctaccaattccacagctccctggcatgtaactgaattcatagctaatacatttgattttacctacttgagcaaaatctccagggaataatggtgagtacctgagtaatggaggtaaatgtcatgagtaaaagtatagattcactagattcaaatactacattaatgtctactgtgtgacattaagtaaattatttaaattctctaaatcttcagttttattatttttaactttgaaatagtaatagctaaaaagtagatatgaccaacatgaaataattagggtaaaatgctgacttactaccaagtatggagcatagtaaatgctcagtgaattatagttatatttttccataaaaggtacaataacttacgaagttcttaaaaggcattatattttaaatctacttgaacatcttcttcctggattactgagcaaccagacataattcttttttccttttttgagtcagcctcttccgtttagttcttccaaaaacatcttccactcaaggctacctaaaataaacccttctgctggatctactgttaggttactcttcccatctcagttgctgtgttatatttttatacttgagggattatatttcctgcagttgagtctaatttacacccttaggttagatgaatagtttgtaatttgaagtttggaactgataagatggaagcacaactaatatacaatacaaagtaaaaccatttaaatcatcacatgcctcatacaagtatctattgactacttattatacaccaggcatctttctaacagtacagtaattaataagtctccaataatggtttatggtatttaactgcttgaaattattaacatttaaagtaataatcatagctaacatttattagatatttattaggtgccaagctttttccaagtgttttataaactgttaattcatttactccttgcaaaaaacccttgagataaatattattatctcctataaacaaaagtaaaagaagcaaaatgtgtctaagtaatttattgcacgtcaaacagttaggaaatggtaaaactgggccaaaaaactgaaatagtctggctccaaagcccttgctattaatcactatgtagaaagacaatagaggcatacaggcagtaaaatgcaatgaaaaagaaaactcaaagccacaagagatattgtattaaggttaggtttttatttgaagaattttgatctaggttagcttataatatagtactttctcaattatatcagctaattttttatgtgtcaaaatgctctacagagaccccaatggggatggggtgatgttagttttaccatcatcatcacttactattaactttctggctgttaagtttctcagctaaaataaggtgctcacttgtcttgtagataccatgcactatatattttctaagaaattccaaggttttagtaattgtgcttcatgaacatattatgttttatgtgtgtgagtgtgcatgtgtgtgtattcagtgaagttggagactatgttttaatttctgtgttttacatgcttccctaattctttctacctgacagatccataattagtatgtttttaaatgccacctgaataaatctcccaacttgataataatcctgttggttaacagactaaaagaaggaatttaaactcttttagggtgtgacctaagcccattactcataagttgttcgaaatcttttctatttgattctgtgatgctgtgattattcagaatggttaactaatcttggaaattactgaacctgatgataactttaatttcaagactttgaagtactctccttgatgcctcaccgcttttatggttgtcttcaaagttcacactgtctcatttgcagaaatttctatgtagatctattgcaaattgtatataatgtttcttgtgctcatcatatcctcatcaacatattttgaggttattaatagcatgataattttgaagtgttatgtaaaagaagaagccttttatgtaaaggagatcacattaatccaaactgaagtatatgcagtataggcttgagggaaaagaaatttgaatgcaaatcaaattggatttttttctggaaatgttctgtttaagtctgtgaggaagtcactgcagctgtgattaaaacttattttcttatatttgatcagaaataaaagtccctctccttttcaaaaggggtttgttatgaaggaactttacaacacttccaatcccatttagttattcattcaagagccattgcctttcaccagggcaatattagcagaattggaagtgtaacaaatacataaaataatcagtgggtcgaatgagagggagatcacagagacaatgagggaagacagctctttatacaagatttctagtaaagaaaaggaggatccaaatcatgagctgaagaatccctggcagcctcaatgggtgaagagaggttttaatgaagcatcaaagcaagggatggggcatcttttgccttttgaggaaaagggcatttaatattcatgtgtttctcagtgagcaggtctatgcaaacctacctccaaagtcagaggaagctgagaggcctaagaaagaggctgacaaatcccattttttagaatcaaacatttcgcagggatttaggaacagaagccatgtctgtgtctcaagcagtgttgagataagatactggatccccatgccattgtccctcagacctagggcttatataacatagggaagtggtgactcagaaggcatgtgtaggacaactgcagtacaataatatcaaggttaatttgacctaagggcaggatttatggtaagcacctgctcttacataagaaacaatagatgaactgaaaatcgtagcagcttcccagagcaggaattaatcagaagtcaacatgttgaattagcatccacagtggagctgccttggcctgcacatcatctttgcaagagagctattcttgtattgacttcatgatctcttgttttgccttcaagcttccttaaaatccatggtttttgtcatttaaaaaaacaagcagggtaaggagttatggaggaaaggtggagaaatgttattttagatagcagtcagaaaaagcttgtgcgaggggagatacttcagcagtaatcataatgaaatgagggaacaagacatgcagatgactaataagagcactccacctctgggcacagtagctcatgcctgtaataccagcactttgggagggcgaggtgggccaatcacctgaggtcaggagttcgaggccagccctaccaacatgctgaaaccctgtctctactaaaaatacaaaatttagctgagcatggtggcacatgcctgtaatcccaacgtctcgagaggctgaggccagataatctcttgaacctgagagacagaggttgcagtgagacaagatcatggcactgcactccagcctgggcagcacagtgagacttcatctcaaaaaaataataataaagataaataaaaataaaaataaaataagagcactccagattaattccagcaaaggcaatggaattaatgtcagaaagtttatgggaagtttgaaaagcagtaaaaaagttaataaaattcattatggtcaatgaagtagacaatggtaaaatgatgccataaagaacactacggacaagataacagggaaatttaacaccatgttgagaactttggatttcatctgtgtaggatgggatgccatctgagtgcactgaaaggggatgtttcatgataagaaatacattttaaaaggatcattctagccactggacattgaacagatttttagtaggtattgaataattgaggacctgaaagaccctggtaaggagtttgacatttaatataaatgtgactgaaagccatttgagtgatataaataaagtatgaaatgatcaagtgtatgactttcagggatgttttagttgctgtatagataataatttttaggagaaccaggaagataattaggagaccattttagtggtccaagtaaaacaaagtagtgatttggactaaacagttggtaggaaatggtaaaaagtagttggttttggatattgtaaaggttcagataaaggaacttgatgttagattgaatatgtgatttataagaaatgggagatggccgggcacggtggctcatgcctgtaatcccagcactttggaaggccgaggtgggtggatcacctgaggtctggagttcaagaccagcctggccaacatttagaaactctgtctctactaaaaatacaaacattagccaggtgtggtggtgtgtggctgtagtcccagctactcagaaggctgaggcaggagaatcgctttaacctgggagatggtggttgcagtgagccgagatcgcgccactgcactccagcctgggtgacagagagagactccacctcaagaaaaaaataagaaagtggagagtaaaaaacaacttcatgtttggtgcctgagcaaattagaagttacgaattaatttgctgagacagggaagcttggaggagaaatgcttgtacacatggggaatcaagtattctttggacatgctgagtttgagatgcgcttaagctttcaaattggaatgtggatttagaagttggatatatgaatgtggggttcagtagagggtatattctcaggattaaaagtatggagtcatcagaaagaaatagataatgtggtgtgagatttttcagtcctctgcttttcaggtatttgctaagatggcatttcttagctctctgtggttatgtggagccttgaaaatagctatgagaggaagctattttaggctggaccatttaacttcagttcagtatgagaacttcaagatatctttttgttgttgttcctgtggttgtctcctgacagttctccagatggtggctgctccatctgtctgggtcccagattaaggacaacttatagcataactcccagctgactcacaatgatatagcatgagtgagaaatcgaccttgccatcttggtttcctgaaatacgggagttatttgttattgcatcatagcctagcccatcctgaaaaataccagaaataaataacgctgtaggactgagtgagatcacccaaggagtgaatatggaaagaagaaagaagaattccaaggattgagccatggcatactctgacagtcactaatcagaaaatgaagaggatgaagattaggcaaagggacagattatgaatcatttatttattttctaaaacaccattattaccgttattatttattttttgtttcaaaattgataacaatttaataaaagcacttttccccggacagcggaagaaaacacttgtttaaaaaccaagtagaaccaattatagcacgcatttgtctgtataactaaaagagtatttctgtatcaaaataagtcgagtgtaaagcctatttactttcagtttatacagattcctctaaaacaattttgactactgaggctgatgtatccacaagatgaagcctaagtcataaaatctgcttaacttcatcatttcttcaatatatttgaagttgtggtaaaactttatggcaaattttagtatgtagcatagtctagtatatcatagtccagtaacatttaatagcatataccaggtttttgactgaatttcctattttactcattgcagggtcattttgatttccttaatttaattatatatctctgaacttcagttctacataaactgaatcatttggagcaacaggtatttgttgcccaggtgatagcctgaagaaagacaaattggccacacacacacacacacacacacacacacacgccccgtaactatttaaactctataatatacactgagcaatgtgcacacttggttaatataatttcattgtgtgatacatgataggcaaaaatgctggtcccatgtggattcatgacaaaatatagctgcctccgtggccgccttcccttgttaggttctgaaaagctttacaacaaatgtgaaaatgccatatttccatcagtgacaggtatcagcttcatttataaatgtatattttgaaactattttacagctcttcttcctatgcaagaaagtttatttcaaggctgtcataatttgatctttttgaagacaatttaatttacacatatgaatccaaattcctattaagaaattaactgcctgtcataatactaatgaaaataaccctcctaaggtggccactgatgaacacatgaacatctttaacaagggtaagcacacacagacagatggtgacaattgtgtcaagggtgtactccttcccagcaaggtgtaagttttctttggatgttgattttaaaaccaaccccaatttcaaaaacattgaaatatttttaatgaataaaacttttgattgtttgaatattccccatcatctctctcgtctcattgctaaaatggtttctggttttctttggtttccttttctctgaccccacccatatgggataaaccagctattgccagcttaatttggggggttttgtgatgctaagtcataaagagggaagggtcgaagagcaaagtgaaagggtggaaggagaggtgtacaaagcctagggacaagaactggtgtggttggagggggattggtaacagaagagtaatcagcaggtgtgagtaaaaactaggtgagatgaaagaagaatgactaaatgtcaggaattggatctcctttctagacttttagaagtacaagtgaaaaatggagttcattttgacctgtttggacattgtctctttaaagaaaactgaactaggctgtttattttttcaatcatttattcactcaacaattttttattgagctcctactatatgccaagcattttctttggttcaaggaatatggtagtaaacgaaacagcctggttttcaaggagcttatgtgtaggaaagcattaattaaacaaatgaattagtaaagcatatggtagaaagtgatacattggctaaaaaaaaaggcaaatcagaaaagacagatagggagtcttaagaaccttccagggagaaggtacaaggtgaaggtcttgaattagttgaaccctttcctgttccaggatgaacaaaggtctatgtggatgagttaagtgagatgggagggaattcaaaagagagattaaagcagcaacagggtccaggtcttccaggtcctcttgggtcattgagaagggcagcttttgctaagaatgagataagactttggaatgtttggaggtttgcatgtgaaagggtcaaagaaacattgttttatttacatcaagatgctgttcattgttctatgtgaggccaccaacttaaatgttagattccaaaatattttcaaattcagttgtaaattgaagtttgatagatagagccatttcattaaaaaacacagatatgatattgtttctgggaaattaccttcagaaactataaaatgctattaaagcaatagtttaataaaaataaatatctaggacactttgtaaagacaacttggttcttagcaggttcaaagtaaacgatacctattattgctatcatcaaagtttctcttgatgtgagagctgactcatagtactaagatatcaattacacaaaaatataagattaatgatgttttatgtgatgataatttcctttatgaaatactttttcttggtgagctttaaaggaagcatttgcactgttgtaataatatctcccctctatcataaattgttctttagcagacatacagcatgctggagggcaaaaacaagaattaaatggaaactattaagagtaatgtctaggacaaactgaaatagattgcattttccattaaactaggatttgtggtgagagagtaaaacactactcagaatttaatgttggaagttcagaaggataacctaagtctaacccagaaaagaaaaggataggggaaagtttgaaatgttaacaatctgaagggctgtaaatgttattgacaaaaatgtcattcttttcttttttgcttggaaactttggttccgactttccttcttccggctttcactctatgaagcaacagagagaaactcagccttggggaactaagccaaagcaccagcttggcaaaatggctacagataatcagaattaaataagaaagctactgaataatgttctctggaggccaataggtctagtcaatataaggcactgggatattgggcagaagacaaccatgtctttccaactataatatttacagtcgctgcagacttgtaaagaagatgctccaaatatagtacccaagtatgtgcttggtgtcatttcaaggtagataggataggaatggatatctatcttattcaagcaattttccaagaagctaggccaaagttgatagaaagttgttgcagaagaggagaattcttacaacatgtctgtacattactggctcctggtagaaagacgttgcattcagagtcttaaatagatctgaattccagtgaagtcacttattagaagtgtgaccttgtgccaaatctctgcctgctgtatttcatcagttaaagagagcaatacttatataatgggattaaatataataatacagtgtatggtatacagcatgtattcaatgtagtttaagtattgttagtctcggtgagttggcaatcaatgaaaattggatactcagaatatcttaatgttcacaactatcaacctttcatactcaaatcattgaaacattgtattaatgtcaacaataaatctataaatttcactctccccattccaggaaatatacaaattaaaccatcttttaagtaacaattcattttggtggcagcctttttttgggggaggtattaattttctctaccttggag

SEQ ID NO: 2382 - DNA, 2556 bp, Homo sapiens
gagtttgttgcagacataattagttaagatgaggtcatagtggaatagggtgtgtcctacttcggtatgactggtgttcttataaaaaggggaagtttggacatagagacacaaatacacaaggaaagctccatggaagataaaggcagagatttacaagccaaggaatgtcaaagacggccagcacaccaccagaagctagcagagaggtatggaacagattcttcttcacaacctcagagggaaaaccctgctgatacctggatttcaaactcctggcctccagaacgaagtccctggagagaggacgtgatgtctgaagctatggcagccatcttgtaactatgaggccacaaacaagaaaagcaaaaaccagagtgaagcatggcagagcagaaagatggaaagaacctggatacataagagtgtcactgtgcagctgtacccaccctagactgcatatacctggactttaagtaaatgacaaatatcctttattctatctcaagccattgcttcttcatcttttttgtgtcatgacaatcacagtgggcggtaatatttgtactgccctctggggaacacagaggagactgctggcacctgaggtgaactatgctgggggcttcagctgccccaggactcctccctaccttgaagcctgaggggatacatatctctctgcacatctctttgtggctcatcaatgggcctcaccatacacgttgaaaagttctagtttaagccatacttacctgttacttggctgaatgcacttctaagtaaaacttggactcaatgctgcttgtcaatggaaagtgatgagatttataagatatcatacattctctagcaacatatgaatatgcaaaaaatactgatcttagcccaaatcacatcatatgattctactgacagaactatttgctatttaactcgtgttctttcttgtcagtaatggggccacttcctgattaactacaggcacatttcatgagatccaaacatagaaatttttctttctttttttttctgagacagagtctcctcagtcgcccaggctggagtgcagtggcacgattttggctgatgcaacctctgcctccggggttcaagtgattctcctgcctcagcttcctgagtagctgggaatacaggcacttgccatcatgcccagccaatttttgtatttttctagagatggggttttcccatgttgactagactggtcttgaactcctgggctcaagtgatcctcctgcctcagccttccaaaatgctgggattacaggcatgagccaccttgcccggcctataggaatgtttcaaacgatgcatttgagagtacattcataatggttgaagaattatagattttagggaaaaaagtttcattttatctagaagttcatcttatgggtcaagttattatgttttttatatggtcttaggtttgggtacacaatgaccttggcaataattgatttttctatgagcctgacattaatgtttctaagcaagtcccttttgtcagctccactggtgcttaccgtagagggttgatgggtgcattaaataaaataatatctgtaaagctcttggctgactacattgcatacagtacacatcaaagacatagttcttaggattattataaacaaaaatgtaaaaagaatgtgcatgaattaatggtagtcataactcattggatacaaaatatcttccatatggatacagtaaaatactacataaatattactataaaagtgctataaaaatatgaagctctcaccactccccagaactcatgtaattattttaacccgaggccagctctcaggtgacccaccttcctgttttggcaaagaagtgccatgctctggttacatctgagagctgtgtattcttaaacaaaaatatccagttccccacttttccagagatcgcactgagagggctttatgtgggagtcccttgtttattaagaactgtttctatgtcacgggaggccaggaaatgaattttaaatctgtcttaaccacagaatgacacacgggacaaatgacaagagcaaactggggagctctgctctctctcacagtgcctgggctgatgagttcaacacatctgtttgcacttgaaaagtcagatgtactaattattgttacaaacacaaataaaagtgatcaatgtacatcttcctgaaattaaaccctttatgaagcaacattgtcacttttggaatgccttcttggttcagtcaagcatgggcatctcaaatgttgcatgtggataattatgaaacattttctgagcacttatgccaaggacaatgagcaatatgatcagggatgtgcagttttcaccctgtagcactcttcctttactgcaggcatcatacacagctccaggcaagtcatttttcctaactctgtctgcctaactcactttgtgtagatttttcattgaataccatttgctttctattgtgactatttatacaaatattatagtctctcaagggcaatgattttccatcttttccatcctttctag

SEQ ID NO: 2383 - DNA, 11964 bp, Homo sapiens
ggaacagctctggtctgcagctcccagcgagatcgatgcagaaggccagtgattctgcatttccaactcaggaaccatgtaagaagtctgactgccctgctggagaaatcaaatggagaggtcaagagacaacatggagagagaacgcacagcccagctgagcccagctttccagttatccccaccaatgcgccacacatatgacggaagtcattttggtccctccaaaacaacctagccagccagctggataccactgagtgacctcagtagatgccacgtgggacaggagaattctctagtgagctttgcccacattccttacccacacagtcatgagtataattaaatgattattgttttaagccccaagttttggggtggtttattacacagcagtatataactggaacattgggcactgaagtagtggaaaccatacatgcacgttatatttccgttaaacttggaaagggaaagatctgatggagtgggaggatcacataagatcaagggagaatttttatgaagatgacagagacttgggagtgtgcatatgctgatggggaagagttaggagaaagagaatgttgaagataggggagagaggagatggctgatgcatgaggtttatgagaaggtaagggaagggatgagatgcaaaattctgctggacagactgatcttgcttacaaggatagtgggatgcttcgccttgtaaaacaggaagtgtctgcccacctcctgttctttaaaaatgtcaagcatatccatgtactagagtcgagagaatatatgaaggttagttggacagtactggatctcctaagaattgtttgactgaagccctttctctggattgctgactcaacccaggctggagttaagtgattggaatccacaccctcggaccagaatccaagttaccttctgctaaagccatacatacacattaaaaccacacttccacagagtcagcttgtctgggctcaatgggctctcaaaataatacagggttccattacctctgacccagaggttctctccaagagaaagagctgttgatgttacaattctgcctgtcactgtccctgttatagcagggagtgcgtactggattagtactccccagaaggatgtatggtcagttggattggtggtggatggcagtttgtaccaaaacgtcacttgaacttcacctttgacagctgcagacttccgcgtgctgataaggaattaaagaaagtggaaatgcaatgcagtccaagataaactactttacaaaactttgtcttatggaaaatcacaaacatacacaaagttagactagtaaaatgaatccccatatacttatcatccagcttcaacaattacagtgtctgctcatcatttgaatggcacacacacacacacacacacacacacacacacatacatttgtgtggatatatatgtgtttgtagttttatatatataaataaaactacatatatatttatatatatagttgattcttatatatataaatgtagttatatatatatacatatataaaaagtttattattattattcacagatttcatatttgcaagttcacttacttcagacttatctataaccccaaatcgatacttgcagtgctttcaatagtcattcatagacctgcacagagtggcaaaacaatttagttgtcaggcactcagtgttcccagctgaggttagaaaaggcaatgttcttgtttctgctctcatactgtaagcaagtgttcttttcgtagtcgatctagtgccatatttttgtggcttttttggtgattttgctgtttaaaatgtcccccaatcatagtgctgaagtactgcctagtgtttctaagagccagaaggcagtgatgtgccctgtagaggaaaatacatgtgttagataggcttccatcaggcatgagttataacgctgtctgctgtgagttcaatgttaataaatcagcaacacagtacatccagaaaaaggaataggaaaggcttgccagtctatatgtgaagacgctctgtatggtgctaaaataacatctttagtgtgtgatgaaggtatggaataaatggaaaagcagcaaaatttgtggattcataactactgattagaaaaagcatagtggacagcatggttgtgaggcttttgaaaaccaaagaaatttatggttatgttaacccaggatcaggaaaatgttaaacccttcttggctaatgttttactataaaatactgcatataatttattattttaagaaatatatattaaagaaggtgtctttagacagaagcatacataaaacaaggttgtgtattgatcattttaaggaatgcaaccagaggctcccaggaatctaaacctgtatttccactaggagcagtggcttggtatttggtaattcattgcttgaggtgactttatagaatataactaccacaaataatgaatcaactatacatacatgggtgtgtgtgtgtgtgtgtgtacgtgtgtgtgtctgtgtctgtttatgtgtgtgtgtgttttggagtactttagtgcaaattgctgacatcttaacattttatctgaaaatgtttcattatgtctctctaacatattggttcttaaagtgtagtgtgaggagtcctggagacacctgagacagaccctttcaggtgactgggaaatcctttttccaactacatatctccatgaggttggatttgtcttcatatactttatccaaaacagcatgttacaacattaaatgcagaagcaaatatgggaatctagctgtcttgtactgaggcagacatttaagagattttcagaaacgtaaaacattcctaaattctttgtttctgaaaatgcaattattttaataaaattttatttacgataatcagtggatttattttaaatacattaatacaaattttaaaatttttcagttttgatttctaatataataaatattgatagatctgtaacctacattagcaaaagctctttagggtctaaaagtactaatattttcaccatctgtatataatttttatttgtaaatatattattaaaataactgtcactttagaaaacataataatgctttttacaaagaagcactgatacacttctttttagcactgtttgtaaaacttgtcaaaaggaggaggaatttttaaactaccccagctgtgcacggaagacagctaacacaggaaaaacaagtctagcaaagaaattcgccaaggctactttctgccaccctggaatcccacactagttttttttttgtttgtttttttgttttttttgagacagagtctagctctatcacccaggctggagtgcagtggcgtgatctcagctcactgcaatctccacctcaccagttcaagccattcttgagcctcagcctcctgagtagctgggattacaggcatgtgccaccatgccaagctaatttttgtatttttagtaaagactcggtttcaccatattggccaggctggtctcgaactcctgacctcaagttatctgcccaccttggcctcctaaagtgctgggattacaggcgtgagccaccacacccagccccacgctagttatttttaaaaattattttaaggtaattatagactcacaaggaagttgcaaaagtacagagtcccatgtacctgaaaccacgcttcctctaacggtggcaccttacgttattatagtacaatatcaaatccaggaaattattacaagattgttaactagaatatagacctaatttccaccattttacatgcatttttatgtgtgtgtgtttttctgtgtggtcttatcccatgtatagatttgtttaacaaccaccacagtcatgatataaaactgttcaataggacctcccttgtgcttccccttcataatcatacccaccctgccccatccttgctccctggcaatgattaatctgttctgtatctctaaaattttctaatttcgagaatgttacataaatagagtcctatacaatgtagtcttttgggattgacgttcttcaccaaatgtaatccttttgagtcatatctgggttgttgtgtgtatcagtaatttgttccaactgagtagtattcccttgggtggatagaccagaatttctttatccaattactagttgaaggacatttgggttgtttcctcgttttgcaattacagataaagttgctgtgaacatcagcatgcaggtttttgtgtgactataagttttcatttctctgggataaatgcccaggaatgcacttgcagggtcatatgataagtacatgtttagtctcataggaaattgccagaatgatttccagagccttaccattttatattcctaacatcattgtatgagagatccattttttctacatccttgtgaacatttggtattactgttttttattttagccattcttataggtgtacaatgatagcttagcttattgtggttttaatttgcatttccttagtgactaatgatgttgaacatgtttttcatgttctttgccatctgcgtattctttttggtgaaattctattcatgttcatgctcattttctaatggaatctattttttactttttttttggagacagggtctcactctgtcacccagattggagtgcagtggcacaatcatgtctcactgaagctttgatgtggactcaagtaatcctcctgcctcagcctcctgagtacccaggaccacagatgtgcaccaccatacctgactaatgttttaattttttttagagatggggtctcactatgttgcccaggcttatctcaaacccctggcctcaagtgatgctctcaccttagcctcccaaagtgctgggaatacaggtgtgagccactgtgccaggccttctaatggaatatttatgtcttttttactgttgaattttgagagtttcttttccttttctatctcctcctaacaagtgcttttgcccagactggagtgcagtgatgtgatcgtagctcactgcagcctcgaactcctgggctaaaacgatcctcccacctcagcctcccaagtagctaagactgcaggcatgtgccaccatacctggctaatttttaatttttttgtatagagactgggtcttgtaatgttacctaggctggtctcaaactcctggcctcaagtgatcctctcgcctcaacctcccaaagtgctgggattacaggcatgagccaccatgctgggccagcttgtgtgtatctatgaaaaatccctctgggattttgatagtaattatgttaaatccatagataactgtggggaaaattgacatctttattatattgagttttgcagtcactgagcactgcgtgtatctccatgttttcagatctttgctagctttctttcatcaagttttacggaaagggatggatgtacttacgaactctcagtggcttcatcctggcagagaacaggaatgctgcttgctctgtgaactctgcagcctcagtgtcctcatttgtggtgacagctccctcttaaggtcattgtaaagatttaaggagatgctgaatgcccaagtcctgcctccagtatatgtgcttttctccttaacttcccactcattaccttttgggccttgagttttcatctgtgaacccacataggataatagtgggactgacttccaaggggttgttgtgaggaatgggtatgagaattcaagtaaagcaccaaagagactgccagacacagtaggggtaccataagcagtagctgttattacgatatgattgtagtgaggtgaaactataatttcttcctttcactgacagaaaactctcaagcagctggtccaaagagcataaacagcacaaggcaagtagcaggatgttgctgaaggtttgggacagtggagagggtttattttagcacagcagacaatatgaaagagagtatcagaaccacgtacctgctatgacccaacttttatagaaaaagaacaagaatagatatgtttgtgtttgtgtaaaagccgaagaacaccccagaccagactgtgggaagctggggaactttcacttctacttattcccctttctgtgtttgaaagttgttttttggcccggcgtggtggctcacacctgtaatcccagcactttgggaggctgaggcgggcagatcacttgaggtcaggagtttgagaccagcctggccaacatggcgaaaccccatgtttctactaaaaatacaaaaattatctgggcatggtggtgtgtgcctgtaatcccagctactaggaaggctgaggcaagagaatcgcttgaaaccaggagatgggggttgcagtgagccaagatcacgccattgcactccagcctgggcgacagtgagactttgtctcaaaaaaaaaaaaaaaaaaaaaaaggaaaaaagttatttctttttagttgagcgtgtgctacactaaacaatgttacaatacatttttaaattgaatgtattttttttttgagacaaggtcttgctttgtcgcccaggctggagtgtagtggcatgatcatagctcactgcagcctcaacttcctgggctcaagtgaccctcctgcctcagctccccaagcagctaggactacaggcatgtgccactacgcctggctaattttttcatttttattttttgtagagatggggtcttgctgtgttgcccaggttggtcttgaactcttggcctcaagcaatcctcctccagagcctcccaaagtgttgggattacaggcatgagccactgtgcctggccagaaattgttttgaaaggctaaccagtaaaacattaaccaatttacaagagaaaaacagccccatcaaaaagtgggcaaaagatacgaacagacacttctcaaaagaagacatttatgcggccaaaaaacatatgaaaaaaatctcatcatcactggtcattagagaaatgcaaatcaaaaccacaatgagataccatctcatgccagttagaatggcaatcattaaaaagtcaggaaacaacacatgctggcgaggctgtggagaaataggaacgcttttacactgttggtgggagtgtaaattagtgcagccattgtggaagacagtgtggcgattcctcaaggatctagaatcagaaataccatttgacctagcaatcccattactgtgtatatacccaaaggattatacatcattctgctataaagacacatgcacatgtatgtttattgcagcactattcacaatagcaaagacttggaactgacccaaatgctcatcagtgatagactggataaagaaaatgtggcacatatacaccatggaatactataaatatataaaaaaagatgagttcatgtcctttgcagggacatggatgaagctggaaaccattgttatcagcaaactaacacaggaacagaaaaccaaacaccacatattctcacttataagtgggaattgaacaatgagaacacatggacacagggaggggaacatcacacaacggggcctgttgaggggtagggggctagaggagggatagcattagcagaaatacctaatgtagatgacaggtcgatggatgcagcaaaccaccatggcacgtgtatacctatgtaacctgcacgttctgcacatgtatcccagaacttaaagtataattttaaaaaaagggaaaaaaagtaaaaaaaaaaaataaacaaatcagcaaactacacagaagaatattagaacaatttctctcaaatttctcttccattgagcttcctgcctgaccctagagctccctcacctctttggcttaccagctcccatccttcaaagtttctgagttattctgtggggaatttgagctactctcttcctttaggtccaggccatctcagctaggtccagagagcctcactcacctccccaactaagcaagcatccctggaggtatgttcttcatgcaagggcagttcctgagagaatttatttggttagctcataaagggattatattgttttcccctgcacatgagagagagtagctgaagtctactgactttaatgaaattctctgtgaagagtctgggagggacggtttaggtaatccatctacaagggtgctcagagagtttggagcgaagcgattggtgtcgttatgatggcattctatggcacagtagttacagtgcaccaggcactcttttaaagacttctcaagtgttcattcatttaattcttaccacaaccctgtgagggacttcctgttattgtctccgttttactggtgaggaagctgaagcagagaagttaactactttgcccaagttcctttcctcctttgaggataaggagccaaaggttcaggaatgcccaaatcacatccctcttcttgtccaaccacccaacctctccacaggcaacctgatcagccacctttatacaaagtacagtattcagattggaataaaaatatatctccttgactccctgctctgagaggtatttcttctcagactcccaaaagctggattgaggaacatggcttagttggtacagtatagcaaaatgtcctgcttgttgaaactgaatttgtgattatcttctttttcctcaagaagtcattgagggctgttgtatccctataaaaggagaatttagagtagccaaataaaagggggctgaagtagtctcattacggaaaaagagagtgtgagcagccttttagtaattgattgcctcaagatgtggtattcagccagggtgaagggaaagtagttggggctgtggatctggaggtttacagaagcctttacccatcctgagactcagttctgctgttggtcttcagagaagtgtctgcacctgctgagaagaaatcacaccactgcactctagcctgggcaacagagcgagactctgtctcaaaaaaaaaacaaaaaaaaaaaacaaaaaaaagaaatcagacatctaaatatgtacaaaaaactaataaacctctggaaaaatggactcagaataaagacatatacaaataaaaaatatttggaatgcgtactaaatgccactgaattgtacactttaaaatggtcaaaatggtgaattttttgtaacttttaccacaatgaaaattttggaacaaaaaggggggatagaactatgggtagaatacagaagaatcaggccagggatgatggttcacacctgtaatcccagcactttgggagactaaggcgggaggatcacttgaggccaggaatttgagaccagcctgggcaacagagtgcgattgccatctctaccaaatatatatgttcatatatatatatatatatatatatatatatatatatatatatatatatatatgaatcataccatttgatgtgatgtctagtaattgctttaaaatacttcatcaaaatgtgggggatgagacaaattatgcaacatattgataattcttgaagctgaatgatgagtacatggggattcatcattcattttctataatttcatgtgggtttggaaagttccattgaaaatgttaaaaacaacccgctcctcctgccaaatcatttgaaaacttaatttggggagtttcttagagctgagttgacctttaaatattattaagtattaaagtctctagtagctcagagttaaagggtattcccagcaagtttaagagatgaggaagggccctgaatgtgagccagagctactaaagtaggatgtgccacaggccacctctctttctgctctggttcctgtgaaacatagtgcttgttccagtaacgtcacctctaggaatgtatcctcaggaaataatcgttcacatgtgcaaacctgtatgtgaataaggatgcttttctcagtgggtttataacagtgaaacaaggaaacaaggtaatgaatggctctaaagaggctggtttaataaatcatggatacaagtaaataattggatttaatgcagttatgaaaaataatctaaacaccttggacctcagttgcctggtttttaaatgaagaaagccaaagaagaattgtattcctcaactagttttaggaggccagcaaacctttgataccaaaatctcacaaagacattatacagaaaggaaaattacaggtgaatctctcttacagacatagatctaaaaatcctaaacaaaatattagcaaattgaatccagcaatatataacaattgtaataaatcaggaccaaatcttgtttatttcaggaatgcctggttggtttattattagaaacccaaataatgtaatttagcattttaactaataaatgagaaaaaagcatatataatagatacagaaaaagcatttcataaaattcagcatccattgattattttaaaaacttatggtaaattaggaatggaaggaaacatttttaaactgataagtggtatttactaaaaacctgcagcaagcatccacttaatgttgaattgctcaaagtggtcccttgagttcaggaataggacaagaatgtctcttctcactagttgtactctaggtcccagtcgatgcagtaaggtaagaaaaagaaatgtatatggattgggaaagaagaaataaaactaccatcattcacagatgacatgcttgtgtatgcagaaaattctaaggaagctacagattaaaattattaagagattagcaaagtcagtgtacaatatcaacatcaaaagaccagttatatttctatataccatcaacaagcccttagaaaatgaaatttaaaccaatatttaatttatagtagtatacacaattaccttgaactaaatgtaataatagacgtacaaaacctcaagcaaaagttatgaagctttgttgacaatgtcaagtgtttgtgaggatgtggagcaacaggaactctcaaacattgatggtggaagtgggaattggtacaactttgatatacagtttggtggtatctagtgaagttgaaaatatacacaatctatgagccagcaattcctctcctacatatataccttgtgtgtgcacatatgtaccaggagacattaaaaacatgttcttagcaacatttttcataattgtccccaactggaaacagtccaaatgtccaccgacagtaaaaggataatttcttgtaaagtcgtagaatggaaagctgtaacacaatactgagaatgatgaactgatgccgcatgcaaccaggttgaatctcagaagcataattgtaagggccatgagctggatatagaaggatatatgcattatagttctatttatataaagctccagaaacagtagtgtttgggcatctatatttgagtggtaaagctataaaggaaagtaagaaagcaacagctaaaactgtcatgagagtgttttgttttgttttggagagaggaaagaggttgtgattgggcaaggacttatgggaatttctggagttctgatctgttctgtttcttgatctttatggtgatttgctttataataatttgttaagctgtaaatttatattttatgcactttcctctgctccccccgccccccgcttaaagagtgttttagaatgtggaaattttaagataagatctatctcagggcttgttgtaagaatgaaatgaagtataaagccatgtagagcttgtagaatatgcctggcactttgtaagaccttaataaatgttaactatctaaacacaatacagatttgctgttattattgcttctcttatttgttgccagccctgccccctttccatgatatttgttgccaatgtttctcagcttactgttggtattttatttctgttaatgctgtcttctgagttatcagtcttttcttttatactttctttcattactcttaaccatagaaagttctctccaacccagaggtttaacatgtattgtgttg

SEQ ID NO: 2384 - DNA, 897 bp, Homo sapiens
aagttttcttctgaatcctactctagattattttcagacatatcatttatcttctgaatcttaaccttatttgacaatgtttttcataagtcatatgtatttttttctgtctctcatcctcaaaccatgtaagatcagaatttccaataaacagagaagactgaccttgtgcgatgtgcgatggtaaatttttcttctcagatgcaggttggactgagacagacatgcacagtttccttttaactttacgattctgttaggatttcatgtagtatattcttctttgctcatgtgccatttttctttgttctcaagggccttgttatcccattatattgaactaatgcagtatatcaagcaaaacatattccaaatgaattggggtatttctttgttcatagatccttcacccaataagacactgtttggaaggacattgttccaaaaatacactgtgctgcttccttcacggttgttgagaatctgcatactcagctgatgaggaaactgagtatgaaaacggctggatgatttgctgaagattactcagctggttgggggagaaaactaatcagtataagtgtgctgtgctagtattgaggctatgcagcgatcagtgagaagcatttgaaggctgcctactttaaaccattctggttccattttatcttcctccttgggtgaggggtatgtgagtatatgtattgtatatgtatattttaacagccataattgagtgtgtcatatatacttttctcctctttaggttttggtagtccattgttattcttaaattaggcatcatttaccatttgcagtcttagttctcctagaatagttctttgtctttccaaaagctaccaatggtggcagataatggctagatttctcttcaat

SEQ ID NO: 2385 - DNA, 2756 bp, Homo sapiens
gtggagaacttcatccataagcaagagaggcgtctgtttacaaacttccacaggcagctgttctgttggctcgataagtgggttgacctgaccatggacgacattcgaaggatggaagaagagacgaagagacagctggatgaaatgagacaaaaggacccagtgaaaggaatgacagcagatgactaaagccgcctttcccctctgcactttttgcaagacagtggtcaacaggaagacccagcagctccaccctcccaagtgacaggccattttcggacgcagccgttctgtgcccattcttcaggcaactttcgattccttactgtagctaattctagatgcccttcagtattgtgaacaaatagaccgtctggtgtcacagagcccgcgtgtgcaggagcctgctcctccgagatacgtggcgtgtaggttgctgtagttacagcgcctccgtctctctccattgtgttccgatccatttctgtgtgttcccccaacctttatttccaagtgacattttcagtctttcaaatagctgccttttgtgatgtggtgatttaaatgatttaagttcatttgttctcaaccttggggtaaactgaggtattttgcttcctgggaagatcttcgcaattttgagtgctcctgtggggagcggggatgagctaaagatacaatgtttccctgccccgcaccgcttccacaaaatagcaatgtggttttgcagctctgacttctgctcccagtaacccatcgttagggcactctagcactatggaggtacccaaggctcagccagtctctatttaagaaaatttaacaaatacgagtaaccctgtcccaatcactgaatctctagttactactcttagaaacacctgtggcttcttggccctcctgttgcccgctctgaatctctctgcagtctacaaaatcgccccagtcaactctccacttggagggaattgtccagtgtggcccctagaattgagtcaccccctagataccaactgtctgaccccgaggagctctgtaagtccctgctcctcctcttccctttggggctggtgctgccactcagcaataatcctcttttctctgtgctttcttaggtccctgtcctctgtctttgaggctggttaggaagcaagagtcctgatctttcatgctgcacaatatgagcatgcaaaaagctttttccagcagaacatgttccctcgtctccagttgccggaaaggaatttggggatcaagaacttagctcgtcctacccccatgttgagttctgccctggaaaacccaaagcaagtagtgatcatagtacagaacccgaccaaagtaggctggtgaggaagtccaggctccaggggaacagacgctgcccagtgttcatagcttcctgcaacttgacagagcctgagtttgcctcttagtgggagaatgagagagagctgtagtgtcacctgacattccccaaaccttgtgaagcacgttggcctaagtgtgccgtgatcccagcccacactagcctgggtgcatctgctaatgggagaccaaatctttgtccgggaagcaagaagtgggtgggagaatgtatcctgtttttgtcagtttgtttgccttactcatttctaagtgcaataagggagtgtctcacaggattgcacctgtgacatcctgatggatgcttccctgtggccctcctggggcaagggtggacagactcagacccccagcatggttagcgctgaccttcattgaggtccctttggaaccagatgtcttgttacagacaccttcctctgtgtaagtctcctcaccttgaggggtctttagtaatgcatctgggtagcatctcaactgctggtagcatttatctgacttggaaagttggagaagaggcattcctactggagaaaaatgtcagtgttttcctataagctctgtgttagctattcattatatttgtgcttaaagatgttccttcattcatcaactaggggaagtccagatgcgggttatcttgaaagaaacaaactgacattctaggcagacagttgtctatgtggtctgagggtcagcagctgttagtctccttcctttggctcttgagacccacacatatcactttagccctaacaagggctcctcccacctccacctgttgccccagttgaaaagcatccattatgagctgaggtcagcctggatctggaattgcagcccacataaacataaaggaggatgtccctggtctgttccatccccacggatggtgttgctgctgggcaacagtgttggcttcttttaagtaccccctttcctcctcacccacctccaaactgactagcactcagagggacttatgataaaggttcagctccaggggtagtacctgagtgtgtgccatgccccttcagaccagctgcttccatcagaattccagggtcacagccccaacagaagcagcagtgcctctgtaggaggggtgctgggctctggccttctcatgcagagaggtccgggacagggtcagtatcgtgggcatgtgtatagcttcccaagttcttttacagtccctgctgggactccctgacttactttggttggttcctagtgctacttgttttacaaactacactttgtagaattgattagattaccttgtttatttaatgtgagtttgtgcctttttgtctcaatcttccaatacaggtatattgagaaaaaaagcagtctaataaaatcctaga

SEQ ID NO: 2386 - DNA, 2805 bp, Homo sapiens
gctatattccatttgagaggcctagttggcacccagttgtagatgccaagtgctccggagctcaggggaaaagcctgggctgcagatggactgtcaggagacagcagtctatatatggtatttgaaactgaatgggctttcacttatatggagagagaaaagagaggaggagcttgatctaaatctggaggccttccaacatctagaggtcaggtggaagggcaagagccaacatcggaaattgaagagaagcagccaaggaatgagaaagaggaaaactctgagaaagcagccacacagaagccaagcgaagggaggatttccaaggtcagcagatggagcaaggtggttgtactacaatcccagagtcagacctagaagaaagatcagtagaacaagactctacagaactgtttaccaaccacagacatctcactgcagagacacccaggcctgaagtttcacccctccaaggagtctcggaataattcaagtagagttgtttggttgagaggaacatccccatctcaaggccgaacctgtgtgaacctcatgccaagcacagatatagggctggcgcaggtgcttcctaaagctcaccttcctggagatgacatgcatagaaagaggggttgggactttttacttcactaggagaacttgtaacaccatggggaagtcagctgaaacttgtcttgttttgccaggaaaggaagtagttgcctttggtcatccatctgctaatagtcacagaatacagtgaaatgacatagttttgggttagattttataatgcaaagattcagatccaaaataatttcataccccattttttcacagaattcttatatagtaaatgtatcaagtttaataaagcatctcattgtcaaataatatcttggattttatttataattagagggatttatgagtgattgctctacattatttcttcaaaggaaaggaaaggaattgaagactttgctactctctggtaagacttgaatgtgattattttataaataaaagaaccactatgaaactttcatgtgatttgttctattaagctaaacgtggaagaagggaagttttctagtattgtatgaaaatgtttaaatattttcaaggaagctagtacattaacatccccttttcattaccccattgggtggcaccttttaaaaatccaggttattaaaggattcacactttattacagttaaaatttaaggtttttatgtgtaagaagtgaaagaaactttgctaatttcaagttcgaattacagttgtgagattgatttatttaaataaaaatatgcctttgccagttttggaatgcctctcagtacaaaggggaaagttgttcatggtttttctatatgtgaaatgtcaaaaaaaaactgcagaggatgtattacttattatttgtagcatcctcttttaggagatgcagatatattatcaaaataacatcattatgatcatttatagccatgatatgagcataaaattttactgaaattatcattttctctttaagtcctttatgtcaaaaagtaaacctatcagtgaaatacaaaaacaattatagagatggttctgaaagagcaacagaaggctgtgtggattctattggatgctgtcttctcaacggccttgtgatttatgcagtgttgaattagctggcattatttttatgttttagcaggtgaactatggaagctatgtggacattacatgcattaagggttttgttgctttggactggaaaatatataacttatggtacggcacaactgccaaggcctaatcagagtaagatgcctcttggaataaccactttccccagtgcttaatgtctggagcagagagggtctctattctggctaatgtggggaaaacgttaccaacaccctacttcccagatttttttgccatcatttcattttaattgtaaactcagaccccaacccttcacttcaaggctcattttgaatcaattatctccttatccctacaccaagagccacattcgaggtcctcttggaataagtggacaaggcatcatggactgtacttttagccctattttctggccctttattatattctcctcgtttttgtctttttattttgcttcaacatttagtgtattctctcttgttgtgtctctcttatatgccccttaaatcatttctataatggaatggggaaatgaatatagtcccactgtctcctcttaaggttctcctaatcacctttcttggcattcatcttccgctctttagaatccctggagaactctatgcctctctacatacctctctcttacttattgtatttcagaagtcatgttttcctttcctggtaggatagatttgcaagctccttggacataactgttcttggattcttttcgctgcttggtaaatatttgttgtatcaaaaggtcaactaatctcctaaaagaagtcaacaagtcatagagaaatggagaagccggtgatttagaacattgtggtctaaccttcctaatttagtatttcagtttatgctgagaggaagctgatgtgactgtcctactattttttcttaaatttggctttgaagagagatttgaatcttgaaaattcaatacttaatgattttgttcatgagtacttgggtaacattgatttaaacacaggattcaggttttaaataagatgaataaaaattctaatacaacattagttacaaaaatgaacatttatttagaataagaaaagaataacaagtcacatttgtaaaaagctgataatcacc

SEQ ID NO: 2387 - DNA, 5521 bp, Homo sapiens
atcggaactcgcggcggggttgctgggtcttccaggatcgcgcattagcggacgctggctacgggtggccgggcgggatgtaaccggctgctgagctggcagttctgtgtccccaggcttcggcccggccgccgccgcacataaactgcgaggaggagctttacgacttctcggtcttcggggccgggcgcagcaagggccagactctgcgctagcaggcgctgcgcgccaaccggccggcccctgtcgcagaaggtgcaaccgatcgcactgtcgcgcagaagctcctcaatggccagcgccagctgcagccccggctgcccactcgcctcacctgagcctgggtggaacaatccaaagttttaatcaaagaaggtggtattcagttgctgcttacaatagttgataccccaggatttggagatgcagtggataatagtaattgctggcagcctgttatcaattacattgatagtaaatttgaggactacctaaatgcagaatcgcaagtgaacagatgtcagatgcctggtaacagggtgcactgttgtttatacttcattgctccttcaggacatggaccgttacataactgaagactcccaccttcaggcaggattgggtagtacatgtttgtaactacctggcattgccttttgttgagacttaaaccattggatattgagtttacaaagcatttgcatgaaaaagtgaatatcatcccacttattgccaaagcagacacactcatgccagaggaatgccaacagtttaaaaaacagataaagaaatccaagaacataaagttaaaatatatgaatttccagaaacagatgatgaagaagaaaaaaaacttgttaaaaagataaaggaccatttacctcttgctgtggtgggtagtaatactatcattgaagttaatggcaaaagggtcataggaaggcagtatccttggagtgttgctgaagttgaaaatggtgaacattgtgattttacagttttaagaaatatgttgataagaacacacgcaggacttgaaagatgttactaataatgtccactacgagaactatggaatcagaaaactggcagctgtgacttatcatggagttgataacaagaagaataaagggcagctcactaagagccctctggcacaaatggaagaagaaagaagggagcaagtagctaaaattaagaagatggagatggagatggagcaggtgtttgagatgaaggtcaaagaaaaagttcaaaaactgaaggactctgaagctgaggtaatcagtccaatattccatctcttagcagacattgtgttcctttttaaatagtatcttcagtaaaatttatagataatataaccttcttatacatattttttaaaaattaataccctagcataacaaaatggagaaatttctacaagcaagcactgtttacaataaaataatatagacttcaatacataagtgcttggacatagtgtattaggtatgacagcataatagagtacttacaatgaattattaaagttataatgaacaagtgtgagttgggaaaaataaaattataagccattccatacaggtggcataagaacactaaaaatgagagtttggggtggatgtatgcacaaaaactagtgttaggataataataattgaccagacttatttgtgtatgaatgaaaaagagggaaataacctttactgaactaaagacatgcctggataaattacacacagttaaaggagagaaaattagggaatgtgatatttttgctaacaggttgggccttatttataatgtagtgtcaaggaaactcctagcgtcgcaacattgggcagggtaatgacaaaacatcccagcagacatatctactatcttgaaacccttctagatgtcgagttatacatttagtttctattagtcaaaaagaccttggagacatttccttcattaggtggcaagaaagaaaagatggagaaaaggataaacttaatataagaatccacagagcagtagtttgatagatatctgagaatagtaggaaaaaaattgggtaatcccaaaataaatcagtgatttcagtatgaagttttctcaacataaatctgctataattaaaaattacaggccttcaggaagtgtcgagtctgggacgcccagcgcgggcccgagcagggggaagggaagcgcagctcggtccgcgtgggtggaggggacgtgaagccgccctgagatgatggttgaggaagggctctacggctcccaagctaggccaaatgcctccggcggccgcgcccgggcgccccttcccctgtggggcaaccctagcttgggacgcgtgaaccacctccgtagctgccccaccagcacccccagccgtgcgcccctgcaccatgcagctgccctgcgcatggagccgcgagggacagcaggcccagccctcagcaccacctgcctgccaggaggttcgggaaactggcgccgcagcggagagggcatctgtccaacgcctcccccggggctcagctgcgggcccccaggcataggcacccatgacccttctgtgttgtttgtctttgtatagtctgcagatgtggatcctgactcctgagagaagtagctcaccgtgacgaagctgcgtttgcttttatcgatttgcaaatcaaagaagggggacatattgggagaaggccccccaaaatctggccataaactggccacaaaactggccataaaatctctgcagcactgtgacatgctcatgatggccataacgcccacgctggaaggttttgggtttaccggaatgaaggcaaggaacacctggcctgcccagggcagaaaaccacttaaaggcattcttaaaccacaaacagtagcatgagcgatctgtgccttaagggcatgttcctgctgcagataactagccagacccacccctttatttcaggccatcccttcatttcccataagggatacttttagttaattgaatatctatagaaacaatgctaatgactggtttgctgttaataaataagtgggtaaatctctgttcggggctctcagctctgaaggctgtgagacccctgatttcccactttacacctctatatttctgtgtgtgtgtctttaattcctctagcaccactgggttagggtctccccaactgagctggtctcggcacttctctttgccttaaaaacaggtacagcggaccttcctggcatcagaaaaaggcctccagaaaaagagacacaggtactagcaattccaaattatccagagcccttctaagttgtaagatctgaaagaaatgtctgccatctatattctcagccacacttagtttcttaatctgcaagatggaattaataatagtacttactttatgatgctgttgcagaaattcactgagttgctacacgccaaacactgagaacccagctgggcatataataagcattctattgcatggcattattgccatcatttttacttctattactgctactgcttgtaactgcttgtaactgtttgtgcttttttgatatgaaagtccaccatcagggagcactgtagtggaaaaggtattaggccaggcatagcctttagttctctggccttgggtccttcatctgtgatattcagttaacaatacctagccagtaggggtgttaaagattaaataaatgtgagaatgtgcctgttgcttaatcttcctcaaagggttatggactctcagagccagaagaaggtcatctctcctttgctcctcgtatgctgggatctgccacatcaatggcaaccgctgggcctccagaatttgctccagggtgtttggaagtcctgacaccctcctgatcttctctgtaacatgcacactttggcctgtgtcagtttgctggaaccacatcaggccggccctcttcctgggacaaaattctttctttttctttctttctttttctttctctttctttctttttctttctctttctttctcttttcccttccttccttccttccttccttccttccttccttccttcccttttcttttcttttctttctactgtgacatgatcttggctcactgcaatctctctctcctgggttcaagtgattctactgcctcagcctccaaagtagctgggattacaggtttgcaccaccatgcccggctaattttttgtatttttagtagagacagtgtttcaccatgttggccaggctggtctccatcacctgatctcaggtgatccacccacctcagcctcccaaagtgctgggactacaggcatgagccaccacgcctggccgagagacagttaagttatactttaaatgataataggcctcccccaaaactcagctgcttttgtaaagctaatgggaggccatcaggctgggggcaaggaggagagcccggatcctgctaaggtgcagacataaacgagtatcagccattattctggaggttataagatatgcaccttccccaattacccctgcaatcacaccattattgtagattggcccttagagtatcttttcaggttttttggcatgtctgacactcatggctctacttggacccaccaaccctgctcctatggctccacccagaagccattcagcctagaggacagctctgaccccccctgtgatttcatacaatcagcagcaagtaactgttacctcaccatccccaccccttctgccagactgcctttgaaaaacctctaacctgtgagcacgagatgattccagaacaaactctgtctcccatgtggcatgaccagccttgggtctcttaaactttttctccactataatgccatggtctttatgcagcaggcaggaagaattcaggtggttataattccgtatgtgctttttgaacatttttctactgggctattgctctcttcataatgatttttttaacttctctctataaggaactgatttcatctgaaattgaagagacaatcagagaaaaactatagaccactcatgatggttgttatatgtgcttggctgggccatgggtcccagtgtttggtgaaacacagcagcagatgtccctcacacacatgccctcttggttctgtttctttgaagaaccccaggaaaacacacaaaggaaaaacaactcgatagacagaagattcttcaatgacaacaatggaagccatcttcaccattcaactaaacttgaatgggatattatcaaacttaaaaaaaaattatcaactgatcgtgtaatcagtttcatcttttaagacaggaaatgaaataaagtatttacagatgaatgtaaaatgaacttatcattgcatcctgagctacagtaacttctgagagaccaaaaaagcaatactgtctcagcaagatattctaagatacaagaaaggctagtaaaatggagagtctatattacattttaaatattatctaaaatgtaattgtgagattcaaaaaggcacaagatgaaaacactgg

SEQ ID NO: 2388 - DNA, 3398 bp, Homo sapiens
attttagagcaaaatgtaattcaaaacattaatctcccacaagttaaatattctcttgctctctgaagtactttctttgcttcactagtttggcttttttttgaagtgcagttttcatatgaacaatttctagtagaccttccagatatacagcatcttgttaaaaattcatgccagccagaatacaagaaggtcagaaaatgcctttgaatttacgccatggtcttttcgataattcattcaggttttaaaagggaaattcctcattaagtaaaggacctaatgcttattaatttatatgcttaaacaagggactccactaattcatttattaaatatcaaagaccatatgttttcacccctgtccttgcttattgattaattgtcttcagccaatagagaggaaagcagggggaaatctagtaaccgaggtaagcttccatctcctttttaaacttaatgaaaaatggcacttctttatatccctacgcaaaatcccaaatgacacattttaaaatgagttttcttgtgtaggtgtggagtttgcaatacttgagagatgcgattcaatcatttagatgcaatggggatgatatgcacaagtggagaaaataaatgctcttttaccattcctccacactttgagacatcgaaagaagaaaggatgacaattagcagcaatgacagtagcagtaacaacagcagcagttactgtttgtggaggattttctatgtgccaggactattttaaacactttacattcattattctatttaattatcacaacactctgatgcagtatgtattatatttaatattctaattttatagatgagaaaatatgaacaaaaaagtagcatgcccggtcacacagctaataagattgaaaatcacaggactttgttttatgaatatatacaagtatcttatctcagtgttcatgcttttttattcattcatttaactaatatataatgaacatctactgagaagtaaaataattttaaatacttaaatgttattattctgtttaaggtcttggcagaactttagtctttcactggcagaaactttggctgaataagtatttattaaagtaacaggaaacacacctcatctaactgagagtaaaaattgtcatggcttttggcatatatttctgttcactgatttattagcctttaaaaacgtgcaaaattaaatatgtgcaactgacaccacagtaaggattatggttaattcattttataatcatatctcagacattttatgagagctagatgatttaaaatctgatgtgggatatagatctttcactcattcaatttgattatggtcaggaggtcctgagccatggaaagaacatttattacctgcttagtttactagggcaatatttatacatagttatctataattcgaagaatactttgaagagaaatgccaaagcttgtttctctttcacagcatgtttacagacttcaaaactaaatggaagtcattgagaacttattttcaacaattttgtatttcattattcaaagaaagaaaaactcgcttaaagtcataattgttaatgctaattttgtgacaaattaatatatttgaatgacttaaatattctcacagctactaaatatagattgttttataagatgtacattttactctttatatacgtgagtacatgactcctagttgaagttcagcagttaagattgaattactaatgatttgaaaattgatgatatatcaaatttcatcataagccagaaaacacagttctaccttcttcaaaatctccatggccatttgaaatagaacatagaaggagattggtaataaatatataagttgtcttatataaatttttcttcaagaaagaacaactgcccatattggaagacgactagaaacctctacttgtcacttcatttctgatgttaaacaaattgcttgtccctctggaccttgtgttaaataaatgttagacctgtcaggaaactaataggaaacttgtccaaatgctcgctgtactgccagcaacaaacctatcctatttcccagaagaagtcactcttcctttggctgaaaacttccagttgtaatagagaccctttccttaaggacagaccattaaagtgaacaatctgaggcttgactcgaggtcagattttagacaataataatttttccaggttcagttgacctcatccacacaaatatctaccaaaaattcacctagcgcaggagcccttcaagcatttgtaggtgattgtccttgaaaactgtcatggaatcctcacatatattattttttaaactttaaaatatctagctcattaaatcatttttttaaagatcttaacacttcaaaatccttctttatcctattaattcttcttttggtaaactcttatttaacattacctttaaaaagcttggcatccataatagaatatagaattccaagaccagtatgactctgagtaagaggattacacattctataatgacgacaactcttattttacagaagctaaacttacattagagaggactgttttgtttttattttgtttttatttgtttaatagccacatcattctaatggttcacactgaacgtgcaaactaataaattcctctatcttttagcatataaattgctagccacaaaactattatcttgtactttcataaacaaatgtttaacacaaaattcagaagtcagtttttttttctctcatgtaaacattacattaccacaccagtattaagggcaattttaaagtagacttttgtcattccacgtatatgttcatcctaacatcatgtcacctcctagtcacattctggattctctccaactgtcaaaatggaggtttggacaatataggatacacacataccttcagatacactttggagattagtttaattagatataaatcaaactacttttatcatgatgtagcactcatttactttaaatctttctgcaatacaatcaagatttgttcaacgccttgctgaaagcagtatctggcctatctgtgatcttgccttgattattatcaatctagaaattgtatcaaaaaataaaatgaagttgaatggatcttctatattaaataattagttttctaaatgcccctaaactattcgctaaataatcttttctatttagtctgttgttctggatgagggttctcagtcttgactgtacattagaatcactgggagttttggaaatataacaatgtcagtgcttcccccacatcaactgaatctgaatatctactagtggagcctacatcggtgtatttgtaaagctccacaggtgataatggcagtttctaggacacatttgcccaagtaaaattataccactggtg

SEQ ID NO: 2389 - DNA, 9866 bp, Homo sapiens
ctctgtttcaaaaaaataaataaataaataaaaataaaagaaaagaaataattaaggcaaaactgacatttctttattaatataacactgcgcaataagtttaaattgatttcatagcaaggggtgttattaagttagtcttacaacaaactagagagaaaaatcaattgtatcatcaaaagttattttgaaattttagaattcaaaatagagggcaaagaaaacaatacaaaagcaaaatgaaataaaaaacattgcaactcagattttcacattctttaggtgttagcatctgacatagaaaagttttttttacaagtattgtgatgaaaaatttaattcacctatatgttggcttattttaattcatttaattgcagtcaagacacagttaggtccacatactacatagtgataaaacaagggaagtttgtttgtggcaaatctcttattatgtaacttttatatattacgtggccagaaattctcaccttgatcctcactatttttttgtttcagtaaaatattttttaaaaaaaaaagtcatgaaaaactttatgtagtgtttaatacgttaagacatatgatttttaaaaactttgtaatcaatattggtcactattgtctgtctctgccacatgccacatctctccttaacctatttatagccttcagatttctgtttttagttcgtgatggttgtcattgtcactgtatgtgtgtgtgtgtctgtgtgcgtgtgtgtgtctgtgtgtgtgcatgtgtgtgtagtctcattttgttattatgtcctctgccactttctttgtaaatgcaaagagggataaaaattaagcttaatatgaagcaagtacttggcacctgctttcaaagaactgtgaatcataaatggaagacggttcattcggctacctcataactgtatttaagaccagcctgccgggtgcggtggcttatgcctgtaatcccagcactttgtgaggccgaggtgggcggatcactaggtcaggagttcaggatgagcctggccagcctggtgaaaccccatctctactaaaaatagaaaaaattagcctggcatggtgacgtgcgcctgtagtcccagctactcaggaggcggaggtgagagaatcgcttgaacccggcagtgggaggttgcagtgagccgagatcgcgccactgcactccagcctgggcgacagagcgagactctgtctcacaaaaaaacccagcctgtggattattttaaatgttacacttttctatcctggattctctgtttgtttattgtttatatgttctgtttgtccatcgaattttcctatttcttgaatcgttgtcagcatattatcctttactcattttaacgtagtttttcttaatttttgaaatgtatttgtaatagctactttgtaactattttgtagcaatctttgcttaatccaacatagggtccactcaaaatcactttctattgactaatttattccatatgcttttcaaatatgcatttccacatcactcctaagtttctggtcaaagctggacaattttatgtgatatactatagtaagactggattttgattgctttttctaaaggtttttggatattattttattttgtgattttgtttgtgcctgtacttaaactgtgggatctgtcttgccatggtattcagctatttatatctctttacaatatttttcttcttttttaattcctgatttccaggggtcatttccttgtaggcactgctatgtgattaaccaatggtttgggcagaacttacagtcaaatgcctcaaacctatgaggcttctatttgacaatgtaattgtgtataggtaaaagaaaaacattcaaaattcaagcaactttaaagtctgtttcagcttttactttctgccaggcccttggatctctcctgcaaatatgtgtaatttctgagtcagccaggaatgtgtgcttacctactctttctatggctttcttatttacagggtgtccctgttacatttctggatcatgcattgcttgtcccaattgggacagtaacctcatggttgcagagatacaggattgaattcacaggtccatgttgtatttcgttgtcatgtctccttggttggcaatatatgaacgtatctcagtcgtggaagacattgacacttttgaagagtacaggtcaggtattttgcagaatgtaccttaactggggttttcttatgattagactcgggttgtggaatttggggaagaatatcacagaggccaggtgcccttctcatcacatagtataggggtacatgatatcaacatgacttatgactggtgacgttcaccttgatcttttgattgtaaggcagtgtctgtcaggtttctctaccgtaagctttacagtttttccctctccatacttagttcattagaagtaggttactaagttcagcccacagttaatggagagagaattatgctatatcacctggaaggaggaaggaatatcaaagtttaaagttgtgtcaaaaccacgtggtaatgaataaatgatttaagggaggtatttgagactcttctgtaaatatctatttcttcttaaagttttattcactaatttttagcattaatcagtgaatcttcactgcaataattattactgtggtatttaatggtgatttaaaacaaatttactaattctatatttattatttggatttttctgtaggcattattttctattatttttgaaaccagtttttctgcctcatttatttcaaaacataattcctcagattcaccatgaattgtacaacactgtggctttaaacatacgtgccatgggaatagtctggaatacctttctcctgtcttgttatcaaacacgttttactgcaagaatcaatgaaatgctcttactaacgtctgaagtcttgacttacaatttttaccatctttaggaaaatgattatactatggatttgtgtcttcaaaaaagatatattgaaattcccagtatttcagaatgataccttatttgtaaatgaggtcattgcacatataattagttaagatgaggtcatactcgggtagggtggttctgttatccaacaggactggtatttttatgagaaaaagacacagagacacacaaggggagagctccatgtgacaacagaggcagagatgggagctgcaagccaaggaacaccgattgccagaaaccataaggagctaggaagagacaagggagatttttcccctgcaagtttcatagggagcacagtcctgctgataccttgattttggacttctagtcttcagaactgtgagacaataaatttctgtaattttaaatcacccggtttgtgttactttgttacagcagccctgtgaatctactacaatttacaaaacaacacagtttagaccaaaatgtgaaatattaagttaaacttgtcacagcctcagaatgtgtaactctaaaattaaaattggttgaatgccctttttaaattttagaaactcagagaaacgctggctttttctttggcatagaattttatttaaaagattagtccccaagttcggaaaatttgtagtatatttatgtgatgtcaatgagaacacatatcattttaagagatatgtagatgttgacatcattgtaaagaatgaatttaactggaaagtgaaaaagttaatcagtatgcctttgaaaacagaaagatcataggaattagcttgttttaatatttacatatttttgaaactagggaaagacaaaaaattatagagtgcatggtttgaaagatggatttagaaattatcctattactaattaaaattactaattattaagtaattatattactaaattacacattgtttaatgtaactaacattcattaattatccaatatgtgccaggcacggtgcaaggtgctggaaatataaatatccacaaaataaattcattttctttatttaataattaaaaagcaactcaaagagaggaaaggcagaataacaacaaagtcattcatgtttaccctcatgtgattgttgaattactgtatactctttatttcagctgacattaaaaaattgcattttatggaaactcatgaaagtttatgtgcataagggaaattaagaaaataagaatgatttgtgattaaataatggcttagatttatttcagattagatcattcagatgtcagtaacggtatttaagtacactatatgcaatggtgtgaaaatacgtaaggtaaaaagtttccgattaatgcaaaatttattcagactacataggaggaagcatgacaggaaagagaatatacgccatggagaaaaatgatgcagggagggaagagagagggtgaccaagactggacgaaattaaagttcgtgaggcaggagcatgtttactcttttagaggaattgcaaggaggccagtgaagctaaaacagagtaataggcaagaatgaaacatgtcgattaagtcagtgaatggctggattatgcaggaccttattgaccattataaggatgtttgctttattctgagacacagaaaaatcactgaaaaaatttgaggagaaaaaatgatctcataatcatagaagtgatgatacgtgtaaacactacaaagagactgcttttctgcaggcattaaggccagggagagaaacccaggaagaagtgagcattagttgtaactctgtgtaagtgactttgttttcttctttggtatgtttaaaacctttcatgaagtgcacttttttccctgttgctaaatcacagagttgggctctgctaccctgagactatgtttaaacttgattataagacactggtagataatgacggctgtaataacatcctatcaccattaaacataaaagctgatgataattaccagcccatcttgacatatgttatatcattttctgaaaaacgtgtttttgttgcttgctgcttcaggaaagtaaacatattagactttggacgtcatcaccagggtgttatttttggatagttttaaatatgttatgctctatgattggtaaagaaactgcattatattctatgtgtaaataagtataatctagaaaatactttttagaaatggctaaacttgaccgtgtcaatttctgtcttgtttctagcatgtgaaacatctaaaccaccagtagtgatctaacatataaaataagacattgagcctaatgattttttgttacaatttcaaatgtgtcattttcattgctatatcacattgtacagtgaacaatagtggtagaatttcagatgtttatgaatacatgtaaaagatggctcatggaaatcagaatgaaaataggttatgatgcaggactcttgtaggctcagagacaaacaaaacacctccaaactcaaaaaaaatccacacatttttgaccactcgcaagtaaattttctttgccaagacacatagggaagaatgagtaaacagaagatgaggaattatttcaaatagtaagctcttaggttcttagtcattggatgcatgaaaagcaattagaactcttagatatacagaacccaggctataaatgtaaaatattcctcctatcttgatcctttacccatgtcagatatcatgaaaataccaacattattttcttcatagttagaaatagcctcaaaacctttcttacagattacagtgacgtaggattgaaactttttgttatccttgagctagggctctatttctcaacaccgacactatagacaatgtgaaccagataattctttgttttacacggctgtgctgtgcattgtggggtatttaacagcatctctggccaccacccactagaggccagtagcaactactctgtttatccctacccccaagtcgtgacaaagaaaatgtccccagacaatattgccattgtttgacaaccacttccctaaagatagatatacctagtaaataaaggactttaagataaagcatagaagaaaattcttaaacttagcttgctatggtattagaaatgccatcatcaccttctctgtggctattcttccctctagcatgttcagcatggtaacttctggctctcaccctggtttttaaaatttcatgtccaggcatcatctgtctcacagcttttgcctaggagatcctgatgaggtactgaaaagatatttggatattaaaaacaattgtcactttaacgtcagtctcaggctgatgttatttacttatttaatgagtgagtttctgcattgggtgatggtatataattttatatagatcctcatgtatgtttatttgtttatacatatacacatataaaatctatctgtatgaatagacctatataaataaatagtttttttttttgttgactgacttgattcttaatttaactctcgtatgtagtttttaattgtgatgttttgtgaaagaaaaattcaatggatggtaacagtatttgtcttagaatatgctgaaagccaaatgaaagggagagagtgaagtctctgtaagtaatattgcattttgttttgccatttccctctgtttaggagcatctattgcttttagaaagctaatgtttagtaaaggaaccctaagaacaggaattaggtagaatgattatttattctctttttaatagccacatggttttcccacacatacagcttcttacaccgtcaatgggagttctatgccaaggacagagtgacaacaattggaaggaaaattgaaatttacttttgttgtttagattattttggtaaccatggtaatggaagaccaatatagcactttaacactcaaaaacaaatttaggataagttttatttattgagataaatattatgttacattgggaatactggtattttgtggctgaacattttgggctttaacagatggacaatttattttttcacctttctccttccaaaactataggcagcagcatcaagaaaaggtaaaagacttttagataatgcatttagtaaaaaaataaaataaaaataaaaaaaagtattacagagagatagcaaaaatatattgataacacaagtatatagaattcaatcaaatttgtttctgaacttcctggtaattagagtataaacacataaagttatttaatttaaaattgtgaggatcattatggagaataatactgtgaaaataactttgactgatgattatctgatttttttaaagttacttttctctcatcaaaagccatgctataaggataagcttattgatatctactgttgtcctggaatagtattaaaattggacatacaaagatattttttattttacttaattgtacattagtgtcaccaaaatatttgataaaagtgttttgccaacatattttttaaacacttaacattaaggaattctatgttttatttacatggagcactcaattcagagattcttttcacaaggaaattttggctccagatcttctattctttctttgtttctttctttctttttttttttttttttgagacacggtcttgctttgtcacccactggagtgcagtggcataatcttggctcactgcaacctctgcctccccggttcaagcaatccttgcgcctcagcttcccaagtagctggaattacaggcacgcgccaccacgcctggctaatttttgtatttttagtagagacggggtttcaccatgctgaccaggctggtcttgaactcctgactttaagtgatccgcccacctaggtctcccaaagtgatgggtttataggtgtgagccaccccgcctagccagagtcttctattctttaaataaggctgccttctggtaacttgtctgggcctaaaagccaagagtttacacattgtataattatactatacaatgcctggctttcaaaatctttagattcaagtcaatatacattaaaaaaaaaaaaaacccttaaattgtttttaaattacttttctcaatgactatttcaatttactctcaggaaaaccctgtgagacaacatagatattttcttctttttttaaaataaaaaaatactgaggtatacaaaatgaaatatgatatagtagcataaatgaagctaaatctcaggggttctagctttcagtcctttttctgtatgtgactgagcgtttgctctctctcaacacacacacacagacacacatattcttgtatgatacacatacatatatgtttttatttagacaaaaatttagggactatcttttttacttccttttctattttaactttggtttaatgggttgatattacactgaagttttcttaaaaacatgtttagagctgccagtttctttttgtaaagaaactgatagaacaatttgatgtgtgatctgtgtttaatatttagggctcaaggatcagaaagaagagtgttatcctaacatatatagttatgctgaccctatgtcctagtttgcttggaatagtatgaatttatgcctgtagtcctgagataattattaatagcatttcttcaactttcaaaagtgtctcagtttgaggacaatgtatggttattttacagcccttctcaaagtctctggagaaaaaggagcgttgaaaataagtataaatataaatttaatcgattcaaaagtgaaacagatgactaaactgttctttagggcctagaggtcaactagagaacatagcctggaatggaactgctgaaaagcaacagttattccaacgtattgtgctattgtaaatgaaaaataaaagctgaaaacaatgtcagtctttatgtggaggcagaaatgccataataccttctctgtggctattcttccttctagcttgttcagcatggtaacttctggctgccatcctggacaaaaacaagcaatataattataaacactctttcactttttagtttagttcagttcctagaactagtaatgctttaaaggggtgaggtgccacttttagtctaggaaatacaatgttgcaaatactaatttttaaaaaaataaatgaggaagaaaataacatcacaaacgctactcaaaaatcttttataccatgcaacagttttggtagtcataatgacatcatgtgattgacattataataacttaaattcaatcacatacaaaaactctacataaggcctcccaattttatgttattgtcacaatttatatctattaatattgtgtatcttttaacatctttttagttacaactacttttaatacatgtgtcctttttcatactagagttaaaagtgattacaggccagtcagtattccagttaacaatacttcagttttccccaaatgttaacattgtacctagcttcaatacagttatctaaaccaggaaaatggttttctgactgtattagtcgcctagggctgctttaataggtcttgcaaaagtacacatatacttgtcttatgactcagcaattccaccgttagtatttaccccaaaatgataagcaattctgcaaatatgcttcagtttacatatttagacaaaaactaagtaaaattatatgaactcatgtcaactcacatagataaagcagcttattaagtgtattagattcctggcagtagaacacttcagattttagagatgacatattgcacagtataataatttaagaaagtcaatatggagtctcactgatctatttgatccttcttttaccctaccatattctttctttgtttaatattttaaactataattttaattttcgtcgcaaaatatttcaaatatataaaaaagtacagagaagaatatgacacatttccattttatctagatttaatgag

SEQ ID NO: 2390 - DNA, 4813 bp, Homo sapiens
aaaacaatctcctaaattgctccttctgctgtgacttattggctcatgctatacttattgggttatcaaaatatgtcattttctcacaatgtggagtggaagtccttcaatgtatctgttggggacatgaatgtaattaattttctgttcacaggccttgcccagggaagatgggactggctgatttgaaagactggtgcagctctggactgagaggacttcaagctaagtgatgggtcctgaggtctagggactctttcataaaccatctcatttatggaaacctgacacacatatgggaaactagatctttcacttgccttttactcttctctcttgcctctgtctggccccacatatcaatgtgtacttgtagtaaaccatcatggaagctactggcaacacaggtcaacaattttgaccccaatgggtgaagctaggtaccatccagccctcaaagctgtaggcctttctccatactcaaacatattttgtgtcctattttctgagctctcccctaggatgaatttgatccttgaatgtgtgctgaggtcccagtgtgtttctgtgtggttcatgccaagcaaagtgtttacacttagaaaataaaaaaattggctgggcacagtggctcacacctgtaatcccagcactttgggaggtcaaggccggaggatcacttgaggttgggagttcgagaccagcctgatcaacgtggagaaaccctgtctctactaaaaatacaaaattagccaggggtggtggcacttgcctgtaatcccagctacttgggaggctgaggcaggagaatcgcttgaacctgggaggcagaggttgcggtgagccgagatcacgccattgcactccagcctgggcaacaagagcaaaactccatctcaaaattgattaattaattaaaaaaaattttaaatcataaatttttgatcctaaaaggcatattggaaccatttcatgaagggtgtcctgcctcataaattgcaaaagatttcttctcattatcaacaaagctgtaaggtctcacagaacatgttttcaaagttttaaaaattgtgataaaatttaccatttgaactatttttaactgtactgtttggtggcattaagtacattcacactgttgtgcaaccatcactacaatccatccatccccagaaatttttcgtcttcccaactaaaactctgtacacattaaacaataatgccccattactccctccccatagaccctccaatcccccattcttctttctgtctgtatgaatttggctactctaagtacctcatataagtagaatcatacagtgtttgtctttttgtgactggcttatttcacttagcttaatatcctgaaggttcatccatgtagcagcatgtgtcagaatttccttccattttagggctgaataacatttcattgtgtgtatataccacattttgtttatccattcatcattggctattgtgaacaatgttgctatgggcatgggtgtacaaatatctgttcaagtccctattttcaattctttcatgtatgtacctggaagtggaattgttagatcacatgataattctatttttcaatttttcaaggagctagcataccattttacatagcagctgtactgttttacattctctccagtaatgtataaggtttaggtttttgtgtgtgttgttttaaataatagccatgctaatgggtgtgtagcagtatctcattctggttttgatttgcatttccctaatgattaataagttgaacatctttttatgtgcttattgaccatttctatatcttttttggagaaatttctattcaactcctttgcccatttttttgcctgggctgcttgtctttttgttgtttgatttgcaagctttttaaatccttggacctgttattcaaatgatgtatttcagaaaattctgatgtataaaacagattaaaaccgaaatccttcaagtacaggtggggaggagatggagcctacctgttcattctttacttccatggcagcctctaacaggactcctttatacgtctagcactgtttcttagctctttggaaaaactaccgtacccttggcatttagatggggatccatgcttcagaatatttgaagggacatagatatgcccaaagaaggactcacctctgtgttttgccaccttcaaatattgaccatggctagagaaatgtggtgcttttcactggagtatgttagtgttgttttgtcacttagttcccgaagacacactcagctattgatccttccacctatcaagggaagctcataaattattggggaaatgtcaagaagaatgaagaaaatgacagaaattctttcaaacccagagaaatacattatttacaaattcatatcccccactatcaggtagatccccacaagcagtaggaatttgtaagaacaaataagccactgatcatattgctatttatcacagtcactcaatcctgcttcagccttcagaccttgttgaatcaggagaattttttaaagtgggtgtttgtagggtttaaagcatttttttttttttagtttgaaagtaaaattctgagaagagtcttattatttgggggtctaaaatctgaccctcagcccattggttaagattcatctcccttttgggagtcttactccttgtttcgggtaacaagccctcaagattttcatgttttctttggtctgtgcaggtccctccacttcttcctcattggaattctgtacccacctgtcatcttgagaaccaaaatttttttcatatccagaccacttctgtttgtgacaagtgggaaggcaaccaatagcacagcacttttacttgcttgagttctgaacaattgagaaattcaaaggaatctgaaggtggagtcttatcaccgttaggccaggtgtggtggctcatcctgtaatcccagcactttgggaggccaaggtgagaagatcacttgagcccaggagttcgagactagcctgagcaatatagcgagactctgtctctacaaaattttttaaaaatcaaaaaatagctgggcattgtggtgtgtacctgtaagttccagatacttgagaggttgaggcgggaggattgtttgaacctgggaggttgaggctgtagtgagccatgattatgccactgcactccagactgggcaacagagcaagaccctgtctcaataaagtaaaatatcacctttaatattggataaaggttagagtggggacacagtttatatgtatgagcaaacgggcttcccaatatagtggccctgtgttagagaggcttacctcctctgtcacaaactatgctgtaccaccacagaaccctcttacagggccaggcccctctcactgtttggcagaaatcagaacagaacacaactcctctgtagtcagccatatcccgtgaagaagcagtatggtcagagctatgcatgccccagttccttgttctaagctcatcaaccaggtaaatcatcccaatccccctcctcttcataagaatatcacagcccccacatggaaagaaacatgtagagttgggaagaataatctactctagaatttcccagtttatttttctcttaacccactgagtttaaccactgagccatctccatgaagggggaagattagcagtttatgaggacagtctgactcccaccttcgtgaggctaacctcccagtagaaaccactgggattgctgatgggcaatgtagatggtgatatttgcagaaggctctgaaatgtgcctgaagactatattaattaaattaatatcaagactgtgccttgtgtaaggatgcaaatttatcacctactctatttcctttctcaaataatgaccagctgaattgtcataagtatactatcagaggatgtgcagtgagaccaaaggataacattaagacactatgaaaataatgtgcatcaataagatgctactcatttgaatataatcttcttttatcacatttgcaggaggacatttaaattcaaactccctcatgctttttagttaaagtctagagaaatgaaagtccaaagtttttacctccaaagattttaaagttcaaaataaagttttctttctcttgggagtaaaagttccaaaaattaaggaccaaaatgtatcctccctagcttcttactatgctcaactttaatgagaaaagttctcaaggcctgtgcagacttggggttcttcagcagttttagtctgtactgtctcttactggaatggatgtagttctttcagagcctctgagtgtgtgttggttcaatgccaagtctctgatgtttcctacagttcaaggaattaatagaacctacaagataattgcatcactggccccacatattcccaattagaaaacaaacaaataggtggtggtagtcccttcatggcccacattgatctctgcctcctagaattcactccttgtgaaatcccttcccctgggtttgggctggacctactatgttgcttttaacaaatagaatatgatgaaatggtggcgtgtcacttctagaattagtttaccaaagactgtgacttccatgtttgtagcattctcttcttctctggctgttctcagttgtttgtgctgatgaagccatctgctgtgttgtgagctgcctgatggagaggcctatgtgacaaggaacttgccagcaagggatgagactcagtctaacagtctttgaggaactaaattctcccagcagccatgacttttccttggttcagctaaagggagggtcttt

SEQ ID NO: 2391 - DNA, 25130 bp, Homo sapiens
gcaggactctaatctgactgtgggtcataagaccttcattccagagagtcctgcttccttctctggaggaagcaaccctgcacagagggaaagaagaatctcaacatacagtcctcagcagctttagcatgggcaacaaattaagtctctgtaaaaggcccaaaggacagggtttggtgagattctggagagctggaaacatggaggttgacaggaatgtaaagaagaactcatttacatgccaggagggtggaacaccccaattccatgaggataactgctcctgtactccagacctcaccccatgtgtctcttcatctggctggttatttgtcctttaagatctccttactcaaccagtaaatgtaagtaaatgtttccctcacttcagtgagctgctctagcacattaactgaactcaaagataaggtcgtagaaactccgccttgaagccagtcagtcagaatttctagaggcccgaacatgtgactagagggaaggagggggaagtcttgtgaaactgagccccctcgacctgtggattctgacacactctctgggtagatagtgtcaaaactgaattgaaggacacccagctggtgtccattgtttggcgtgtgtggaaaaactcccacacctttggtcacagaagtcgtcttctgtgttgatgattgtggtggtgaagtgaggcagaagaaaaatgcagtttgggagtttttccctgaaacacacacacaccatagaatactatttagccttacaaagaacgaaaattctgtcatttccgacaacatggattaacctggaggatattttgctaagtgaaataagctaggtacagaaagacaaatgatgcatgacctcatttatatgtagaatctaaaaatgtggaactcagagactagagtgatggttatcgggggcttggaagagtgtgagatatgggaagatgtttgccaaaaagtacaatgtttcaggggtgtctttacattgttttagtcttgaactagaagatgaaagcatcaaataaagaaatatactgtgggtatatggattacaaaaaaagtgttaactggtatatcttgtcttgggaaaatatggcagctcctatgaaacatctcggaaaatttgtaactgatgttacaaaacacccagaagaaataagtggtctggtgagaaaacttactcatctttgcctacatatgtatacatgagtaatttgattacacatttgtgcgggataatataactgaaaagaaaatgtaaaatttaacttaaattgtatttgtaagttgtaatttcattaattctgcattattgaagtacatgtaggaaaggtgcagaaatgcatcaggcagttaatacaaatacgttttttttttttttttttttttttttgagatggagtctcgctctgtcacccaggctggagtgcagtggcgtgatcttggttcactgcaagctccgcctcccaggttcacaccatcctcctgcctcagcctcccgagtagctgggactacaggcgcctgccacctcgcctggctactttttgtatatttagtagagacggggttcaccgtgttagccaggatggtctcaatctctatacctcgtgatccgcccacctcggcctcccaaagtgctgggattacaggcatgagccactgcgcccagccaatacaaatatgttttgctcaattttgtaatgtttatgctaccatcagttttttgaaatatgtaacttttactttttttcttagagtcctccaaattatgtttcaggctccttaaaaactttttatctatccctgataaatattcctcaataataattttaaaaatccatttggttaaatgaacatgaactctaagtcttttaaccagaaataagctattaggttgatgcaaaatatttgcattttttgccattgaaagtagtggcaacaaagaaataaaattgtatttttggaatagttttctcttaagctcttgataataaacctgtaagtattaactgccttacaaatggcaaaagaggccacttgaaggaaaggaaattccttaacaggactttccttagcaggaaagttagttgcctgggtcatcatttggataagaaaaaaatccattaaaaaatggcagtattattagtatcatatgcataattacatatataaaacttgccatatattgtgtgaaatatagttctttagtataggaaaaatatattgatatctataaaggtaaaattattttaactctttcacatacatgttatttgataaaatttgctttcgtgttttttctttgtcaggtttcattgatactcaaaattcatttcctttgacatagctcaggagatttgttagtaaaaatctcacccaaattcataagaattttccaataaaatatttcagaaatgaaacattttgaaagaattggtcaattatcactttctgctagatagagcatgatagtttggtgtatattttaatatatcagtgatatagtttggatattactccccacccaaatctcgtgttgaactgtaatccccagtgttagatgtgaggcctggtgggaggtgtttgggtgacaggggcaaatcccttatgtcttggtgctgtcctctagatagcgagtgagttctcttgaggtctggttgttgtaaagtgtggcacctccactcccaactctctctcttgctcctgctttcgtcatattaagtgcccactcctgctccaccacctgccatgatgataaggttcctgaggcctccccagaagcaaatgccattgccaagcttcctgtacagcctgcagaactgtgagctaattaaacctctttacttataaattacccagtgttgggtatttctttatagcaatgcaagaaaggcctaatacagaaaattggtactaggagtgaggcatggctattaagatatctgaaaatgtgaaagcaaattaggaactgggtaacaagcagcagtccaaagagtttgaatggctcagaagacaggaagatgaaggaaagtttggaacctcttagagactggttaagtggttgttaccaaaatgctgattgtgatatgaactttgaagttcaggctgctgaggtctcagatagaaatcagaaatgtattgggatcaaagattatgcatattatttcttagtaaacagcttggctgcattgtgtttatgccctagagatctgtggaagtttgaagttgagaatgatgacctagagtatctggtggaagaaatttctaagcagcaaagtgttcaagatgtggcctggatgcttctaacaacctatgctcagatgtaggcacaaaggaatgacttacatttggaacttacatttaaacaggaagcagagcctaaaagttcagaaaatttgcaggctgatcatgtggcaaataaataaaaaccttttacaagagagaaactcaagcaggctgttgagcaaccatttgctagagatatctgcataactgaaaaggagccaaatgctaatagccaagacaatgggaaaaaggtttcagtgacatttcagagaacttcctggcagcccttcttaccacaggccctgaagcctaggaggactgaatggttttgtaggccaggcccagtaccttgctagcctgcacagccttgagacacggctccccaaattctggtcactctggccccagcctcagctcaaaggggcactggtaaaacttgggccatcacttcagaggacacgagctataatcattggcagattccacatggtgttaagcatgtgggtgcacagagtgcaagagttaagaaggcttggtagcctctgcctagacttcagaggatgtatagaaaaggctggtgttcaggcagaaggctgctgcaggagtggagccctcacagagaacttctagtagagcagtggggaggggaaatgtgggtttggaagcccacagagtccccagtggggtattgcctaatgaagctgtgagaagggggccaccatcatccagaaccaagaatggtagatccattggcagcttgcactctatgcctggaaaagctgcaggcactcagctgtagcacttgagaggagccatggggctacatcctgcaaattcacaggggaagagctgcccaaagccttgggagcccaccccttgcattaacgtgccatggatgtgaggcatggagtcaaaagagattatttcagagctttaagatttaatgactgtcctgctagttttcggacctgtgtgagctctagtccctttctttgcctgacttctttctcttgtaatgggaatgtttacccaatgctggcaccctcattgtatcttggaagtaaatgacttgttttgattttacaggctcacaggtggaaggaactcattttcagatgggactttggacttgggacttttgattgagttgttgcagaaatgagttaagattttggggaattgctgagaaggcatgattgtattttgccatgtgaaaagaataggtaatttgggggaagacaagggtagaatgatatagtttaggtatttgtccacactgaaatttcatgttgaattgtaatccccaatgttggaagtgtggcctggtgggaggtgtttaggtcatgggggttgatccctcatgtcttggtgctgtcctctcaataatgaatgagttctctcaagatttggttgttgtaaagtgtggtacctccacccccaactctttctcttgctcctacattcaccatgtcaagtacctgttcccactttgccttccaccatgattgtgaagttcctgaggcctctcggaaagcagatgccagcactatgcttcctgtacagcctgcaaaactgtgagccaattaaacctcttttcttataaagtacccagtctcaggtatttctttatagcaatgcaagaacagcctaatacaatcagtaaatatgtcagattctacaatgaggctactataatgtgaagatatttttcttaatcatttacatttacaaatagactaaaattcttgttttatgttattgtcttagttcattttgtgctgctataacggaatactacagactggtaattaataaacaacagaagtttatttggctcatgtctctggagattgggaagtctaagactgaggggcctcatctagtgaaggtcttgctatgtcataacataacatggtggaagtcatcacatggtgaaagcatgtgtaaaagaggaagacaggagaactcatactcttatcaggatcccactcccacaatatctagccctctcccaggataacagcactgattatcttagaagggtctcaactctcaggactgttgcattggggattacatttcaaacacgtggatcttgggagacacatttaaaccacaacagtgatgttttgaataataaatatacatctacaaatgtgtttcttccacctggcaatgccttcttctgatagttttattctgcaaatttcaattattcaaataaaatttcctcattggccctctttaacactttttcctctgaaatcttatattacttgttgctttacaaatactctttaaaaattattccacactggtatctaaattcttccttttttcccagtcttatcttcccaattggcttttaatttccatcaggaaaggatccatgtgttttgacttcttggtactgctcacagtaatacgtaaataattaagatttaatataattgggtttaatttaatttcatgtagattccaattgatttttccaattagatgtgtgagatttttattcattaaaatacgcaattatactagcatccatttttacttgtccaaagaatgagctaagatttaagttatattttgcgatcttgagatacatttcatatgctcttcgttgaatcacttttctattcatcttcaaattccagctataaaatatgatatgcaattgtcttagctcagattgatcacaaatccttgttctacaagataccatgtattcatatattcataaaaatatcaacagaaataatatattaataaatatttaagtatgtaatttcagaaagagatggtaatgtatcaggacagattttagttaggagacacaatatgcttatccgagcacaaagttggtttttatcaattgatgttagtttttgattatatactatatgtaagttctctatttataattataattttctcattaataataataataaatcatacctatattgtaccttgaaattatcaaagcccctttcatttccacctcattttctctctttctctttttctctttctttttccctgttcttttagtctctgtctctccttcagaaaaaatatcagttacttagcaggacatatattattgtttccatgttacaggttggaaatgaaatttcaaaggaataagttattttttatggtcttatagctaataattattaataattgatatatgtaggattgggatcccaaggtttaactcctaatcatgtgacttcagacaaaaaaacgtagaaataacagtttttctggattgttacatggggtcttaggcaatttgagtcattataacaaagtaccataaactgggtagttttaaacaacagagatttattttgcagagttctagaggctacaagtctgacatcagggtgccagcatggttaggtcccagtgagggtcctcttttgagtagattgctgccattttattgtctcatcacagggtgaaaaacaatgtgagctagctctttggcctatttttataagggctctaatcccattcatgagggttccaccctcataatgtaactacttcccaaaagccctatctccaaataccaggatactggggattcgattttaacatatgaattttgggggaaaatgaacattcactttataacacatagagagtgaggtagtctggataaatgatctagcgtgttcactcataaatgttattttcatgctccttttctaagccttttctattataacagcaatgcagtttgtaactttaagaattattccatgtagaatgtaaattgatatagccattatagaaagcagtgtgaagggttgggcatggttgctcatacctctaatcccagcactttgggaggcctaggtgggaggattgcttgagcccaggtgtttgagaccagcttgagaaacacagaagggcctggtcactacaaataataaaggaaaattagccaggcatggagatacatgcctgtggtcccagctagtcaggaggctgaggtgataaaggctgcagtgagttgtgatcgtcaccactgcactctagcttgggcgacagagtgagaccctgtctcaaaaaaaaaatcaccaaaaccaaccaaccaaacaaaaaaacacacaacaacaaaaacagtgtaaagtttcctcaaaaaataaaaaatacaactaccatatgatccagaaattccactactatttacccaaaggaaatgaaatcagtactttgaagagatatctacattcctatgtttattgcagcagcattcacaacacacaagatatggaatcaacccaagtgtccaccagtgaatgaatggataaagaaaacatatataggcaatggagtacaattcagctgtaaaaaataatgaaaccctgtcattttcagcaacatgaaggaaactagaggacatgttaagtgaaataagccaggcacagaaagacaaatagcacataatctcactcattgcggaatctaaaaaaaatatacatcaatagaaatagagagtaatatagtgatttccagaggttggggagggttgggaaagagggaatggggacagattgatcaatgggtacaaaattacagttacgtgggaagaatacattttggtgttctatagcacagtagggtgaatatagtaaacaatgttatggtgtatatttcaactacaagagaggattctaaatgtctcatcacaaagaaatgataaatgtttgaggtgatgaatatgctaaataccatgctttgatcattatacaatgtatacatgtgttgaaacatcacaccgtactccataatatgtataattactatgtgtgaattataaacaaaatatcattccatgtaatgtgaggaaattgtttctctttgaaaaaaatgtagctatcaacaatactggtaaaagcagatgaagaagcaaaatatcaaaaacccataatcctgcaagagccttaacaagattaaatatttgattatttctaggacacaggaccttttaaaacatttcctgttgttctttggatggtccactgtgggtagtttgaaacagtctacgagacttctctctgtatcaaaggaagcaatgagatcagagtaaaaatatcagagaaagattttttaaaatgaattaaggaaggtaaatccaagcagagtttttataacattcacaaaagcatgtagctttgtgttaaatcgtgtttttaaaaaatattctcttcttgcttcgtatctttgagtcagaaagctggatgtgtgtctaaacaaactaggcaatgctaataccaagaatcccggaaaatgtgctaaattcactattctatgtaagtttgctcagatggtggagaaagtgcattaaccagtactgcaaactgaatcttttgtgtgtgtgtgtgtgtgtgtgtgtgtgtgtgagagagagagagagagagagagagagagagacagagagagagaaacagacagagaaagagagagagagaagatatttgaaaaaaatacaagaaataaagaaagaaatattcaaggaaatagatagcatgaatgaaaagcaatctaaacttcaggtagcaatgaacacacttacagaatgcaaaaggctctggaaagtctcagcaatagaattgaacaagtagaagaaagaatctgagctcaaagacaaggtctttgaattaacccaattcaaccaagacaaagaaaaaagaataagaaaatacaaacacagcctccaagaagtctggaattatgttaaatgaccaaacataacaataatcagtgttcctgagaaaaaagatgaatctaaaagtttggaaaacatatttgggggaatcattgaggaaaatttccccatcttttctagaggcctaaacatcctaacacaagaagcacaaagaatacctgggaaattcatcacaaaaagatcatcacctaggcacattgtcatcaagttatctaaagttaagatgaaggaaagagtctaagagctgtgagacaaaagcaccaggtaactgtaaggaaaacctatcagtttaacagcagatttctcagcagaaaccctacaagttagaagcgataggaaccctatcttcagcctcctcaaacacgacaattatcagccaagaattttgtatccagttaaactaagcttcatatatgaaggaaagatatggtgtttttcagaaaaacaaatgctgagagaattggcactaccaagccaccactacaagaactgttaaaaggagctccaaatcttgaaacaaatcctggaaacacatcaaaacagaacctctttacagcataaatctcgcatgacctataaaacaaaaatacaatttaaaaaacataaacaaaaatttaaaaaccaaggtatacagacaacaaatagcacgatgaatggaatggcacctcacatctcagtactaacgttgcctataagtggcctaaatggtccacttaaaaggtacagaactgcagaatggataagaattcaccagccatctactgccttcaaaagactcacctaacacataaggacccatgcaaatttaaggtaaaggggcgaggaggggaagacatttcatgtaaacagacaccaaaagtaagcaggagtagctattcttatatcagacaaaacaaactttaaagcaacaatagttaaaaaagacaaagagggacattatataatggtaaaaggccttgtacaacaggaaaatatcacaatcctaaacatatgtgcacctaacactggagcttccaaatttataaaacaattactaatagacctaagaaatgagatagacagcaacacaataataatgggggacttcaatactcccctgatagcactaggcagttcatcaagataaaaagtcaacaaagaaacaatggatttaaactgtaccttggaacaaacggacttaatgtatatgaaacattccatccaacaaccacagaacatatattctgttaaacagcacatggaactttctctaggatagaccatatgataggccacaaaacaaacctcaataaatttaaaaaaattgaaattataccaagcactctctcagaccacagtggaataaaactgaaaatcaactcaaaaaggaaccttcaaaaccatgcaaacacatggaaattaaataacctgctcccaaatgataattgggtcaaaagtgaaatcaagatgaaaattaaatattattctaactgaatgacaatagtgacacaacctatcaaaacctctcagacacaggagaggtggtgcgaagaggaaagttcacagccctaaatgcctacatcaaaaagtctggaagaacacagacaatctaaggtcacaactcaaacaactagagaaacaagaacaaaccaaacccaaaaccagcagtagaaaagtattaaccaagattaaagcaaaactaaataaaattgaaaccaaaaaaagtacaaaagataaatgaaacaaaaatctgtttctttgaaaagataaataaaatggatagtccattagcaagattaaccaagaaaagaataaataaaatccaatcgagctcaataagaaatgaaacgagaccactgaaattacaactgacaccactgaaatacaaaataccattcaaggctactacgaacacctttatgtgcataaactagaaaacctagaagagatggataaattcctggaaagttacaaccctcctagcttaaatgaggaagaattagataccctgaacatactaataacaagcagcaagatagaaatggtaattgaaaatattaccaacaaaaaaaatccagggccagtttgattcgcagcagaattctaccagatattcaaagaagaattggtaccaattctactgacactattccacaagatagagaaaaaggcaactctccataagttattctgtgaagccagtatcaccctagtacaaaaatcagaaaaggacataatcaaaaaagaaaactatggactgatatctctgatgaacatagatgctaaaatccttaacaaaatactatctaatcaaatccaacaacatatcaaaatgataatctaacatgatcaagtgcgttttataccagggatgcagggatggtttaacatatgcaagttagtaaatgtgatacaccacataaacagaattaaaaacaaaaatcacttgatcatctcaatagatgcagaaaaagcattttacaaaatccagcatctctttatgatgaaagctctcagcaaaattggcatacaagtgacatatctcagaataataaaagccctctatgacaaacccacagccaacataatactgaatggggaaaagattgaagcattccctctgagaattggaacaagacaaggatgcccactctcaccactcctcttcaacatattactagaagtcctagctagagcgcagacaagagaaagaaataaagggcatccaaactggcaaagaggaagtcaaactgtcgctatttgctgatgatatgattgtttacctagaaaaccctaaggactcctccagaaaacccctagaactgataaaaaaaattcagcaaagtttctggatacaagattaatgcacacaaatcagcagctcatcaatacaccaacagtgaccaagctgagaatcaaatcaagaactcaagaaatctccacactgttcaaatcaagaaatcaagagccccttttacaatagctgcaaaaaatacaacaacaacaacaacaacaacaaacttaggaatacacctaacaaaggaagtaaaagtcctctacaaggaaaactacaaaacactgctgaaataaaccatagatgatacaaacaaatggaaacgcattccatgctcatagataagtaaaatcaatattgtgaaaatgaccctactgccaaaagcaatctagaaatccaacacaattcccatccaaatacaaccatcatttttcatggaattagaaaaaaatctaaaattcacaaggaaccaaaaaagagctctcatagccaaagcatggctaagcaaaaagaacaaatctggaggcatcacattacctgatttcaaactatactgtaaggccatgatcaccgaaacagcatggtactggtataaaactaggcacatagaccaatggaacagaatggagaacctagaaataaagccaaatacttacagccaactgatcttcaacagagcaaacaaaaacataaaatggggaaaggatacccttttcaacaaatggtgctgggataattggctagccacatgtaggagaatgaaactcgatcctcatctctcaccttatacaaaaatcaactcaggatgggttaaggacttaaatctaagacctgaaactataaaaattatagaagataacattggaaaaatccttctagacgttgacttaggcaaggatttcatgaccaagaatcccaaagcaaatgcagtaaaaacaaagataaattgctgggacttaattaaactaaagagcttttgcacagcaaaagaaacagtcagcagtgcaaacagacaacccacagagtgagaaaaaattttcacaatctgtacatctgacagacgactaatatccagaatctacagtgaactcaaacaaatccataagaataaaaaaacaaacaatctcatcaagaagtgggctaaggacatgaatggaaaattctcaaaagaagatatacaaatggccagaaaacatattaaaaaatgctcaacatcactagtgatcagggaaatgcgaatcaaaacaacaatgcgataccacctcactcctgcaagaatggccataatcaaaaaatagtagatgttggcatggatgtggtgatgtgggaacacttgtacactgctggtaggaatgtaaactatacaaccactatggaaaacaatgtggagattccttaaagaactaaaagtagaaccaccatttgatccagcaatccccctactgggtatctacccagaggaaaagaagtcattatatgaaaaagatacttgcatatggatgtttatagcagcacaattcgcaattgcaaaacctgacaccagcccaaatgcccatcgatcaaccagtggataaagaaactgtgagacatataaatacacacacacacacacacacacacacacacacacacacaatggaatactactcagccataaaaaggactgaattaatggcattcacagcaacctgcaagagattggagactattattctaagtgaagtaactcaggaacagaaaaccaaacactgtatgttctcactgatatgtgggagctaagctaagaggatgcaaatgcacaagaaggacacaatggactttggggactcagggggaaaggtggaagggggtgagggataaaagactacaaacatggtgtagtgtatactgcccgggtgatggatgcaccaaagtctcacaaatcaccactaaagaacttactcatgtaaccaaacactacctgtcccccaacaacctatagaaaaagaatttttttagttaaattaaattaaacagaaaaaatttaaaaaataaaaacagaagccacaggccaagtgcagtggttcacgcctgtaatcccagtactttgggaggccaaggcaggtgtatcacttgaggtcagaagttcaaaaccagcctggccaacatgacgaaactcccatctccaccaaaaatacaaaaattagctgggcgtggttgtgcatacctgtaatcccagctacttgggaggctgaggtacgagaattgcttgaacctggtgggggcagaggttacagtaagccgagttcacgtcactgcactccagcctgggtgacagagtgagagtctgtctcaatgaataaataaataaataagccacagagagacacacaggaagaaaggccatgtgaagatatagaaagattgaaattctgcatctatgagcaaagaaacattaaaattactggcagacaccaaaagtacataagagatgtagaataaattctccctcagagcctccacaaggaagcaacacttccaacaccttgattttggacttctgcactccagaaatgttagataatacatatctcctagtttacatcacttaatttgtgctaatttattatggcagccttgggaaactaatacagactcatgatgcctccatggcagccatccaaatgtttgctctgttggcttgcatgtgtgagttcttaagagaatcctagagagtttctctactgcatttcccaggtctggaaggtcacccttaaacttaactttcccttcctcttcattcctgtaacttggagtatatccaaagctcatgcggatgtcatcctcttgtcttgaggtaaattttaatatatggtgtgcagttctggcaagaaagtttagtcctttggtggcatcccactgatctttgagaaactcagaaattctcaaagtgccagatgtaaaaaacaggttgctctattcccttcacttctgtagctgtctccagttttcttgctctgctctaggagatctactgtctaacagacaactaactaggaggatggtatgccaggctttcttcttgtcagaaatccatttctaaaagtgtcatatgttttccaattttttgagaagcagctcccctgtccctttggggatgggagttaataatttttctctaagagcttatagtttctacaagaacaacaacctgatatctttatctccttaattccatactgactcaccttctttcctggattgggaaggaaagtggcattgtagctggtggtagagttaatgctggttctccaatcccataaattcaggagtaagtgtgggggaatgcaatgcttgccttaactgttaaccagctttctttaaaacgttaggtagttaatgcctcattgtcctcaaatttgggccagggttactgattcttgggcactggattacatttcccttaaccactagctatacatgcttaacacaaaatccctccactagcatcagatgagtttgtgggtttggaactttagagtgaaaaagcacttagcaagatttgatttcactatatatttgacattcaactcaactgttcaacttacctttttgtgaggtgagggaatttgactaaaatcagcaattgcttacccaaacgatttcaggagctagaaggaaaagtaaatgcaggaagtaattattttgaatggggactgtgaccagtttgagagtggtaataccaacctgagtcgttgaattttaggccttcttgaagcgagtttctaagctctgagagatgttttaatgtccattccacatttaaatgtccatatatccactctttatgggcaggtagataacatatgagggcatttttcccttgtcataatgtttgggagtgggtgctactagccattttagtaagtagggatcagaaatgtgatatatgcaattgtcctttgtctcccatgattttcaaatgatacataaggtattaacgcagaaactgttcatattaacttgagcataatccaaattctgctttatatagagcttagatagacagacagaagagtaaagtattttgcatattttccagaaatacaattgctatttatattgagtaactattgcactttattttgtttattgttttccatcattatctagattcagccaccctttcagaaaatcatttcagcgatagcaagttgctgatagaatttgagtccataacacttcacacttaagtcaggcagcatttgtagtttttaactcatgtgattatacagatagaggtcagcatctgactatttcatacaatcttctcatgtagtcatgcctgaatatacataatgaacttcagatttcttcttaatgaactgctttcttgttatttatacttaaatttcagataaggcattatatagactttttcaaaaagctatttgtgggaagatctttatatccatggtcttcatttcaggtggtaaagcatttattacaaagtactttttataaaaatggaaaattgttttgatagcactgctctatatccactgtcagaggtctacaaaatctcagaggtcatcaatattctaatgtatatatatacacacatatatcagtcttcacctatcccttggccatattctttaacatgttatggttctcaggctataatattctcttagtcaccaggggcctaaagtaatctggttttacttgtagcatagtaaaaacttcaacctgagactgactgccagaggacctattcatttgatggtttcctgagtaggtacagttttcaagtctagatttaatatgaaagaagtatagccccctaaatattgtgtatggttatttgtagatatattcaaaattattgttttgccatgattaaaatatttatgagactgaggagattttaaaatttaaactaataaattggatcaactcactgttaactggtaaagcattttcatcattataaagagaatgcatcatctaattttcaaatgttttatctttctaattgaatttctaattagcacatgctagtaaaatgaaaatattaatgagatcctcataggtgcttaatatagtgatatcaagtactatcatacatatgtgtgtatatatacatatatatgcatgtgcataagttctgaagaaaatttttattatgcaagataattaagtgtcatttgacataaaaattttgcaaagaggtaaaaagtggcataaaattaaagaaagttaattatctgatctttctcctttcggcaatttactttcttttgtccacagatcaatcatcctaatgctcatttctttaattccctttaattacaactgagaagtaagcaagtgagatagtaatttctactgaaatttccatgcttaatctgcaaatgtagtgagcactgatatagtcaaggaacagtgtggctgttgtgagaaatagaaaatggaggacaggaattatactcagtttcccccattattcagcaataatagaaaaagttaatttacattttcttctttaaaatgtacattttaaaatttcaatacatttattgaattgagcaacaaaagtaatgtgtagggtaggcatttctgtaactttttctccctattttgtattttcatttttctgtattttttctgtaaagttttgtatatatataaactaaactaaactaaacttggaggttgaaataaaacccagattgacactgtatatagacagcagtacaatccagaaggaatctctttatatggtcagtgagaaacatttctatttttaacactactaaggggctccactaatgaagtttgtctggcagaggatgtgacctcagtattttataacacagaaatttctcctcaaggtagaaagctggctcgaagaaacctgtgactgtcatgtccctgaggggtgctttagagttcatagcttcaggatatctgtgaagttctgaaattgcaggcaataatttaagcattagtccccatgtttgtgtgtgtgtgcatgtgtgtgcacacctgcatgatactttggggggaagtggcccatttggtatgatccagttctaaaatatgattatccatgaccccctcaaagcttaagatcccctgaaatttcagctttctgcttttttgcaggcaaagatctaatttctcctctcttttaagtgaattatcctgccctttaacaaatagtggcgatacgttattttggtctttacaatccaggaacactattggttttgacaggctttgctcaaataaagactagtttcacttcatttccaaggcattcaactctacccaagtgacatttgtgaaagccatatatttcatttgtgcattccaatgatttaatttagtaagctcaataagcttatctctagtcaaagataacatggcatttatgactgtagagtgcgtgattgaatgggattcttcctgcttcagtttcaacttagactccattttgttgttatcagacaccaaagatcccgtgagaaaaattgacatatggagattttaaaagacactggttgaaactcttaattccggaactctttcacgtacttaggaaatacgcaagagagtcatggtctcaagagaaggttttaagaaaggggttattaaaactattgctttggagagtgcacttcacatgcaggctgttccatcctcttttgggggagaggcattaggcaggggtttactttccagtcccaatattgaagagggtgggcttctaggcatccaattgaagatctttgaaatagtcaaaaaaccttgaggataagtgcctgatcccaacaaaggaagctaaagcagttagtgttctgaggtcttttcttcccaggaggtccaggagaagagagagggtctgactaacagtgctggtggctgagccgggagatgctgctatgttgagattggttcactttctcctagcttgtcaggacaccggatgtgtgtcctgattgtttctggtgaattggatgtgggctatgtggtacaggatcctcttgggcctgtccatttgggatctcaggagggataagggctgcaagtgtattgcgggatgcccttggacaagggaagggtcagaagaatccacatatagacactgatacgcccaagacaagggaatttcagacaagaggaggagcagggaactattcccaggctcctataatcaaaatcatgagacagagagagtagattttaatcatctgccaagtttatgaagaataccagcttcactgatctactctgtccagatagcacaaagccacccaaagtaaatgtggcacagagccaaacagcagcttgcaagtgcaggaagaaagggaactgcagagagtagatagtagaggcaccagataccaccttagcccattttcctcaagcatctaattggggaaaaaagagatttaaggctacatcaagattggaatattttgagtatctatcttgtaatggacattctaattactggactgaaaggcatttgcaaactaaagtgatcatattgtgatatattccctaagaatgtgcaaaaaaaaaaaaaaaaaaaaaaaaccttgggacctacctgagcttctattcagggatggggaagatggcctgtatgtcttttcctaacctaccatcccctaagtgggagagaaaaaaaaaaaggttgtactttattcatatctgaagaccagtctgattatcatatgagttacactgcttaacagaatccaagcagtaaatactatgattgataattgtggtgattaatactgaatgtcaacttgattggattagaggatgcaaagtattatgcctgggtgtgtctggagggtgttgccaatggagattaacatttgagtcagttgactgggaaaggtaaacccatacttaatcttggtgagcacaatctaatcagctgccagcatggccagaataaaaagcaggcagaataacatgaagactagactggcttagcctctccgcctacctctttctccagtgctggatgttccatgccctcaaacattggactccaagctcttcagctttgggacttcaactggcttccttgctcctcggcttacagatggcctattgtgggaccctgtgatcgtgtgagttaatatgccttaataaactcacctttatacatacatcaatcctattagttctgtccctctagagaactgtgactaatacagattttggtaccaggagtggttctagaggaaaagaatattaaaaatggagttcttttgttggttttcaggtttctggagttggcttcttaaagtgattagccataaaaatgctaaggactctaattctaatagtatggagaacagacagtccttggtgtgaacaatttagagagttattatgcaaaataaatgcatttgatactcttgattcaccgctcatgaaaggcaaggagtttagtgactcaatacctaatacctttgaccatatgtggagaaccaaggaacataatgaagttggttggttgctcctaagttcactggacagagtgatgaaaaaaaacgaactcagggattctaactaactcctggcttcagaagcagatactgagcctcaaatctgctaagattgccctgagtgagtcttatctcctgcagagaaagagctgaaattgtggaaaatcagacacaggctattaccatgtgagtggttgacctgcaacaaaaggtgcacgcacagcctcgccaggtgtctactattaaagtgagagcattgattggaaaacaatgggaccttgcaacttggaatggggatatgtgagaggactttgatgaagctggggacattgagcttgtaaactctgatgaaccttttctgccagaaggaacagcttccccatccccagtagtggtaacatcccctccccaacccatgctgctattagcctttccatctttgtctgaggagatgaaccctgctctgcctgaggcaagagtgatggcctcccctgaggcagttgctaggcaagataatgttgattctcctcaggagcccccctccccccaacacccctgcttgcttctagacttataactaaagttttggcaggcccctagaggtgaagttcagagtgtgacccacaaggaggtgcactacactcgaaaagaactccttgagttttccaatctatataaatagaaatctggagaacagatatgggaatgaatattaaggatatgagaaatggtagaaggaacatacagttggatcgggctgaatttattgatttgggcccattaagtagggactctgcaattaatgttgcagctcagggagttaataaaggttctaatggttaatttgcttcattagctgaaatatggattaaaagatggctcactgtgagagaactggaaatgcctgatttcctcccttggtttaatgtagagaaagggattcaaaggcttagggagattgggatgctggagtggattagtcactttaggcctactcatcccagctgggaaagtccagaagatgtaccttttaccaatgctttggaaaacagatttgtgaaggcagcacctgcgtctttgaagagttctgtatctgttgcttttctccggataccatatctaacagtgggaaccatagtcactcaacaacaaaatttaaatgcaatggggataattggaacccaaggtggcaggagccaagtggtggcactcatccatcaaaggcacagtgggcatagctaccatcatggacaacagaggcaaagcagcaatcgggatagattgatttgtgtagagctctggcattggctagttaatcacagtgatcctagaagtgaaattgataggaaacttactgcattcctacttaatttaaataagcagaaaacttccaggccgaatggacaaaagactaatttgaattataaaaacagagcatcatggcccctcaattaattttcagactagagccagtttacagaaccctttgcatgaaggggaggccaggtccccttgaggaaggaccccactacactaccaacaatttatgctgttaatctttctcccatccttccccaaagggacctttggcctttcaccagggtaactgtgcatgggggaaaggaaatattcagacatttcagggattattggacactggctctgagcagacattgattccaggggacccaaaacatcactgtggtcctccagttaaggtagggggttacggaggtcaggtgattaatggagttctagctcaggttgaacttacagtgggcccagtgggttctgggactcatcctgtggttatttcccctgtgccagaatgcaaacttgacatagacatacttagcagctggcagaacccccacattagctccctgacttgtagggtgagggctattatggtgggaaaggccaaatggaagccattagagctgcctctacctagaaaaatagtaaatcaaaaacaatatcgcatccttggagggattgtggagattagtgacaccatcaaggacttgaaagacacaggggtggtgaaccccaccacatccccattcaactctcctatttttcctgtgctgaagacatggatcttggagaatgacagtgtattattgtaagcttaaccaagtggtgactccagttgcagctgctgtaccagatgtggtttcattgcttaagcaaattaacacatttcttggtacctgatatgcagccctttatttgtcaaatgcctttttctccattcctgtctgtaaggctcaccagaagcagtttgccttcagctggcaaggccagcaatatagctttgctgtcctgcctcaggggtatatcaactctttggctttgtgtcatagtcttgttcagagagaccttgatctatttgcccttccacaagatatcacactggtccattacattgaggactaaactctgatttttttttaacttgcccaaattcctatctaagctatctggtgagtcatgccctacaaatcatacattctcatcagatgggttttatttaaccctatatatcgtaactttccaacctgactctggcataacattactagacaaagaagaaaatcaaaatattttacccccaaaacacatttctttgatatattttgaagtagccctggaaagctgttctttgttgggggaaatttgcatatgtaaagaatctctattaacatagctagatttttttcttccagactctctcaatcctaaagaaattaactaaaatctgaataggaaacatttgtcatctgttgtctcgaagggcagccagtataaggcttcaaaataaccttagtctccacaatcttttatcttaacctgaacattccctttctatcaatcccaggtctttagacacaaacaaccaattgtccagcagaaaatatttaaattcacctatagcctggaagcccccactttgatttgtcttgcctttctggaccaaaccaatgtatttcttaaatgtgtttgattgatgtctcatgcctctgttaaatgtatgaaaccaagctgtgccccgaccaccttggtaacatgttctcaggacctcctgagtgctgtatcatgagccatggccactcgtatttggctcagaataaatctcttcaaatattttacagagttcaactcttttcattgacaacattatgacattatgctgattggatccagtgagtcataagtagcaaacacactgggctcatgctcatagaattcatcttaccatgttccccatcatcctgaagaagctggattgatagaactgtggaatggccttttgaagtcacaatgataatgccagctaggtaacaatactttgcagagctggggcaaagttctccagaatgtcgtgtatgctctgaagcagtgtccaacacatggtgctgtttctcccatagccaggattcacaggtccagaaatcaaggggtggaagtggaagtggcaccactcaccatcacccctagtgacccactagcaaaatttttgcttcctgttcctgtgacattatgttctgctggcctagaggtcttagttccagagggaggaatgctgccacctggagacacaataacgatttcattaaactgggagttaagattgccacctggacactttgggctcctcctaccttaaagtcaacaggctaagagggggtaactgtgttgactggggtgattgacctggactatcaagatgaaatcagtatactactccacaatggaggtaagtaagagtatgcatagaatacaggagatccattagggcgtctcttagaatcaccatgccctgtgattaaggtcaatgggaagctacaacagcccagtccaagcaggactacaaaatggcccagatctgtcaaaaatgaagatttcggtcactccatcaggaaaaaaaccccatgacctactgaggtgcttgctgaaggcagagggaatacagaatgggtagtagaagaagatagtcactaataccagctacgaacacatgaccagttgcagaaatgaggactgtaattgtcatgagtatttccttattcttttgttaaaaacatgtttgtgcatgtatacacttgtactagaaaatttcttcattttatttccttttttcctttatcatgtgacataagatttattgacttcatatcagcgtttaagtgttgttaattttgtgtaatagcatttgggttgtggattggtgcatttctggttgtattttgttaggtgtaattatgaccttattattgtctttatttgaagattacatatgatttcaggaaatgtgtatgaattcaagttgacaaggggtgaacttgtgatggttaatactgagtgtcaacttgattggactgaaggatgcatagtattgttcctgggtgtgtctgtaagggtattgacaaaggagattaacatttgagtcagtggactgggaaaggcagactcacccttaatctgggtgggcacaatctaatcatcggccaacacagctagaataaaagcagacagaagatcatgaaaagactacactggcctagcctcccagcctacatctttctctggtgctggatgcttcttgccctcaaacatcggactccaagttcttcagctttgggacttggactggcttccttgctcttcagcttggagatggcttactgtgggaccttgtgatcgtgggaattaatactctttaataaactcccctttatatatacatcaattctattaattgttctgttaatagttctgtccctctagagaaccc

SEQ ID NO: 2392 - DNA, 3925 bp, Homo sapiens
gagtgagaatatgcggtgtttggttttttgttcttgcgatagtttactgacaatgatgatttccaatttcatccatgtcctacaaaggacatgaactcatcattttttaatcaaataataaaatcttcactttttacttcttccccttggcgtcttttttgcgttagtattttccaaaacattatctcatatgagtgttcaaatcaatgtcttcaccataatgtagttatgtgtttcctactaactgtaggcaaaaaaaaagttactgactctctttctattatgatagcctatttctttcttcctataaataagaagtactaccagcatcatcagttagttactgagtacttattttatgttaaatcctgaaaatacagggggaattataaaaacattgcatctttccttctcctggtgatgttgggtcaccagcacatatgagaaaactgactcaaagttgcccaagatggcagagtataccctggaaaacccaacttgtatttttgtaaatggatgtgctagaacaagaaaagatgattaatcctctgtagtaaataatttaccacattctttgtagcttcaacactttaggactaaggcatgcctgccatggaaaattcaccaacatcaattttgaactcatagtataatttgaactcatcaattttgaactcatagtcacccagcaaagtcaatgccacaagatatgttattaaaacttttattttcttaataaatgaagccagaattatttttttaaatttagtctctaatttttatacattttttctgcctgtcattcaaaagatagacagaatcagtgtgccctaaaagaaaaaacatcttataaaagctttatcttcagtcccaaaatttatcaacttgggctcagagaggaggataaataaaagagctatgaaatactggaattgtaggaacatgtatagttttatagtcttaaacaactgcatagattttattctgatgcagacatcacaaatgtagaatgaatagacgccttactttgttactcaagaaagacttagaagttaatatcatatgttttatcctcactaattttaaagaatcataagatggctatcatactttcattgatttttatatgaatataatcaggcaatgcctaatacagaatactacttccttctcatatcaaacttggtgacaaattcatattcacacttccattctcacagaaggaaattcttttttactttagaagctttatccagcagctgtctgttgaaaaaaaaagtccagggagtgggtttttagagaattataaatttccctagtagtttacaataaatgcagttctaatatctgaaaatgtgtttatcacttcttattacaactatttcagcaggagtgcctcttactacttctgcagagtcaacattcctgaagccccttcctgtcaagcctcctacaggtgggattaaagacaagactatgccttcctctcccagcagtgatttgggtttgaataatccgaacaaattttgcaagctctatcctgcttcctttaatagtccagtaatgactcaacaacattatgttgggaaaaaaaaaaacacaaaagaaatgaagccagggagacatttttagacaaaataagagagaaatctcttccagcaaaatcaaatgcaaatggtaaacataaaattatcccaaaactttttcataggaagtttgtgttttataaaacatactagcttatttacataccattttactcttcttgagtgagaggttgatagtattcatggaatcatagaattttataaggacttacaagtccatctaacttgatctgttcatttcctaggaaatgagaacctgaatggtttagatgacccctcttaattttagaatcaaacataggaattctcatggtttcatgttattttaggtaaataaggatccttaggtatatacataaggaagcattttaaattaatatcatgtggttatatcattcttactaagtatgttttaagtgtctctttggtgctaggctagtcactcttgggaatacagttccctaaaggagcgagcgtgtaaactagttaggttaataataatacttcattgcaagagccgacaggcgcatttttgtgtacatatttttggtaactagataagtgaagcataatggtccagaaaaatcttcatatatttagatgattttcagtggatagaagtgggaagaagaaaggatgaaccaaagggcttggagctaagagtggcaagaattcaggcacagtaaagagactgatcctgactggagtgatccacttgctcttctaaccatatttttttttcatttttccccccacaggcaccttctcactactagtgtattttattcccctttcatattctctcttccacccacttcttttcctccactcactattatttttcagttctttctttacccagcctttctccttcatgtgaaaatgttcattcttctctcctccttgaagctctattctttgtcatatgtaactctttatgctctggttcttctctatttctgtttcttttttgttttctctatgggctctttttttattcattacctaaatgtaggtattcccatggtttcatccttgaccttactctacaaacacgatttctatttccctgatttcatttctcatctgtatgcttatgacctttctgtcaagtattagattcacatatccaaatggcagctactgcttcacctggatgcctcatagccatttcaaatccacctagtcattcaaagtagaaacccacagctcagatcttattagcacaggaatggctaccataacgatatggaactaaagtatgtatgtattttttatttattatatttgttttgtttatcttactaatttttggccccattattgcactcagatgcctcaccttcacctataactcaacatacctaaaacggaattaataatctctacagtcaacttgaatttcccaagttttctgtctttgctagtagttccaatgtttattagtcacctacacttgaatctttgaggctgtctttgactacttaattatctatatcctatccattagcaaatcttatcaaatcttagaactatttctcctttctgtagccattcattacatttctactaccatcacctcacaccttaatgctgtaacaaccttctggaaagcttacttgtacctcattgttattctctcactccctagtagcaggatttcaaccctggatcagttccaccctatacattttctacttctgcataaagcctactgagtgatgctgtggaaaattataaactatagagattgggtatgttttcagagtcttggtacctaacctctttggacctttagtcctacttaatctgtttccttttccttcactttccccttagcgacaattttaaacctatatcattcttcaagactctcttcccccgctacactccttctcttcacacttctcagacaagctcctttgtgatttcatcaagaaaaatttggccatcagatgtggattactaccaagtatcttggtttaactaaatcctcctgtaaccctgagttctcctttaactcctacattctccccttcccttcttaaccaagttatttttaaaatgtagtacactcttactgtctccacttattatttactcaactcactgccgttctttgggtgcttattccctcagccttcacaccaccagtctaccacctcactgtaactactactcacagtggcaaagtgacttctaaatttgtaagtccaatgaacatctttatttagctcctttgacatcactctctcctgttcattcttataatttgctgtcctttgctttggtggacttttcataggctcatctttctc

SEQ ID NO: 2393 - DNA, 1830 bp, Homo sapiens
agaagaaagatccaacagggttgtcttagtgcatttgggctgctatagcaaaatgccatagattgtgtggcttataaacaacaaatactgatttctcaaagttccagagactgggaagacgaagatcaaggtgcaagcagatttggtgtctgatgagggcctgtttctcttagatggcaccttcttgctgtgtcctcacatcgtgctggggatgaacaagcctctgggtttgctttcacatgggcactaatcccattcatgagaacagttataatttaatcaccccccaaaggcccctacctcctaatctcatcatattgggattaggatctcagcatatatatctggggggaacacagacattttatccatagccagggtcttccaaacagaggaattagtcaaatgtcccagagagaaagagtatactacacacatgcaacatctcatctcacaggaaatgaaaccactagatggccctgctcattttaataaaacatcaataaggaatatgtaactctttaaaaaggtagccgaccaagtcaatatatcatactgataggaccttgggttttgtaactttggctaagtgagattttaaaagtacatcatttcctgaaagacaccaggttgtaaaaaaaataaaacctaagtgaaggtgtgactttaaaaatcgtgttgtagtaacaccaggagttaactcagcctgatgatgagtcctgaggccagaccaaaaatggatcagccagtactccagatcctgcagccttggctgggccaagcacgtatactttttctttcgggtctagtaatattactccacccctgggaagaaataaaaatatattactgaaaccctaggaagatattaaaataagtatactaatatcccccaggaaggtataaaacaagcacataaattgtcaaagaaatgaataagtccattgttctgagactttagaataggttcaagtgtaagtataatattaataataagctttgtagtcattgcatttgtgaaagttttatgatatttgaagtgttggggaaaaaatcggccatagtgaatttataattgcattttaaatgatttaagataatgcaatcaaattatagtcatcttaaatcatcaagataacttctttttaaaatttgtattgacataacaattcttaattttttgcaccaagtaacagaagatcaaaatatatgaagtaaaaactgattgaacttgaaagaagaaataggcaaatttaatcttctttcagcaattgatagcacaagtagaatatcagtaaggacatagaagacttgaaagacacaataaatatcataaaccaaacaatctttctgtttatattcatagagtattccactcaacaaccacataatacacattcttttcaggtgaatatgtattaaggtagacaatattctatgatacaaaacaagccttaataaattgaaaacaattcaactcaaagtatgttttctgactataatgaaattaaattcagtaagataaagatacctggaaaatccccaaatatttggaaagtaacacacataaaattagaatgcattttgaaattaaacatattataccaaatatttcaattcaagccactcttgagcatagacacaaaacttcttagcagtattttagtgaatcaaatccaatgatacataagaagacaagaccaagtggatttcatccatgtaaagttggcctaacatttgaaagatcaatcaatgtaactcaccatggtaagaactagaaaataaacattaaattatctgaataaatacagaaaagatacttgtgccacc

SEQ ID NO: 2394 - DNA, 6133 bp, Homo sapiens
tctaaacaattttttaaaattttaaagaattttatgtttgtaaaatggataaagcttgaggccctaagacctgggtcaccaacacctaactctttcatctcctatagaactaacttacgattaaaagaagagttgaaggcagagaagaaatctggattttgggacaatttggttttaaaacagaatatacagtctaaaaaaccagatgaaattgaaggttgggagcctccaaaacttgctcttgaagacatatcggctgaccctgaggacaccgtgggtggccacccatcctggtcaggctgggaggatgacgccaagggctcgaccaagtacaccagcctggccagctctgccaacagctccaggtggagcctgcgcgcggcagggaggctgattaaagaagtatggatcaattttagtcagttgataatttcatttaggaaacattgtcttgctcattatagagagttaagactgtgcataaaatactgaagtgcctcttttttattaggctcatatgtttgttcttgcaaagcgagatgcctattgtgattggtgttagatctgtaagaagctgtgttttttccacaagaataatcgacgaccggtttgagagcatctctcgcgttctttttctgtctgcttactgtccttgacaatgtgatcctgcacagtatcaggtgccagttatgcgtccctggaaggttggctcttatcagcaagtcctgcagatatctcttagataaaagtggtttgaaagaaaaggtatatttttcttttttgtttaaaagtaaaataaaacctccagttacactgtgcattcccctcacgtaaaaacaagacaaaaaccctttcctgagttgctcggcatgcactcctgtgctgtttcatgcatgtggatgttccttccgtttgttcctgtggaataactgagtgtgcctgatggcagaacacactgcagtgttatcagtgtctgcatgttttttaatagaacaggtttacttgatctgtcatctgttatgcaaaaaacagcaattacttttgcatccatctagctaaatctataatctgtgtcaatcacttatacctatcaatcatccgtatctattcacctgtcctctatgtctgtcttctctcagtctacatccatctagccttctgtcaatcatctacttttttttttaatagaacaagaagtttacttatcaagtcttgaaagggggacatgtttcaattggtgttcaaacaaaaattccagcttgtattagaaccttgaaatggtgaagttgtggaggttttctttgttccataatacagagacaagttcataatttttagtataacagctaagttgacaaattctaagtttcctcaggtaaatagtcataactgtccttttccctagagaagtgcttgctgggatagtaaaaacatacaccatttcatgacttctgcaaatactttccagcggaagtcagtgtaggtttgtttttggctaacatggtcttgctgcgcaggaatgtaaacactgtgtttgaaactctggaaatcacgtgtgtggggagatggggacgcttcccatgttgtggggagctctgtggctgtgatggctgcagttgccgtgcctctgttggaacgctaagtgcctgcaactcacgtcaatcatagaattgtgacgcacagttggcaaaatagttctttatgctatttctcaaaatttgaggacaaacccagattgggattggaatatgcactgtaaatcaaatttttcttatctacaaagactaatgtaaaaatgattttttcttctgtgcctgattaaattaactgtggtttttaatataaatatttattggtgtgctttgggagaaaaattatcttttcttgaaagaagttatcaaagcaaatttattatcttcacaagttaatgggagaatgtggttttgattctgggtgtttgaattgtgtaaacacacagcttccttgtgtgaagagagttgtcctgtgctccttctactgtactttttttattttttaataggaaagtgatgtgcttcagagaagggttcctccttaatgttgaggttttttaaaaataaaaatactgtttttaagctctttccttattggtttgcatgattattggcatctgcttacgatggctttaatcactcagagctaatggcacctttcctatttagcctcattttagaatgcagtcaacacatgtagacttttcacaaataaatgaacaacttcaaccttggttttcaagatgtgtcttctgcgtatttgaatggcctgtgtgtgactgagtccttggtgcagggccccccactctggagggcaacagtgtggcggggcaccccggctgctgtttttggttctttatttcatgagttctgtctttaagcttttacttcttcattttcaagtggagaaacatgaacatagtagcaacaattcatttttatgtatctttaaaaaagatgaccatctcttagaaacaagttcttttagaaagcagtggcctgttctagagagtgctgttcactcccatgggaacaggaccctggagcctgcagtgcctttgaggctgcgtttttggggtgcagatgctttgcggggagcccagggccatgtgggatctctcttctcaggcctgcgtcctgggcagctggattccctggcctttctcgccgacctcatgggtgagtgtggactgcagtgtcgcctactccacccttgctggggagcatggatgttactggtgcccactttgcccccgccttcccccctgcccccggtcttgcctggtgccctcagagcctgagcctctcacccacacctgccatgtaattccggtcctcctctggctgtctcacaggtgagggaaacattctgccctctgtcactccaccaatttagttttagccattaatttgctttaggtttttttagtcattcttcagtttatatttgcttgatcaaccaaaagaccagccagcagggcactcttgagtcagctctgaagagatcagctggctaagatgatttttccagtgctcaacattaacttgatcatttccccccacccaaaaaaaaaatgcttaactgcagagagcactctactctgggtgacagagtgacgccctgtaaaaaaaaaaaaaaaaaaaaattgctcagagtagtccaaaggttgtttaaacagcgctgaatgactgagagagcttgctgcttatttttttccttccagtagaaaaacagttatagcccagctgatgaggtagaaatgcactgagcaggtctcagccccagcggaaacagagtagccctcgtcatccaggtgctgtgttgcttggtaaaagtgtgtctgcctcgggctgcgacctgccacgtgaactctctgacccagcaccagccagaatcaacatttggggattcagactgcagcaacaagtgattcccctcttggcctgcagttctgtaatcccaaaattgtttctaattgtggatatgagacatcaaaatgagggctgaatcagatgaaattatgctcagttcagcctcagatttaagtgatttattgttttctagttcttcagacctaatagagctgctgtggtggctctgtcagtggttggcagtggccatcagccctcaccctgccattgggggccttgtgcgttggcatctggttgttgctagcagccctgagggggatggggcaggccaccgccacctctcactggctgctgggctcaggactggtctgctgttagggaagctgcaagtccagccagttgactgcacctatttaagaaaaagcactactctgttacctgagaacctttgagattcctgttgtgaaggaacaatcatatggaaatgaaaacttaagcttttagctaataacagaaaagtgaactagcttttgtcagttgttcaaaagtgtaaaattctactgaaagaagacagctcaatatttcaaacgctggagctgtgttatttggtaaccaagtagagacggcgcccggcagtaatctgcggctgctcagtgtggccctttcactgaggccttggtccacagcaccagccccgagaggggtcccagctgccgaccttcaggctttcttttctgtttataaagtgagggtattctcagagagctttgaggagaaaatagtgaagcttgaaggttgttggtgaagctgtgaaatattgaacacttcctaatcttagattaggttttctgcatcttagatgagtcttgaatagctataaccaaaggctcttgtttatttaaacactttaattatagagagctaaaggcaggaggcacagggtttgggtgggtgaggggctttgcagaatacagctggtgctcatcagcccctgctaggaatttaggactcactggtgtagttgctataaaagctgccacctccaggaagacaactatgggtgtttaaagtggtggtggtgtagacagcgacatttccagtgagctttaggcaggaatgcagggagggccttgggagcgaggcagcaggcgggcaggtgtggatgggtccatgctcagagccatatcatcacccccaggcagcatcctgaagcccactgagaatttgggctgagtgatgtgccccggagtgggaggcagctggcaccacacgtttctctggtagcttcttcggctgtggaagtctccaggttaggggctgatcaccaccacttcgtccatgaccctctgtctcctgtctttagaggtcagcggaacggttccgtggagccgccctcccttaagcccagatgctcacaccgagcttcctgattgtccttcttgtcatggctgtgttcaagatgttctttctgtggggcgtctcttccttgctgggctgacagccctgggacagcggggacgccacaccctggggcacaccgcctagggtcccttgtgtggtggggggccaagagagactgctatggaaggtgatgttgactgggattaccagtacaggtcctgacaactgtaaggtcacaattagtatccagcatgcctgtctgccatgcatccctttgcccatcctgagctggcgatgatgccacatgtgaggccctgtcctggactcaccatgtgggtgtttgcagctctgcctgagagaccttgttcctcatgcacaataggaagcagcaggcctgtctgttaggactgctgtgagtcactgcgatggcccaggagcctgccacgttctgaggtcatcagcacagcacccgttgttgttactgggagttaacatgcaggggggactccctctaacggcagcatgctgagtactggcagcctcactgatccggtcatgtggcctcgggagccgcacaggcttcatgggggttttgtggttttaaggactgtgagggttgactgaattatatgcactcacttgtcatgtttctgggctttttgtgcccttttccctggtactgcaggaaaggaaaagacaaagtactgtcaagagcaattgctgagcagatttgatgtgatgcagtaggatgagacatgatactgggatcacctcttccaggtcaccgcaagggtttatactgctccatgcctgcagtgcttctggctctgttgcgggagcacctgaccccagtagccacagccaagaaggttttacttttaaatggcatcggcaggtgggtaagagttgatgatgctgctggcaggtgagggaccggctgtggacttccatcgccggttccacctgccctcctgggccagggtctctgagatcttggatgtggatttcatctccttgttgtcaatacctggtgcttttatctatcatcagtacactgtacttttacttctctgctatgttgactcctgagaacatgagatttaacaatgcatttattttattaaaagccagtttttcttggcaatctgtattttttaacacaagacagtctgacattagcgcactggtgttggcggcctctgataaggcaaagccaccttttgctgctgtgttgccgcaagaacacgggtcatctggtgatgcggacacgttcccgttggagctggagcgtgtccccctcgctgctgtgaagaagcacagtaagatat

SEQ ID NO: 2395 - DNA, 2130 bp, Homo sapiens
acttggaacttggaacacattttctgataggcatcatgctatgaatggcagacaggttctccagccagtgagtaaatacccgtcagcccatttgtaactgagctgggagttaggagccctggattctggtttcagctctgtcactagctacctatgtgatatgagcaaatcctttagttactgcccctgattttctcaccccaagtctgattatttctctctattggctaatatagaatttaattgccattaggaatactttcataggaagctatattccaattcctcatgtgtaatgacaagaatgcatctcttcgcccacccgaggcagaggcaaggaagttctgcccccactgtccccagcagcccagagcctggctgcagtagttatcgggcaaatggggactcagaagagagctagagctgtgatattggcccctctggcatcagggcagcagggaaaatgggaaggggtccaactcagctataccaggctctgagtcaagttcattttcagagtcaggagattggtagtggtgtgtggagtgggcaggtaggagaggtcaccaaggcaagtttggggaggggtgtcccagtgtgtacagctcaactttctagtgcatggggaattctgtaaagaggatttgaccagggttaagggcgatatcaaaagcaaactttaggatatttaagacctttgcctgacttttacagtctagaacttcatggcaactccttcaggaggctaaatttgagttctatatctccattttgaaaaggagaagcctttttcatgccttttgcttctgaaacaccttggacatctgggaacattgaggatggagggatcctctgttttgctgtgctgcttgggtagcagctgtgacccagctcctatgccttggagtctggggaatacccagagaaacaggaggacggcacaggagctgactcaggggaagctgcagtgaacagcacatcccctcctctccacttctttcctcccatcccctctgtttctctctttcccaccacaatgaggtttcttttgttcccaaggtttgaagcctcagacaccagtgtggtattttcactgggacatctgcaagagcacatgggaggtaaatttgactgttcagcaggaagcaggaaatgtgatttgctggaataatttgatggaaaactctgagctttctggaagccacagggggtactgtgggagggcttcagcaagcccagggttggcaggtgattcaggtagctcttgcccaaccgtctccgtctacagaggaggaatctaagacccagaaagatgaactgacttcgccaagatcatcaagctaggaggtgacagaggaagggcagtaaccccactatttgtcattattaaagctcctggtacattttcagagaagaggcattaaggagagatggctcaaagggcatcttcatcagtgggaaaatacgccgtctccccagtcatcccaattagaaagtatcaagcggtaatcagtgtgctctgaatatgcggacagcacagattcagcacctgttttcttcctttgctttttcttttttaattttggaaagatttcatatcaatgctaattctgaccagatttatctcctccatcctgacttccctcccattttcttgtttcttatcttcagatgcctatcacacatccccactcagaccttgcctttatctcaaagcacggcacaggccagttgaagtgcttttctccttatacctggactttggctgcagctgtctgactggattcctggccttcagtctgtccctgacttgggtaacactggagtctattgctagcgtgacaaagacaaagatatgtccaaatgacctaagacggaggttcaaaagtacagagaagtttctatatactctcttcatttcacccttccttgaacttcaagatgctcttgcccctggcttattctctcaaacacatttgcattttgctgccactgcttcaactggggccctgggaggtatgtatcccttagcttgggccagttctgcccttctttttccaagactgtttcatctttcctagaacctcctgtctcctcctcctcctccttgtttgaggcagggaatacacc

SEQ ID NO: 2396 - DNA, 2015 bp, Homo sapiens
ggcagggtggggtgacctgggaagctgtcaggagaggctaggaagaaggtctccttaattcacaccccgactgtccttagggccccccagaagcaaggacgaggagcagaagccacagcagaggcctgacctggctgttgatgttctagagaggacagcagacaaggccacagtcaatggacttcctgagaaggacagagagacggacacctcggccctggctgcagggagttcccaggaggtgacgtatgctcagctggaccactgggccctcacacagaggacagcccgggctgtgtccccacagtccacaaagcccatggccgagtccatcacgtatgcagccgttgccagacactgaccccatacccacctggcctctgcacctgagggtagaaagtcactctaggaaaagcctgaagcagccatttggaaggcttcctgttggattcctcttcatctagaaagccagccaggcagctgtcctggagacaagagctggagactggaggtttctaaccagcatccagaaggttcgttagccaggtggtcccttctacaatcgagcagctccttggacagactgtttctcagttatttccagagacccagctacagttccctggctgtttctagagacccagctttattcacctgactgtttccagagacccagctaaagtcacctgcctgttctaaaggcccagctacagccaatcagccgatttcctgagcagtgatgccacctccaagcttgtcctaggtgtctgctgtgaacctccagtgaccccagagactttgctgtaattatctgccctgctgaccctaaagaccttcctagaagtcaagagctagccttgagactgtgctatacacacacagctgagagccaagcccagttctctgggttgtgctttactccacgcatcaataaataattttgaaggcctcacatctggcagccccaggcctggtcctgggtgcataggtctctcggacccactctctgccttcacagttgttcaaagctgagtgagggaaacaggacctacgaaaacgtgtcagcgttttctttttaaaatttaattgatcaggattgtacgtattcaaggtgtaaaatgtgataatttgtcgtacacgtacattgtgcaatgacagtcacaatcaattcctcagcgcacccatcaccacgaatacgatacattagatattctgaacttgctcatcttaggacttcacattggtgtcagtgttttctgacaaatcacgtgtatcaggaatgaatgagggaggtgtggctgggtgaaggcagagagccgaccctacaggtccacatctgcacatacatgcacaggaatgcatgctctcacacacatgcatacacacacgcacacacacagacatgcacatacactcacacgccccaggaaatccaaggaatcactgagcctgctgttggttgaggcatttctgagtatccaccctacctgtagggtcagatgtactgattgacacagaaaattaccctatgtaccactaggaggcggcagaatctcatttgggttaatctgtgtttgtctttaaaaaacaaaaacaggccgggcgcggtggctcacgcctgtaatcccagcactttgggaggctgaggtgggcggatcacgaggtcaggagatcgagaccatcctggctaacacggtgaaaccccatctctactaaaaatacaaaaaaattagctgggcgtggtggcgggcacctgtagtcccagctactcgggaggctgaggcaggagaatggcgtgaacccgggaggcggagcttgcagtgagccgaggtggtgccactgcactccagcctgggcgacagagcgagactccgtcaaaaaaaaaaagaaaagaaaagaaagatttttaagaattcagcaaaaactcagccagctctttctatggggcagttgctaatttagttctaggcaaacgtggacacattaaattctcctacaaaccctccacagcgtgc

SEQ ID NO: 2397 - DNA, 1113 bp, Homo sapiens
taagaaacacagattcccaggtcacctcatagacagggctgcactgggcctcctgcctaggcctgttcgatgaagcaccaacaagccccacagctttgttgcttttgctatgcccactgggaccagtgagagaagtgcggtcttatccctgggaggagagaaagagccagcatctgcaggcgcccacaggatgtcaagaaactgtgcaagagaggaaagaacatacatttgagagcccaaaagaccagggtttaagtcctggttccaccaattccttgctgttttggtcttcgaacagccattgaacttcaagcctcagtttcctcgtgtgttaagtaagaacagtaccacccacttcaccaaatcattgtgaagatcaagtgagatcgcagtcatcaatgtttttgtaaactgtgggccaggcaaaatgaaaacttcctgctcagagtttaagcctgtgtcacagactgggtccccaggaaggagactctgagatagatatttacttgcaatggtttattaggaagaactcataaaattacacttgagggctgggtgcggtggctcacgcccgtaatcccagcactttgggaggccgaggcaggtggatcactaggtcaggagatggagatcatcctggccaacatggtgaaaccccgtctctactaaaatacaaaaaaaatgaaagaaaaaaaattagccaggcgagattgtgcacgcctgtggtctcagctacttgggaggctgaggcagtggagttgcttgaacccaggaggcagaggttgcagtgagctgagattgtgccattgcactccagcctggtgacagagcaagattctgtctaaaaaaaaaaaaattacacttgaggaagggatggggagaaagcaggattagacagagggagaagctgagctgtgatgcagtctcaatgagcatcttacctgatgccatgggaaatgtgaaatggaatgagccttcagagttgttccagactggggaaaggggctcaggcctcaatgtctttccatggatcaatcattggatgtgaaccaccctgtaaagaaggcatgatctggagcaaggcagctctctgcagtcagggttagggcaaac

SEQ ID NO: 2398 - DNA, 17098 bp, Homo sapiens
ttttcattctatcaacccacaaagagtatagccagcatactgaaatgcacattggttgaaggttaaggacttctacaactatctctgctcagctgaaagcggataatgaacaagaacatcaatttgtgcaataagcttttgactaggagataaagtcttggaatcagctttgtgggggcagaacgaaaaagatggatttgatgtcgtgaaatggcaattctaaaactcaggagatatgttggtgtttctgagctcttactccagtgtccacttgtccatagaatcacctttcacttctggggtcagaggacagctcctggaatgatctctcatcttacggcaaaaagacagagtctcgcgctattgcccaggctggagtgcagtggtgtgatctcggttcaatgcaacctccgcctcccgggttcaagcaattctcctgccttagccgcctgagcagctgggactacggatgcttgtcaccacacccagctaatttttctatttttagtagagacggggtttcaccctgttggccaggatggtcttgaactcctgacctcgtgatccacccacctcagccttccaaaatgctgggattagaggcatgagccaccgcacccggcctctgtaatctatttttaacacagaagcagagtgatgatttcgaatgtaagtgatatcatgccactcttctgcccaaaatgacaaccaaatcctaacaatcaatttacgaagacttcaatgatctcacagcatcctctgttcaactttgtctcatgtcctggtattttatcctttcttctaccctgcaaccatacttaccctttggctagttcttgaggatactaagaactcactcttccagggatttagctctgtggtgccctctgtcttaaacactcttggctcagataccaacgtgacatatctctcactctttcaaggatttatttaaatatcactttatgggtgagaattcctttgcctgctctaattacagttgcaagaacatgtaccatcagcctggttgttcctattctccttctctgaatttttaaaaaatctacaacattctatatttttcttccttattttactgttttctaacttttccaaataaaccatgagaagacaagaattttgcttatagctgtgtcctcagcagacagaattttgcctgacatggcaggaggcattcaataaatatctgtttaatagaaatttcagatctgagataattgcatgagctataaattgtttcaaaaattacatatagatgtatcagtttttttcccaaattggccatgtcaaacactttatcagcgtgatttgtttttactggtagtgatgttaagagagattccatttgacctatttattttggaagtgattcgactatgagtccactgtctaaagaggttctaatcaagttaattattttttttatcagaaatcttccgaagttttcctggtttgtggtgttattcctgtataataaacctgggatggcaaaaaaatgatataaataagcaaagctggcttgcttctacccttgtttctacatatttctacatgttctaccctcattcttactttcctgtgaatgagaaggagctttatcagtgctgaagagaaaattgagaaatcaaaacatgtccttaggttacctccctgagagttgaagcttttagtaggaagagtaaagaaatgtaaatataagaggattttaacaatggttcttcacattcctttcactttacctctcaagtatgtggtgagagccttttttttttttttttttttttgagacggagtctcgctctttgcccaggctggagtgcggcgacgctatctcggctcactgcaagctctgcctcctgggttcacgccattttcctgcctcagcctcccgagtagctgggaatacaggcgtcagaccctttgtcttggtaaaaactccaaagtcctggcttacctggaaccagaggatggactatgagaacagagatctggagaaggtgggcaggacttcctatagcggaggctaaaatctttctgacaacttctctgtgattcaggaagcttaacagagtggaataaatctaagagtttggggaaaaagaaaaaaaaagcaacaaaaacactgttagtgatagagtgtacatccataggaaatgagtacgtgaggaggcatgtataccttggaaatttgatgtctttgcctactcttactcttcagcctgcataatcattattgtctattgttatcaattacatagtaataaggggtgaaatgatgttgaaaagtcaagggcttctcagttaactagagctgccttactggttgggttatttcactgttcgacttatacatttcctttattgttctttgttctttattttattgttttttgcttgtttgtttgtttataacatatgagttgctaaacacctaaagcttacagtaaaagagccagagaggcaacatgagctctatttcagaaatgagttcttatccttggttttacgtcttgttatctgtgtggccttgggaaagttgcttaacttcatacttcccaggacctactcagaaaggggcaggaacatcagttaatgtgttaaccatcagttagtgtgtcactctgatttttcaaagagaaactgcttcccagcggtgaaattcagtctcacctgcaatgttgtgtgtatatttaagccagttggcttggctcttgtgtgatttttatgattgatgagttttcctattttcatcatgatgttcctctgagagaagaaaccagaactgaggccagattgataacaatctcattatggccttattattgttctggtcctggagatccataacttggttttctattagcccattactcaaatgagactgttggaaagcaaaagcttctgttgtgaggcagcatgagccacctggcttttggaaatgcctgtttggatgcactgaagatgagaaagctatgtggagtggccagcacaaaggatgctttttcttccttgtgcatctgtattcgtgtgaggatacagtctccctggaaagagagatgcataagacctattaacatttagaggataaatgcacactcactaagaggtaaatatgcctattaacgtaagaaacatgcatcaatttcactggcaatctcacacaggcaaacactaatgttgtgaggacagaaagatccaagggcggcttgaaatggataggttttaatttaagaaacattataaggaaaaaaaagttgtgaccttaaaaagatgaagaaaacttggcattggaatctgaacaagatatctgcaggttttctgttcctgagatttcaagagcaggaaaactgagtaagaaaaggaatgagagaaaatctaccttctacattgcagattgtgccattatccatttaatcctaaatttaggataaatcataatctccttgcattagttcgctaggactgccataacaaagttatgcacagactggatggcttaaacaacagaaatttgttgtctcacagttttggagaccagaattgttgatttcttctgagacctctctccctgcgctgtggatgtcagtcttctccctgtgcctgtgcatcttcactccttagtttttttctgtctttgtcctaatttcctcttattataagggcaccagtcatattggattacggcttgccataatgatctcattttaccttaattaattctttaaagaccttatatctaaatgtagtcacatgctgaggtatattcatgacacacatgctggggatgaggactcagcatatgaattttaaagggacacaattccatctgtcaccctcctccatgaaaaatctaagtgatgggtcctcttagcccatttttcagaagagaaaaatgaatgttctgaaaggttgaaacgctgtcatattcaaacagctttaaaaaatacagagagtagctgaatcacagaaaacagtgacttgctctttccttccctccaagatgtcctttgcttccttgattaacatttaggaagaatggacctagaaaagggaaaaacataaaaacacaaaatcataatgctgctcctccgatttctgggtttttatgtaattataattactagtatactaagaaacaacccatgatcttgaaagcattcatttaatttctcacaaaactgtctaaacaatggaacttaaaataagtgaacaaatatttggttaaaatatttggataaattatgtatctgtgaatattttccacgtgcatacttaaatatgaaatattaagatgtgtgaggcatgtcataagaacaaatatgtcttgtttgaaaaaatgcaagtaaataatcttattttcagttttgtaagtttagagtttttcctacgaaacttcagtctttatggaatcctaatacgacgttcttatttctatatgggatttagctactataaattgggagaaattaagagtgacatctatttatcttgacattctatatatagttttttcaaggtaaatctattaatactgctttattcaaaacataatatggcacaatcaaagttgtatcaaagtctgttaggtagattcatgacaagtcatcattactaaattgttcacagtggtagaaaggggtgatggaaagatgacttgagtaaaactgaggaatccttcagtttattttaagctcagctacaaacctgtctgatgatactgagcaggctacgaaagctttccaggcatcagtttacttactagtaaaaatagaaatccccaacatgtaattagcaaattagatcatatgtgtgtaaacttcaagaatgtataaatgtaaaatattattgctattattattatttttctttgtctttcctaaggaagaaaattgtctgcttgtattctaagcactttgtaaacaaacactaggtattcaatgaacagggagcaaaatctagttctcagctagctgatagagtgagggagagagacagggtgggtggtttgtgattaaacactccaaatgttccatgctaaaatagatatcagtgtggtatgccctgggagcataataaaggacacccctgatggagtaagcagggatgaggagggagtcagaaagtttcctagagatgacactgaaacaaagttaattagtatgagcaggaggtagccgagtcaatcaaatactttttcatacagaatacattccataagcgattgctttataaccaattaaactcttcacacaaaatataatgggagacttaattatgttttgatataatttgtgatttttaaaaataaataaatggttggtttctttctacaagatttcctgtggattttcaaaaactttcaattatttctagatattaatattaatacttctaatgtggtgattctgacatggcaggttgtatttccaaaaacagtcacaacatttcctattttgcatcttcctctacaatgtgactttggccctcctttcatggaaggatgaagcctctgcttcttcccttaaatgagagtgtgcttccaaatcctttaacagatagagaatgccagatatgatgctgtataacttctcaggctgcctcatgaaaggtgatgcacctttgcctttttcactgaaatacctgtgcttggaacacacacactttaaatatgctgcaactgttaaactgtgaggaagccaagctacatagtaggcaaacgttggggctctgaacagcaggattagtctttgatcttcccaggccaggcaccagccatgtgagtgaacaaccctttcgatggtattctttccaggctcaagtttccccctagcttttgagtctttcagccatagtccccaacatcaagtaatgtagtgtagacaaactatgccctgaggtacattatgaattcccaacctctaaaatccaggaacataattaaatgtttgcagtaagctgacacgttttgggccagtttgttatggagtgaagaatcagaataaaacttgacaccaaaattgtgatgctgctgtaacaaaaacctaaatcatgtggcattaactgtggcccaaacagtgggctgaatcttgaagggccttgaggagaatatcagagaacactggagtgctagggaggaaattgttacaggaggctgaaaacaaggtaattcttgaagtgcagtagcaacaagttttggtggagtcttccctgtgatgatgtgtaaaatagaaaataattttaattaactagtggatttgactgagaaaacttccaatatggaatatgaaataagatgattatttgatgtattttagctaacatatggatagagagaagtgagccaacaagaaattgtcgggttttaaagcaactaaaatttataggaattataaaggagccaggatttgttgggttattaaaaacaaagaacaaaaaacaaaaatgcaaaatcatgtgataaagagccactgggcaaaaataaaacacagagtacttgcagaataaatataaagccaaggttattattgcagaaatcctttgtaatactttagaactatattaggtggtacctcgtagaacctttaaaatagactgaggccttctaaggatctcaacattgtgctttacagaccatctctcttaaactatagggcttctgagaatctgaagagcctcccagaaacctaatccagagaaaatttgtagaagtatgcttagtctaatggaataaattataaatcaatatacaagaaacccaaaaagttttattttcatttatttactaatttttactaatttgactaattttatttatttactaaactaatttatttggagacagggtcttgctctcttgcacagacagcagtgcaggggcggtaccagtagagctcattgcccaggctgcaatgcaggggcagtgccaatatagctcattgcagccttgaattcctgggctcaagagatcctcctgcctcagcctttgagtaactaggactacaggtatgtgccaacgtggcatgccatttaaatatatgtgtatgtgtgtctctgtgtgtgtatatatatatatttatatatatatatatatatacacacacacacacacacacacatatatatatatatatatatatatatttgtggagacatgatctccatctcattatgttgcccaagctaggctttaagtgatccttctgccttgacctcccaaagtagtgagattacaggcatgagctgccacacctggctctagaaagtttttaagagaaaaggactgaaaggaacagatagtataaagagaaaatagacttttgagaaaccagattttaataggcagaaagttggctgagagggacacttagttacaaacatgcatcctatctaaaaatgtagaaaactgattgatttggaaggttggggcacgaccacagagtgcagagccaagagtcaagggtaacaattaaaaaggagtagcatggaattctaatcaagaactgatgatgtgtgcttgcttgcattttagaaattgttattatctggtgtcttctattttgtgtgcctttgaatgaaaatgactacagtggttgtcacgtgcctgtcccactattgaattgtgtgtgtgtgtgtgtgtgtgtgtgtgtgtgtgtgtgtgagagagagagagagagagagagttgggaggtatatagtctcctgtctctttagtttacagatttttaaattgatagaaactgcactagagttgtcgtacaaaaggggcttcatctgaacatggacctggttttgataatgaaatcttaaacttccatctgattccataatagtagaaaacttggaagtgttggggagggcgaatgtattttctaagttgaagggatgtaaattgttgggactagaagtcaaattggagagagttgtatcttcaaaagatatctataactgtattgcacgtatttatttatagtgtgaatttgcaacttctcccctcaaaatgaggaaagaaaaaaggccttgtgattgctttgagtatggcagaaatgacattcttccatttgcaagatgtgatccaaaaggtgatgcagattttgcttcacttattggaaaactcatacttcagtcccttcatgaaggcagtctaactgccgtggaactgctatgctgagaaaattaagctacgtggtgattttgcatgtatgcatgagagtaagcagttctagcccttgattcattccatcccaggcaccggacctgtcagggaaagaaccttaaaatgatctcaacccccaatcatcacattatggttagtctttaattcatccaagtagaggtcccatatgttatgacgcagagacaagcattgtgtaatgtccatgtggctgtccttcagaatgtgagactgtaattaagaaatttcagataaagccactaagtctgacttgatctgtgatgcaatactagtaaccaaaatggtacattttaaataaaaatgtattatatttcaaacctatatccatattgtaaaataaatccacacatatctaagaatataaagccaaaagtaaaagatctcttcacacataccctcagaacaaaaggagttagtactcttggtaaaagtagtccccgtttgaagctagatgtgcattcttccagatactttatacacttacatattttatagatactctcttttgagggataataataataatttgtggaatactattcatatggttcaaaatttttgccatttgaatgtaactggttatgttggaaatcgtaacattgcagcttatgtataaatatatatgattgcttttaacatctaaatacagaaatgagatatgactttcatggacattagcaatttttttcttcataagcctcttaagatactaataatattctttattactttttggtataaatgagtataattaaggatgaactaatcatataataattgctataataattattatattcactgttttagttgattttgaaagattaaacttagaacatttgtgtcagctttaggcactgtgtctactaagcttagaagttggttctgacctaatagagtctttattgtggatgtttataatttgtttaatcatttttgaattgaatagttttttttgaagtttctactgtgaaaataattttttttgttaaaaatgctgcagtttacatgcttgtaccttttcccctttaagtgcatgcataaatatttctctagaacacatatctgcagttacattttttaccttgataagtatgtgcatttttaaaattttaataaatactctcaaattgccttctcagaaaactagcaatttatagtctttataacagtgtttattcattgacacacaaagtgtgtttgttcaattgacacacaaaaatcaacagcattgtagtatgccaacagcaaattcattgaaggaaatccaaaaagcaatgccatttgcaggatctacaaagaaaatacctaagaataaatttaaacaaggaggtgaaagacctctacaagtagaactataaaacactgaggaaataaaaagattacaaaaaatgaaagatatcctatgtccctggactggaagaattaattttgtgaaaattactgtactaccaaaactaatctacagattcaatgcaatcttgcagtgtcatataccaatgtcattctttataaaaaagcctaaaattaatatggtaacaggaagtctagaatagccaaagcaatgttgagcaaaaaggaacaaagttggaggcataacagtacctgacttcaaaatatactacaaagctatagaaagaaaacaacatgttactggcataaaaacagacacataggccaatggaacaaaatagagaacttagaaataaatccatgtgcttacagctaactgatttttgcaaaggcctcaagaacattcagtgggagaaaggacagtctcttcaataaatgatactgcagaaacttgatatccatatgcaaaaaaagaaaactagacccttatatctcaccatatataaaaatcaaatcaaaatggattaaaaacttaaatgtaatacctgaaagtataaaactaccagaagaaaacattggaaaaatgctttaggacattggtcttggcaaaaaatttttggataagaccccaaaagcacagataacaaaagtaaaatagaccaatgggattacattaagctaaaatgtttcttcacagaataaaaacagtcaatagaatgacgaaacaatcaatctatataatggaagttttaatatttgcagatttatccatctgctgaaagattaataacaaaaatatataaggaactcaactcagtagcatgaaaacaaataatccaattaaaaatgggcaaatgatctggaaagacgtacaaatggacaatgggcatattaaaaaatattcagtatcactgatcatcagaggaatgcatattaaaaccacaatgagatattttctcaccccagttaaaatggctattatcaaaaagatttttaaaaggatgctggtgagcctttggagaaaggggaatgcaagtacactactagtgggaatgtgaattggtacagccactatagaaaacagtatgaaactttctcaaaaaaaaaaaactaaaagtaaatttaccatgtaatccagtaaccctcctggtggatatatagacaaaagaaatgaaatcggtatatagaatagatatctgcattaccatattcattaaagcactattaatagtagtgctttattaatagtaggcaaaatatgtaatcaacctaagagtccatcgacagatgagtggataaagaaaatggggtgtgtatatatataatggaatatgtatttgtccattttcatactgccatgaataaatacccaagactgggtaatttgtaaagaaaaagaggtttaatggactcatagttccacatggctagggaggcctcacaatcatggcgggaggtgaaggagaagcaaaggcacatcttacatggcagcaggcaagagagtgtgtgcagaactgccctttataaaatcatcagatttaatgaaacatgttcaatatcacgagaacagcctgggaaaatgtgccctcatgtttcaattacctcccacctgatccctcccatgacatgtggggattatgacagctacaattcaagatgagatttgggtggggacacagccaaacgatatcagaatatgataaagaataagtacctgttatttgcagcaacatgtgtggaacaggaagccattatgttaagtgaaataagccaggtatagaaagacaaatatcacatgttctcacttatatatgagagctaaaaaagttcatgtagtgaaggtagagagtggaattatgggtatcagagagtagaaagggtgagaggtggtgaagagaggttgggtaatgggtacaaacacacagttagatagaaggcaaaaagttcaagtgttagctagcatggtaggttgaccatagttaacagtaatttattgtacatttcatcaaagctagaagagaagtttgaaatgttaccaacacaaataaattgtaactatttggagtgatgggtatcctaattgtctgaatttgatcattacacattatatgcatgtctcaaaatatcacatagattccataaatatgcacaactattatgtatcaataaaaaagcaaacaacaatttacaaaacctgtacaacattattttatctccattaaatataatctgcatgtgtctcagttttgttttggtccttgaattatctgtttccgtttgttttagaagatggcattgagggcaagttgcccttctgaaaagtgattaagaaactgtacagcatacctaagcctggactttctactaattctcgtatcagaataaatgttttcaggtgcattttcatatactgggcaattggtataactaataatcatgtttttaatggtcgttgggtaaacttatagatgttcacaaaagggaaataaaaagagtaggtacttttgtttttgttttcattatataaaacaaataaaatcagcttacattaagtactatgccatggagatttgagttgaaaattcctttgtgtgaaacttcagtgacctctaatctgatcatagatttggtcataaactctttcatggagataggcccgaagtacacttctaagcctacctttttcatctccttcccttgtctttccaatctccatcttttactttcaatccccatctccagggaggagagaacagaatgtcatgtgatttgtgggcttgcttaaacagtcttctataatgcagacatggttggtatagaactagggttgtggccttgagtgcagctatttctaagcaaatagtgaactttgtcatcttaaatgctcatattaacaaattagacacaattaacaaattagggaatcaaaaatatgcccttttaaaaggatcttcaacatattactaagtacggttatataaacatctatggctggaaatcaatgaccataattggaaaatatgaaatggagtgatgggcctgctagcatgaaaaagtgtccatgaacccaatgtcccaagatttgccaagaataagagatgcacaggcttgggggtggtttctagtaatattattattattaaaattaaatgatatagcaaacttatattttgactgctatttattgagtaatgagataagaaagtaggctcaatttgccatcttatgtgtatcaacccattaatgataatttatcccctgagagttccacgttttgatcacattatttgctaattttacttcgaggagcctcagaattctttaaacattgttagtgaatccacaattaaagcagattccagtctgtatttaacacaacccacatttataaacttttcaacatgttgttttgttttaccatttaacatctcctactggcctcaagatcacctaacataaacaaataggtattaaatattgatgacgttcttattgagaaccaggtaatttcacagtaacaataattttcaaatttcgagtttctctctttctcttccttttttttttctgaaccacagaaactttcatgaccattacttacttgaaaagggattgtaagcatggaaaagatgtatgtgatatctcataatttagatttgtatatttttacattatatctagaaatatttactcaataaatattaggaccgggaaaaagggggagttttaaatactgcatccaatgtcctcatttatagctgaggaaactgacatgcaaagaggtgaaatgacttgtccaaaattcctctgcctgtaagtggaaaagccagggaaatagctcaggtcttctctgcagtctagaatctttcagtatactgtgaaattgttctaattgcaatccaaaatcatacaccaaagacttgtgtctctatgtgtgtgtgttgtatgtcatttgaaagtcagttgctaaatactcatcgaactaatcaaaaaatggcagctatggtaatgtctatgtgtctataaatatgatggatacataaccttgtgttcttcctgttccatgtgcctgcagcaattgtcctcaaaatgaccgtggcttcccacagccttctccctttaaaagctctgccattttttccccacaggaagttttgttttctcttactatagcagaaccacgtggcttgagattgacaagtaacctctttgcaggtgtcatttcccaagaatcaacagctctgccacaatgtttccaattatgtttgacagcgtccttgtaaaaatctgtcaacaacctattcagcttgtcacatacaaagtacactttcctagtctggtcttgtctccccagcaacaggtattaggtcaaaccaaactacacggtcatcatggagagttagagccttacaaggaccaccctagagtgattttaaaaaatcacttttgggccagacgcggtggctcaagcctgtaatcccagcactttgggagccgaggcggatggatcacgaggtcaggagatggagaccaacctggctaacacggtgaaactctgtctctactaaacatacaaaaaattagccgagcatagtggcacgtgcctgtaatcccagctactctggaggctgaggcaggagaatcgcttgaatcagggaggaggatggaggatgcagtgagccagatcgcatcagtgcactccagcctggatgacagagccagactccatctaaaaaaaaaaaaaaaaaaaaaaaaaaaaaaaaatcattttaggatgaaacagagttattaaggagacattgctgattaaattcactggaagcccatgatagggagtgccattgaggttgatagctctgaatactctgaagaaggctgcactcatacattaatgtattcagcatagtcaggggttacatctcagactgctgacagaatctgccgatttgataactgagcagccatcattgtacactgagaaatcctggaagaaggaaaaagtgccaggaactataaaggtgagaacgtgtcctgattttttagagaggaaaaaatcaggaatgtgtcctcattttttagagaggaaattacagatttttgtcactgtctaacggaggcaattaaattaatgttgtatttgaacacttaggatacataagatctctcatacaggtatgtgaagatatctattatatgggttgactcacaatgcatgaaattaatgatcaatgagaactaacatgagttaagagccaagtgttgccaaatttcttagttgtcttttttatagagagtaaataaatatttcataatggaataaacatggtgaaatgagagctggataatatatttatttgatttcaaggtggtgtcatagcgctttcatcataaatggagaaaaaagttcagtgttaactttagctatgttctgctgagaattttatgtgatttaaatgaagccatatgagatctatttagcaaacttggaacaagtttaagatctgtatttaccagaattacactccatgaaggcagggcgtttttctctctgattcactgcttgattcccaattcttagaaaagtgtttgcctgatacacatactaaatataatttcattgaatgaatgcagaaagcctggggaaacggaatactatgtaaaaatgggtgtcatcaggtaaacaggaactccagtccttctcaggtgtcatttacctgatcatagagtttccaatgagttggttcatgttgatctcgaatttattcttggctgccatattttcttgtgtttctactctatatgtcttagtagttcagcctactacaacaaatcaccacagactgggtggcttaagcaacaaacatccatcacatatctggaggctgggaagtccaagatcaagatgctggcagatctggtgtctgatgagggcctgctttcttattcatagacagccatcttctggctgtgtcttcatatggtcagaggggcaatgtggcactcggggatctcttttataagggcactaatcccattcattagggctccactctcacaacttaacctaacctaaagtatctccaaataccatcacactgggagtaaatatttcaacatagaaatattgagtgtgacacaaacatttagtctagatcacgcctaaatgtgacttagtctctgaagagagtaaatgtctataaaagacattactgccactgcttaggtgcctaaatgcaatctctactaatgattcctgggttgaagctgtcagcctcagaagccaaaaagggaaagagaagcgtaggaaaaatgcctgcacaacttccaacttttcattgcatgaaaaaacttttgcaatggggatttaaaatgctcaaggctggaaacaccagtgtttggacagagtgctaactcctcagtgtggaaacaacctcatggcagtgaaacacaatacgtttttcacataactttattgtaaatgcaaatattacgtatcatatagcaccgctactgttgcaggcattcctacctccaccgtgacttcctgtgaaatgcaattgcaccttccctgtaaaaatttcctttttcgttgctatgtagaaaatcattaacatagcctaagtgatactgctattcttagaaagactcccttgccaggttggccctcgggtggcatgtggtaacttcaatttcccaccattctaggaactgataaatgtagctccctgtgcctaaaccgtacaaacattatggtttatgctgaatacttgctttctttctgagagtctgcaatactgatacatctgaggctgagggtttttacatgaccagctaccaatagacacttcaggcactgaggttgtaatgcattcctctggtagatgatgttttacatgcattgtgacaacttgttgcttgaggtattaagtgtgtcttgtgtgagtacaccatgagaagtctgttggaagcttgagtctagttttctctgaatttcaccccaggtgcaagaaaaggtgacttttctctttgctgattttgctttgtattctgttgctagaataagtcatagccatgaacataattatatactgatttctatgagtgttcctagtgtatcattaaacctagcagtatttatggggacccctgacacaattgccaagaaatgaagcacattaaccgtacagattttatctgagactacattctgagcgtccctggaaattatcgtaatccaattcttttaatgtctacttgcttatttaaaaatacccatttgacattttaaaataactaaaagagtataattggaatgtttgtaacacaaagaaaggataaatggttgaggtaatggacagttcatttactctgatgtgacacattgtgtgcctgtatcaaaatatcttgggtactccatcacaagatattattttttacttttatttttaattaaatttttcttttttacttttactgttattattttgttagtattagtatttatttttctaccattatcttattggatcatac

SEQ ID NO: 2399 - DNA, 19602 bp, Homo sapiens
ccaaagtgctgggattacaggtgtaagccgccacgcctggccgaattagattttttaaaagtagaaattaggaaataaagcctcctcagtctaactgccagccacttaattattttcacaccccacagggaactgctgtttccttgcatttttcacatgtgtcccaagcagggcctcaagtctatctgccaccccctatttctccagcctgactctgacttgcagtaaaatacttaatttccagttccttctgacattcccaaatgccagtttcccctcccttattcacatgatcaactatttgtcctttagtgtacattttgatacctattgtaatcattttttgacaaagcatttgatggcacatttaaaaagatttgttttctgtttgtaaatgtttttttcttctagtttccctagacacagatatcttatcagaatgttttttgggtcagggtttccctttggaaaagttatagggagacgtgtcctcagccacccttcagttttttccttggacctgagattcagtactgtctggggaaaaaccaagatactggccatggctgtgtctgcaagagtatctagtgaatatcagctcctgggtcattttctcccataagacaaccagagatatggagtgtagcctctcatctcccataagacaaccagaggtatggagtgtagcctctcatctcccataagacaaccagaggtatggagtgtagcctctcatctcccataagacaacctgaggtatggagtgtagcctcttatctttcataagacaacctgaggtatggagtgtagcctctcatctcctgtaggacaacccgaggtatggaatgtagcctttcaggagagcaggtgaatgccctggggctgagaggcatctactggtgccctgtttttttggaaagctaaccccttgaggtattagtattgtctttacccaacccagcttccatttcttggagacacattgctgttcagacaatcagatgccggtattgaaggggaaaccaaaataatttttgcctctggattctcctaggggacagaaaaatagtgaaagaaaaatggtaaaaagtttgtggaaaaaaatagcactccaaagacaaagaaaaagaaactgaccccagtgagatggtgcaagaacttgcaaagtaaaatgtacctggggcactcactggggcatagttcagagtctcctgagagaatgattattgagcacttaagtgaacaggatggggtggctgaatctctcagtaattggatgacctgacttgacacatgaatcagacatatctctaccttgaaacgattaaatgatttgttcacttattttgaccttagttttttttcttcttctttttttttgagatggagtctccctctgtcgcccaggctggagtgcagtggcatgatctctgctcactgtaacctccgcctcccggattaaagcaattcttctgccgcagcctcccaagtagctgggactacaggcgtgcacccacatgcctggctaatttttgtatttttggtagagatggaatttcaccatattgcccaggctggtctcgaactcttgacctcgtgatccacccaccttggcctcccaaagtgctgggattacagacgtgagccaccgcacacggacttttttgttttagacagtgttttcctctgtcgcccaggctggagtgcggtggtgcaatctcggctcactgcaacctctgcatcccaagttcaagtgattctcatgcctcagcctcccaagcagctgggactacaggtgcccaccaccacacctggctactttttgtatttttagtagagatgggggttcaccatgttggccaggctgtttgagctcaaaattctgacctcaagtaatctgcctgccttggcctcccaaagtgctgggattgcaggtgtgagccactgtgcccggctgacctcagttttttaactgtaaattgcatcttattagtagggcttgaaaggtaagaaaatatttacaaagggcataaaaaggtgagtatcaaaaaataatatctaattatatatttcatttgttgaaaattctcattcacctttttctttctcagagtgaatttaggagttttctcaggtgtggttttcttttcttttcttttctttttttttttttttgagacagaatctcgctctgtcacccaggctggagtgcagtggtgggatctcggctcgctgcaagcttcgcctcccaggttcacaccattctcctgcttcagcctcccaagtagctgggactacaggcacccgccaccacacccagctaatttttttgtatttttaatagagacggtgtttcaccatgttagccaggatggtcttgatttcctgacctcatgatccacctgcctcggcctcccaaagtgctgagattacaggtgtgagccactgcgccctgccctcaggtgtgctttttatagctgagtgatttcaaacaattccatctagcttttggaatgtttgggaaaaaaataagaacattttttcttccgttttggctatagagaattaatatatttccacaagaaaatgtggtagataattggtgagttacatagattcgtgaaaacatcagtttctttttttgcagggtaaatttgcaaaagtaagtatctttgttctatatcctgttattttgatttctgagtttaatggtaaattttatgtgatgaaactaggtacctcctagaagtgttcccatataactgtttacctcatgatttttaatacaaaaaataaaataatgctttattgtccaaaagaaataaatacatttgcttctcttactgaggtacaaaaggtaagcaccttaaaattttcttatatgaacactgtttttgaatcattttgctggatttttcaaacacttagtttcaaaaactaagtgaatgactctgacatgtaattaaagcttgagcccaatgactgcaagctaaggttaattttgagctagcaaacggaggttattaaaggcccatttagttccttctggaaagcctttcctgcagatgtcccagcctgcttaccgcagccatggaagaagcctctatagtgagagaagctacagagccctggaaagctggggccccacaggcagatgcagttaaggttaagatagaaggggtttgggagtgtcttattgaagataaaattgttactgttttgaggcagttttgagaggttttaaaataaccagctagatgtacattaaaaaaaaaaaaagaattccaaaggagtattgcaacaggaggaagtaccaactataagatctttaaggattataaagattaggtagaaaaggcctttttttcctagagaaaacaaataagattagaaagaaggtgaggggaatatttaaatgaagggtgaaataatcagattttagatcagagaatgttttaccctgaagtcagtgtgttcttaggagtgttcttcagacactgaatctgcagtagcataaaatgaggttgtatggtggctcggactgagagtagctcagagttcaggagcctgtgggaagaaaataagtgaagtttgattaagaagtattttatgttgaccactgaagacaaatacagctgatttttttaacgagaaaagaaaatatgcagagtgttttcctggctgtgtagtaggtaagaaaagagagcaccatctaagtcacaatgggaagggtgtttcttttcataagtgttcctggagaacacagaggatagagaattttattaatcctagctgtttgttatctatatgcttcatcttttcccaccttttttcttggttctatacttttcttccatttgactttttgggggttgtatattttatttgaatccagtgaatataactacagtgttctgctgagttctgtgagtagctgtatcagattactgaatttcaaaaaggttatgggagtccccactttttaaacagtaggtcagaagcatagatgagcccatggggtttgtgactggcatctgcagtgaggacaatgttgtgggactgagccctgaatcagggtctgtgctgactctgggtggtgtcagaattcaagtgttagacaatgagttgctgttggagaattgttggtgttcatcaaactctgcagatttggtgccagaagaaagatatcacagactcctggcctagaatgaaactccgggtgtctgggaatgggaagctctgctctcctctacacaggctgtcacactgccccttgttctttgattccaggtctcctcccagggtgacagaagactgaaaacttaaaggagatctgatgacaaacccccttttgccacagctgccagcagaggatttccacccactcacaaacacccactagacattgatgtgtccacacccctctctggacaaggcaccaccctcaggaattttaccacagcatttttgatcctagtggtttttttggccaaaaacctacaaaagtgtctacaagtctcctggcatatccctattttcagacacggaatctgcagtagcatcctgttttctccaccagcctaggattcataatcttatctggctgcatggacccagaaatgaatcagagtacagccccacctgggccactatctatagcacaaaccagtccttccacctgcattgcactctctccaatcgagggatttttttcttttaacttttatttttgggtggttcaggggtacatgtgcagctttgttatacagctaaaattgtgtcatgggagtttggtgtggagattattttgtcactgcagtactaatcatagcaccaaaaatgtactttttctgacccttttagtcctcccaccctcaactaggcctcagtgtcttttttcccctctgtgttcatgtgttcttatttatctcttacttataaataataacatgcatttggttttctgtttctgtatcagttttctaagaatagtgatctccagcttcatccatgttgctgcaaaggacatactcttttttttttttttaatggccacacagtatttcatgatgtcatgatgtttatgtaccatatttgtttgtttgtttgttttgatatggaatctcactgtatcacacaggctggagtgcagtggcatgatctcagttcactgcaacctccacctcccgggttcaagcagttctgccacagcctcccaagtagctgggattacaggcgtgtgccaccacactcagctaatttttgtatttttagtatagatggggttttgccatgttggccaggctggtcttgaactcctgacttcaggtgatctgccgccttggcctcccaaagtgctgggattacaggtgtgagccactgcacccggcccatattttgtttttattaggttttttattttttgttatttttggagacagggtctcactttctttcccaggctgcagtgcagtggtgtgatcttggctcgctgaaactcacccactcaggctcaaacaatcctcttctatctaagcttctcaagtagctaagactgaaggcttgtgccaccatgcctagctaatttttctttttaatagatgggattttgccatgttgtccatgccggtctcaaactcctgagctcaggcaatccacctggctcagcccccaaagtgctggattacagacatgtgccatcatgcccaaccataccgtattttctgtatccagtctaccattgataggcatttaggttgattccatgtctttgctattgtgaatagtactgcaacgaatgtgattgtgcatgtgtctttatgatagaataatttatatatttttaggtataaaccccgttgtgaggttactgggtcaaatggtaattttatttttagtttagtgaggaatcactacactgcttttcacaatggttgaattataataattgccattctcactggtttgagatgatttcttgttgtggttttcttttgcatttctctaacgattagtgatgagcatttttttatatgcttgttagccacatgtttgtctccttttgaagacaaacatctttttcatgttttttttttggtcttcttttaagttagtttttttttttcttgtaaacttgttttagttcttacggattctggatagtaaacctttgtcagaagcatagtttgcaaatatttcctattattttgtagggtgtctctttactgtgttgctagtttcctttgctgtgaaaaaagatcattagtttatttaggtcccatttgtcaacttttgcaattgcttttgatatcttcatcatgaaatctttgacagtttctatgtctagaatggcacttcttatcttccagggttttttgttttttttttttttataatttttaagattaacatttaagtctttcatttaccttgagttgatttttttatatggtgttataaaagggtccagtttcagtctgctacatagtgctagctagttattctggcaccatttattaaataggaaattcttcccacattcctgttgtcacctttgttgaagatcagatggttttaggtgtgtggcattatttctgggctccctattctgttgcattggcctatgagtttgtttttgtaccagtaccatgttgctttgtttactgtagcactgttgtgtagtttgaagtcaggtaatgtaatgcctccagctttcttgtttttgcttatgattgccttggctattcaggctcttttttggttccatgtgaattttaaaatagttgtttttttagttctgttaaaaaatattttggtggtttgattgaattagcattacatctgtagatttatttaagcagtatggccatttttatgatagtgatcttttttattcatgagcataaagtggttttccatttgtttgtgtcatctctggcttctttaagcattgttttgtaattcttgtcatagagatcttttacctttctggttatctgtatttctagatatgttattcttttctgtggcagttgtgaatgggattgtgttttcgattcggatttggcctaggtgttcttgatatatagggttgctactaatttttgtacatttcttttgtatcctgagactttactgaagttgtttgtcagtttaaagagcttttctgctgagagtatatgggtttccagatgtagaatcatgttgtttgcaaatagggatagtttgacttcctctctttttgtttggatgccttttatttttatcttttgcctgattgctctggctaagactgccaattttatgttgaatataggagtgttgagagaaggcatccttgtcttgtgccagttttcaagaaggaatgcttccaggttttgtccattcagtattttggctgtggatttgtcatagataacttactattttgacatgtataccatcagtgcctagtttgttgagggtttttaacatgaaaaatgttaaattttattgaaggctttttgtgcatctattgagataatcttgtgatttctgtctttaattctgtttatgtgatgaatcacatttattgattcgtgtatgttgaacaaaccttgaatccccaaaataaaccatagttgatcatagtgggttaggtttttgatatgctgctggatttggtttgctagtagtttgttgaagatttcttttttttttttgagatggagtctcactgtgtcatccaggctggagtgcagtggtgcaatcttggttcactgcaacctctgactcccaggttcaagtgattctcctgcctcagcctctcaagtagctgggattacaggtgtgtgctaccatgcccagctaattttttcctgttttgagaagagacggggtttcatcatgttggccaggctggtcttgaactcctgacctcagggaatcaacccaccttggcctcccaaagtgctgcgattacaggcatgagccaccgggcccagctgtttgttgaagatttttgcatcaattttcaaggatattggcctgaagttgcctttttctgttttatctctgttaggttttggtatcagaatgattgctgttcttacataatgagttggggaggagtttcttctttttaatcttttgaaattgttctggtagaaataatatcagcttctatttgtacatctggtagaattcagctgtgagtatgtttggtcctgagcttcatttagttggtaggctacttattactaattcagttttttgagcttatctatctatttagggctttgattttgtgtgtgtgtgtgtgtgtgtgtgtgtgtgtgtgttgagttttgggaggatgtatttgttcaataatttttttattctagttttttttttatgtgcatagcagacttcagtatatttttgtggggtcagtggtaatgtctctttttgtcatttctaattgtgtttatttgtatcttcattaatctagctcatagtttatttactttttttaaatagatttaatgcctggatttcttgatattttgtagtttttcatgtctaaatctccttcagttcagatctgattttggttatttcttgtcttttgctagcttaggggctgatttgcttttgttgctctcagtcttttatttatgatgtcaggttgttaaactgagatctttctaactttttgatctgaggatttaatgatataaatttttcttttaacactgccttagctgtattgcagagattctggtgtgttgtatttttgttcttatttgtttcaaaacacttcttggtttctgccttaatttcattatttaccaaaaaagttattcaagtgtaggccatttaatttttatttaattgtatagtttccagttgttttattggtattgaattgtgtttctcttaagctgtaaactgtgtgtgtgccttgtatcgttttgggatttttgaatttgctgagaattgttttttttctgattgtgtggtcaattttagagtatgtgccatgtggtgatgagaagaatgtatgttatggtattttttagatgaagagttctgtagatgtctattaggactatttatttggtcaggtgttgagttcaggtcctaatattgttgttgattttcttcaatgatctctccattagtgcctgtgagatgtagtccccgattattactgtcagattctaagtctcttcataggtctctaataatttgctttattcatgtgaacccatggtttttttttataacaattttctctcttctgcttttccccccataaacattcttttaagtgcacacagtgtgcaaaattcagatgtccaagagttcaagaacttgtccagagacctggcttttgtaagagaaaatataaatgagaaataagaggctttattctcatatgtgaaaataagggtggataacttgctgatttttaaaaaaaggtttagattatatgtatatatttcttctgctttttgaaatatatgtaaatcatattagaaatgaaacaaaccttttgtcattcttttgactcagaattgtctttatctgggacctgagattcattgctttccttttttcttggcaaaagattatatatatttttatctttagtctttaaagtagacacagatttgttgagagtaaaatttatttcaagagcctaataaagttaagcacaaagatcggattaatttagcaatacagaataataaagactaaaagatcctgagtaagttctttggcagaaacccgattatccaaggtgattatttgcaggctgaaatacttacactgcgaaagccagaagagttcagtgtataaactgaacagtggagtctgttgtacttgggttgcttcagtacagttagtatagttatgtgtagtgtttgtagacaacctgcattcatgtaaattaaacagtattttctagaatagtataaatttaaggccacaatatttactttgattgaattccttattttaatattgttattcatacttttgaaatatagtgtttcaactgaattatagttcagataattttaaaaaatcttacatacattatgactagtacataaaattattcatacttatatattcatatctgctatcccaaaaattttaccattaaattgttacagtagatgttagtctgacatgcttattaatttacccaataggaaaaattataggtaggcataattttagtgtcatatattttaccaaattagtatgctgctattacaggataaataaagacaggtgatatggctactcaaaaactgtaatagctctccagttaggtatgttgcaagctctaatatattctactatattaacacagtcagatttcaattttttataaaaaagtgctggtggaagttgtcagatatattccagtgtagatctcacattcaatggttaggaaataagagagcagcagagatggaagataaatcttttaaaattctgctgagagctaggcgctgtggctcatgcctgtaatctcaacactttgggaggccaaggtgggtggatcacctgaggtcaggagtttgagaccagcctggacaacatggtgaaacctcgtttctaccaaaaatacagaattagccaggtgtggtggtgtgtgtctatagtcccagctatttgggaggctgagacaggagaatcgcttgagcccaggaggcagaggttgcagtgagccaagatcatgccattgcactccagcctgggcaacaagaatgaaactccatctcaaaaaaaaaaaattgtgctgagaatataccccctttattcaataatgctcatgtttctcttgctgagagtagctatgcactttgggtgtttggagagaaattcttcttagggaaatattttctggctgacttgatcaatcttatatctaatctcagttttttcttaagacacttttaacttttttctctcaatataatctttctcagaataagagctgtttttctctctaatgcattgtgtatctgtttcagaagccctattagtattccgtggtgtctgtgaaagacgtgggctgtcacagtgagaactctcagagctatctctatctggactcatgctaaaatccagcagtatttttttcatgccgccattataaataaaaactgaggctgaaacagtgctcccttttctattattgtgaaggtgcaattctacccaggaggcctgcaggctctcctcctgctgctcaggcttcactgtctgatgtggcactggagtgctgctgtggcaaatggggttcacctaagatgtgagtttccagctgtgagccctgtgctgtgggctgtgcctcagtggcagatggtggggtcaagagagtacactagccaccaagagagggaaagcaggagtgttctagcccagtgctcagagagtagagagctattgctttaaaatgtaaatagccaaaaagatagcacccgaatcaacactttttgtagaagagtcaaagcctaccttcagcaggccctggggttcaagttgcaaaactacctctagtcatgaagatgtgaaagctttactttgtcattgattataaccagttagcatacagggatggccttcccagctaccagatgaattcaggatgaactatgtatgacatggtgctgtaaattctacttgtagatgaattatggtgactgtctttctgtctttgcaatctcttgagcaaattgactgtaatgcatgtcacattcacatgtaattgtgtaataaaacagttttctttctgttctgttattatttaattcctctggggctgaagaaaattttgcttctaactgtattttccaaaccttgtctagaattaccagacataatataaacacatagggtaccaactaagctttactatagatgggccttttccactcaggcttccagtccattcacaattgtgctgcgaagtgcatgctgtaccctaaatatgcaggtggaattgtgtctctgcctacttggtatctatcatcctctgcagtcacttttagagaggctagaacagatttctacaaactttataggtcagatattaaccgttttacctctttcaatgacttgtgtcttcagacctgaaactgattcagtgaccatggggcacagaaacccaatcagagtaaaatatgtgcattgagtagacctgtagacgtgagaatccagttctccctccctcctcatgctataatgcccacaaatattcagataccacctgctgctactttacccatgcaggacctgaatttgcagctccaaattctaaatctaggtcttgagaattgaaaagaaaaaaaaaagtttttatctgaggaatgcaagtccttttagttatcaaagtcagagagccattaaaatgagcacagttatgtttttctcccttttcttcagctatgtatttatctcttgaaactgttcactattgccacaagtagctttaaattagaccaataattccactctggacactaaattccatacccttaaccttgatgtatatgcaatcaattattaaagttatttctttacataagtaaaatttctcacaaccaatttcgtatcagctcattcactgtacctctttttttttttttttttttttttttttgcctttacaaatccacttgtaagtgctgctaatgaaagtgtagattccaggcaacttgaatattttgtctcaagttaaaatccttaagcttgacccaaataaactgtctgcttatgttcatgttgtgtcagcttttttcaggtaaaatattatttagaatgttctagagcagcctctaagaggggatctctcctttcatttcactttacttgctgtaacacccaaaaatgcagagtgaggttgatttcacctagaatttgtaaataagacctggcctctgcctggaatttacaaggcaaagccagactttggattgagaatttacagaaaaccaacaggaggcattttctgcattgtgagatatcaacatagacattttaatttccttttttgagagtgtggccttttgacctttcacatcttcattaacctgccccagttatgtgagaggctccaggagtaaatagaatctgatggcagaatctgtaagtgtaaacaatcatcttaaggccacaaagtatccagagccacaccacaactatacctacttgtaaaatgtgatactggagtagagtattcttgtccttctacttacccaacagctagcaaatcaggacaggcaacccagattctggagttcagccaaagtagttccattttttatttagaatcatcctgagtcttctctgtctgtcttatcattggaccatcagcccaggttcactgggaaccctctcacaatcacctacgaatctctgagacatttgagaatgtccagaacagatccctggtacttgagtaaaaaatcaggaggtctggaggctcaaagagataaactaattgcttcaatttcatatagtcataaaaaaaaatagaagaagcaggctgggtgcagtgtctcatacctgtaatcccagtactttgggaagccaagatggtggatcacctgaggtcaggagttcgagaccagcttggccaacatggtgaaatagggatttcaccatattgaataatattgaataatgtgttgaataaaccaacatattttagccaggtgtggtggctcatgcctgtagtcctggctacttgggaggctgaggcaggagaatctctttaacctgttaggtggagactacagtgagccgagatcacaccattgcactccagcctccgcaacaaagtgagactcagtctcaaaaaaaaaaaaaaaaaaaaattgatgaagcagtcatgattcctaccatcctggaagttttagtctaaactaacaactggaaaaatggttgaattatgcatcatatggtgggtacaataaatagatgtgcaaaaaacaacttgggctttatttgagccactttctttatattgtggtttctgatgtctacacctgaacttataattggaagagttgttattattatttgtagttcttttaccctgctaagaatacttatttttcttctaaaaaaattattatagaaaaccttaagggatttttttttaaatttcttattagtatgtaatataaaatttacagggcagtggctaaaaaagattaaaattatacaaactcagatttaagtttacttaagtaagatttaaaaaaaaagaacttacaataccccccagtgccatagagaacagaattgtacattggctctacactctgccccagccctgttcatattcaccctttttggaggccttatttatgtctggccctaccctggagtcttgcctcaaagaactgattagaagagatcagagttttgggtcatgaatactgttgcctttttagagctggtgttcaacattttctgagacttaaaagcagataaatgggaaatataaagtatgtattatagaatcttactttacaaatttttaattaaaaccagtgcttgcagagacattatttagcaacttgttttctgttcctgcagctgatttctgttttctgttctgttttctattctttgcagttgattcacaagtcacaagaaagtaaatataaacacaataaaaatttatctaaattttattaagctctttccatctgtatccctttcatctgtctatagttagcttttattctatgcattttttgaaaaatcaatgacagataaacaaatagaaataaaaatgctgggtcctttaaagccttggaattattgaacacttagtatcaactgaaagggtgttattaggattaaatcacataatgtgctatcacagtactctaacatcctattgagcacatagtacctgcttaataaacattgcattagtacatgtgcacacgttgttttccaaatgctgacttactcagaaattgctgctttctgttttctctgtaaattttaaagagtcagcaaataatataatactttaggatgaagaatgattgttttcatttgtaccagaagtatctgtgttctgcctcatttctctaattaatgctaataataagcccagtgggagcaacatcattattgacagcgcacttgtttaagtgacccatttatggaccctttccatacctgcagaattacatttcatagagtggggccaaaattaccaagtcatttataagctccttagagcttgagaggaaatgcttagttaaggggttatcagcccaggcttctaattagtatcacctggccattttgcagaactctctttacttgtgccctttccatggattctgtttattgttcttggtggaagcattcatgttgttttaattaagtggctcatgtgactctaaggtgaggccagaatcaagtatgaggaattcataatacattcatgagagttaagttccatctttgcattaaagggtggtccaagaacctgttctgtttggatttggtagggacagtacaccgtggcccatatttacattactgtggcagaaattgctggtgcctgtgtcaggggatggctcctgaggacaaaataaagaaaagcatatttttatctctgtggagctactcattgtttcttcatctcttctgctataaaggacagaaatggatggagtttttctgtcttggttcttctgcctgtggatgtggtgacagcaggtagacctgtggtgctgacacttttaaaggcatattctcaagatgcaggtgtaatttgtctagaaaattttatctgagaaagaatcctagggaaggaggagaaagagaaaaaaatggccttttctttttcacctaaacatgtctgagatcaagatctgtgtccactattcttcctccaggaaacatacgtttagtacttgcaaacctgtacttctgtgtacctgtgtttttcctccctaatgagtttgtcttaactgctttaaaaaattcttacaataatcaaagtctctgaaaaatatatttttttctatataccagagctttctctatattatggcttcttatatgccatgcagaaatctcactatgaatttataatctgcaatattaaaaatgtccctttgtggctgttgaacatgggaaagtgtagatactcaaaattcatattggggaaaacctggggtttttagtgaagacagagaacatgtaatgttgtggtttcatctgtgttctttattatgtctatgcagtacaagattaagaaaacactcattgaagcagtgtggtatttattacccagaaaattctaaaaaaaattgttaggagatacctgctctctcagtgctgaagaaatactatttaaaatcactactaaaagttacagaacatgggagatatctctatcttgaactttccataaaactaatgtttccttatggttaaattcagactataatttacctttcagagggggggcaatatctcagcagtaatactgtgtccttctgggtacatcaggacattaaaaaaatgtgttctagtgtaattgatgttaataaatcacttggttgataagctctctgacacatttttttactatggaattaatcattttcctcttcatcattaaatatctttatgcagctgatgtgaataaaccaaaacatttaatctgacagctgcccttctttcttaggtttcctttgcatttgtctgtttttggaaaatgaaggctcttatctttgtttacaaaccagaaaaacagaaaaacacaggctcattctattactggatgttttaaaaaatagtctttttgggccaaaaacattggcatactgatgagcttattagaaattcagcaactcagactttatcccagatctgaaaaaaaaaaaattgcattaacaggatctctagcttattgcacacattaaaatttgagtcataccttctaactcaacatgtctattccatctgaataatatgcaaaactatgtcttttccatctgaaaaatacacacgatgaatttttttttttttttttgagatggagtttcactcttgttgcccaagctagagtgcaatgaatcttggctcactgcagcctccgcctcctgggttcaagcaattctcctgcctcagcctcccgagtagctaggattacagccatgtgccaccatgcatggctaattttgtgtttttagtagagacggggtttcaccatgttggtcaggctggtctcgaactcccaacctcaggtgatctgcccacctcagcctcccaaagtgctgggattacaggcatgagccaccatgcctggcacacaattctgtatgatgtaaatatagcactcaaaattgtacatgttagtgtttttgccctcaattttatactttattatctagaaaaatattacatatacacagatgttatggatcttataccactttcttttctcagagttagagaatacattagtgaacatttctgtgttgaaaactattttattgaataatttcagtcattcatataagtcagaaccagctctctctactctctccattttaccttgagtcacattaaaagttctgcccatgaccaattggtaaatatatgtgtttgtgtgtgttttccagggagcattgacatttagggatgtggccatagaattctctctggaggagtggcaatgcctggattctacacagcagaatttatataggaatgtgatgttagagaactacagaaacctggtcttcctgggtattgctgcctttaagccagacctgatcatttttctggaggaaggaaaagagtcctggaatatgaagagacatgagatggtggaagaatccccagttatatgttctcattttgctcaagatctttggccagagcagggcatagaagattctttccaaaaagtgatattgagaagggatggtgggatccagtggaccagaatcgtcagcaccttaccatgttcactgctgtcctttcgttctgtcactaagattagtttccgagactcatcaactctttctatcatgatgtgaactgttttgcactgcgttagcgtctgcctttggtttctgctaattttctttgactttcatttttcttgtccttctctggtgtttgctttgctgctccactttgaggagtttgggcagcttcaccctcagccgctccagcagttcctccatttggctgaagctctccgttcttctgttcttggcgtctgacatttgtcagcaaggcctggtttacagggaccacggctaccgcctcctctgcggggcacctccttcacttccggagggcgccagttccagtcgtgacccagctgagcacagcaggaaccgccgcagcagccggagcgcccacgcccacggtcgcccagcccggggatgcctcggctcaaagccggggtcgcggctcagcttagtgcgcagaaatccgaggtcaaccagagcatttcccacagctggccgagccctcctcgacctgcggggccagtttctcccactggctttctgctgccacctccccttccatcagagggacgctcaggattgtgcaggggcccgtagacaccgtgaggagtccagggaagtgaggaggggctgggccgggcaggctcaagcccagcgcacggccgcacccctcacgcctgagcagagatcagccactgccaccgcggggaggacagagggacccaggatcccccagccagcctccctctgcgtcaggagaggagggaactatttccaaaatatatatagagagagagagtagaactggcatatctgacccaatcgagttttcagtttttcttttctttttcgccttttcctctcaaattatgctcgcctaaagtgagagttcatttttcattctcacgtggcaatttaattttttaatggtcacaaacttagagactaaaatttttactctattttacctaagaatgatgaggtaacatcaaacttttaatagtgctttctgaattttacagtttattaccttagatttgattctatcaactaaacaataataactaaaaaagtcttggtttgcatagcttgaccatttacaaaggggatgtatttattcatttaaatgataaatgtgtgttgagcacacacgttgtgccatacttcttgctagctttaggagataaaatggagaaaaaaaatattgctctttactcttataaaactttcagtcttgctacataaaattggccaggttgttctcgaactccccacctcgtgatctgccacctcagcctcccaaagtggtgggattacaggtatgagccaccccaccgagcctctcctagaagttttaaatcctcgatatacatgaacaatttttgtgttagttgctttgcaaggatccaatctacctaggtagaaccaatagtttagctattagtttattgactagttctgcttttccagtataattgtgtaactgatttctcattttaacctgttggctgaaaccatggatgcaatgtttaataaaaatcttgaacaccaacataattattatgtttatgacattaaaagacaaactttcagt

SEQ ID NO: 2400 - DNA, 855 bp, Homo sapiens
cagtgttcggtgctcattcagccgtggggagcggacaggacggaaaaattcctttcattcccaggctgcccagaagtagctgcaagcacttttaaggaaatctgaaaaagagaagacaaacaaagaaactgagacagaaagtggaaatgaaaactccggctacaattcagatgaacaaaagaccacagacaccgcttctctccctcccaaatcctgtgaatccagtgatcctgaacaaagaaacagtagctgtggccctcctcaccagcgacaaggtgctggggcaaccaatggaaaagacaagacatctggtgaaaatgtcagagtgtgaagaagggcaaactgtggcttttctgtggtttgctgttggggcagctagctgctgattcctgggaaggaatttcaattctttccatgtgctcagagagaagaaggcatttgatggacagaagaaagttcaagaagaatttgacattgacatggatgcaccagagacagaacgtgcagcggtggccattcagtctcagttcagaaaattccagaagaagaaggctgggtctcagtcctagtgggagaaccccctcctagtccacctgaaaacaccaaattcaaccatcatctgtcaagaaattaaaagaacaacaccctagagagaagtcatccacacacaatccacacacgcatagcaaacctccaatgcatgtacagaaacctgtgatatttatacccttgtaggaaggtatagacaatggaattgtgagtagcttaatctctatgtttctctccattttcattcctcctgcaactattttccttgatgttgtaataaaatgaagttacgatgagtgaattcaa

SEQ ID NO: 2401 - DNA, 1837 bp, Homo sapiens
tttagacatgtaaatttcccatatatcatcatgtattcacccattaaatttagtattcattaatgatttttgcctaaaaatatattactttagaattttccaagtagtgttttcctattttcctcaattcttttatatttattgtttggaattctccaatgaagaagagctttccctatcttccatatatttgtttattcaatttttcatgtatcatagaatagactcaaggattgtaatattttctagggctatatcccatcattatcatcatcaacatcatcatcatttggctcaacttgtacctcactgactattggaaaccctctcaagttaccgtttgtgcacttctgaattatcctcatcaggttttgagcattgcattcttttctggaactgcaatatgtttgagctctttgactcttttccagttatggatctctgtctttccctaaatctctctccataatgtataaccatatcttcttcagggcttagcttgccttacatgctttctctttaattgaattagttccttaatgacttttctgtccatgtgtatgaatagacatatatgtgttagtatgtgtgtatgtttcattctgattatcacttcccattcaacagatagtaagtaatattgtagtgtttatcatagtgcatatttacgggggaaaagatatcaacatgttattaaaatgaaaacagtaaagggttaaattaagggaagattttatatgtaaacaagtttcatgacagattgatctcattagtgggccaaattcttcaccttttgctgtaattgtgttctttgccatatgactttgaaaacagtttactgtcagacatgtggataatctgaaccccagtggaggcatcatctggatgaccatccggatgcttgaggaataaatgcttaattttgttatgctactaatttcttgtagttatttgttatgcaccagtaatgttgtgaaagtttattgatataaaaccatgtggaatgacatgcagagttggaccaaaaacaaaagctttatagttgtgaaacattgttcttgttgtgactacaagagagatgagccaaaagaatatggtgggtgtttcactaagtagagtgaagtttaagtaatgactgaactgcatatgcactctgcccagaagtgttagcataagatcagcacctgattactcagacatttctttaggaagcaaagagccacatggaaaagaaatcaatagtaagtggaggaggagcagcaagcaaattcaagagccccacattgaaagaaggtacttccatcaaatcataaggaaggtgcatatcaaaatcatcggcaattgatgacagaccacagaaaactgagccaatgagagagttcccaggaaaacactggagctgtgtttgttgacgggaagagatggaagttggtaatgcagaaagatgctacccagcatctaatcttactgggtaacaagtgcattgggatggaatagcagtaacatagcaaggtaatctcaaaactatagatgcatgtagtagaagaatgaaagctctagttctgcagttttcactggaatatggattatggcactagcactgtctagttgtttgttatcagaaagatatgaatgattcaaacattaagttcatgtcacctgtacactacagataccaaaaatgttaatcatgatacctagttccatgaggtcacacaatggcaagtatgataaagcccttagcataatgtctgggacatactgaaaccttgctaaacatgaactattcttaatgttattataattactattaatgacgtcaaaatgactatttctt

SEQ ID NO: 2402 - DNA, 3524 bp, Homo sapiens
gggagactgacaacggggcatgggaacgcagggctcatgccacaactgtcctagaaatagaaaattcttccaaagtaaaaagtttacatttaaaatatagggaaaagacttgaatagacatttcaccaaagacgacatgtcaatggcaaataaacacatccaaaggagctcaacctccatgaagaggggaaaagcgcatcgaagcccactgcacacctgctggaataaccctgatcaaaacccagaggatggcaggagccggtgaaaggtcggcttactcaggacccggcagtgccaccccaaggaatctatgtgagtgaagtgaaacctactggacactcatcgctgcattatcccaaacagcccgacctgcaaacagccacggtgtccctgctgaccccctgcccccagtacagcctcctcctggacttgggtaagtcaatcccccaacaggtgcaccctcccctccatttccactcagcccttatcccccagggacccactccacacctgggggccctgtgtggtgacctcctgccaggccagcctgccccagagggaggaacacagaatccatttggaaccgaaagggactcagctcagccgggaaaagtaggctctttatttccagcctcactgaccacgtgctgctctgtgtccgtggtggaccagccctgggcatgagatgagcagagctggcccccggacccctcctcaccacgtctgaacggacagcacttctgtgtccaggggtgtgcgtcgggctcccgggcagacaatccctgggctttcgcgactggcaccgaagtgaggctgggcaagaaggcactgggccagattcctccctggggcacttaaacggggccacagggaaagaatcgatgtggtgacgggtggaggcggggctccatggcagccacggtcaggagcaagccctcggcagcaaggtataaataagccaaagtgacaggggcagatgagtgacacggacagaccacacgcagagagtgagggcgccgatggagggtgccgccagccagtgtgagccgcagggagaaggcagatagagtgagctccagagtcgtgacccacggacacccaggtcctcttgccgggcacccggagcgcctggaatccagttcccgaggacttggcgggggctgctgctccagggcccccctggttatggctgggatgagtttgcagaggatgcccccgccaccaagctcacacctataaacactgatcatacaaagtgtgtcattcttgtcacaccaactaaaactgccttcggaaggcaggggaaaagtactcagggcacgacactgctccaaggatggaactctctgcaagtccagctgctgaaactgccttttgtcacctgggaccagttttatccacagctgctgaggtcacttgctccaactccagaaggaattctgctcacagctgtcacaccgaccagcacgtcccaggtcctcagaactttcccagcgccagtgaactttctcaaagagcaataggtaaccttctcctttcttgtaaaaccaccaaccttctactgcttctccaacctccaccatttacctggtcggcacgtatgccccaagatgcaatcctttcttcccaaataaaacgttaaacttggaaattcgcctctacatttttattttgacttgaacataccccagcaaccgtgagaccccgaggacacgagtgaccttccctgctcctggttccttcgtgtgcacgacaggccgtactgtctcctggagcctggggcctgacacctggaagctcagccggagcggccccagcaacctccctgtagctccagcagtgccatccctgtggtcagcgtggacctggcctcccagtggccccaagtccccccatagctccagtggtgctgtccctgcagcgtgaacccggcctcccagtggccctgcattccatggagggctgggccccctgccctcctgagcctcacagtggccagccagcctcacacgctgctgaccctcagtagtggccaaccccgtgtctgtcggagggcacaggccaccatccccacggaactcaggcctgctgcctgggcaggggccctccaggaagcctggcacttaggggtggcagctcaagcttgttgggggtggggagctggccgggcactcagggcccgtcatgtgcaaatttgggccaatcccaccccctctgggcctctgtccccatttaccagagaaagatggtctccgctgagccaaccaccttcatctaaaccaaaggacagaaaccacctctgctgagcctggaggcagccaagggagtggagaagccagcggggatcccctggttgggccacacacaccccagtgaggctgcgagagagacgcgccgcctcccgaggtgcagagtttcgcagggcacaacccactcccgtctgctcctgcagcaccctgtgacccaggacgggcgggtttcctgtgccccacttcacagacgggaacattgaggctgaggggagctgagtgaggtgtttgcggtccccagccacacggtgtggctctggctttgctcagatgccacacgctgcacgcactcctttactggacgcacccggccccgccggatactgccgtgccccctcccaggacagcagcaggagcacccagccctcctggatgtccccctgcccctctgtgccgcagccctcatgactcactgggaggccaaaaggaagccccaagtgattttctagcagcacctcccgcagccctcggggtgaggctgggctgttctgcctgcgagtggtgctaggggaacctcctgaggggtcccaggaaggcccctggcctcctgcctccacacccctgatttcttggatccctttcttggtcagtgagagccgaccgggtgaagtcacccctggaggaggagggagctgaagcagccggtgactcactcacacgagacagtgggcggcggccagggcagagcgggactccccattgctggctaaaatccagacagcgccttggcctgaggtgtccctgacaggatgagggcggagtggcagctgccgaaacctgaactcctctgccctgcccccgtcccttgaacccacgcatctagtaggtcagcgccagaggaaatcctcgaagaaaatgggcgtctcccttgctgagcacagaaccgcagtcagccctgtgtgcccgctccctggatgaggacaggaaggacatgggggagaggccacggtcaccctcaggagcccccagacccactggaaagcagcgcagtgagcatctgagcagtaccgcctgtgcctggcgcgagggtgcgaggcggggggccgtgtggccaggcagcctagggttgcgccaaagcccagcaggtgtgggacgagcaggactggactgggaggggctcgggggagcggggacctgtgctgagcttgaggtgtggctgggctgggaggccggacaaaggtgtgtctcctctggccatgcaggggtcaggcggtg

SEQ ID NO: 2403 - DNA, 3492 bp, Homo sapiens
gcctggggactgcaggcacagtgaggaaggtagggaagggtctctccaagacaggcccaccaggagcccccactgggaataatgcagcccctctcaggggatggagtgtctggaattccatggctgaggtgcaacaggtcccacagcctctccagcctctgtgggaagaaggatcatctgatgcctatgtaatagagttgctgaaggagtggaagcagctttgacattatcagtggaacccaccagtgcagactgcttcaccaagggcacctgaggcagcagatctgaggattagggacgtagggagctgaagcctggctggagaggtggtgcgcacaagaacccccacattccccgacaggagcctgaaaaagcaagacgccatgttgggaggacacggaagcagttctagggagaggagcacatggcaagaagccaaggcctcctgcccacagccgtttcttttgcagataccctgtgattgccagcaagtaaaccagatgcaattgtggtttccgtgaagcacagctggaaaactgctgcccccacggaggaagaggaagatgggaagatggtggttactgcacaccaggcaccagcctcggggctatgagctgtacaaacattacccattttatcctcgtgaccatgttctgagaaggctgtcaatgatctcactttatacatggggaaattcatgcagacagaggctgactaaattgccatggtcactcagctagtaggaactggagctgtaacttgaacccgggtcttttgtttctgtggctcctggtagcacatgccgggcttgaagtgagatccggaggatgttggaaacaacgtgttccccatcatgaaagtccttatgataccttatgatgcagagttggcagccaggagcaggggcttccagaagcatggctgacccttgttgggatctcgctcctgtgagccttggaacgtctagggagaaagagcagccaaatttagagctgcaggagctttgagatgcagctcaggcatcatctctgggaagtctttcctggaaccacagcctgggccctgtacctgattcccagcccctgtggctctttttgcatttgctgcctcttttcacaattctgtctccttatgtcttccactctacacgcaagccccttgagggcaggaccatgactcagtcatcctgtaccctagcacccaccctgggtctgcatctggaaggagctcactaagtgattattgagccaaactgaactgtagcaggagtgagcaaagctaattcatgggtgcagaatgggagcacagagctgccagaatccagagacaactgtaactgtcccggcacagggggcttcaggccgcggtgagagccactgaaagcaagagagccaggtggtggctcagttcacactgagtcctgctgaagaaataggcacatcgtgtgtgttaaaatcagcaccccatgcacctgtaggaagagactgaggcaccctggaggcccctcccaataattaaaaggccctctggggcctgtgggagccctagctgatgaaatcacaaaggcctcagcctctaaagtgtttccagtaaaatgctaccaggattttcctcccttaaatctggatgaaagggctgtctgtgctacaaagtgcacacctggcgttgatacgcagtctcttgctgcctgttaactaacccaccagccgacaagttctgcccactggcaggagcaaggacttataaaaaatagtgcctccctcccaagggcttatgagctggttaagtgcagaggacaaatagaatgaaagaaaaggcaatctcggcatagtatttagttaattcttctctctctcttgttccctctctctcctttctctcttcctccctcctttctatgacttgtcctctccacacaactccttttccgttttccctcccctgcctccccaccttctttcttgacttcccatcttgctccctttcttcctgcctgcccatctgctttcctttcttatctctggtgcaaattctgcatatagtcgctctcctcatttcatgacaggctgtcttcatcagtttctgagttcttttgttattttataaaatattttacatgctgtcctcaaaaaatcccctcccccagaaaaggcccattcaaaagtacttactatacgtccttagataggcaatgatctctgaaatatatataggcttgctctatatgtgtttttgtaagtgtacttttctttcattaaatatgcagatcttaattgtacagtttgaggtgttttgacaaaggtatataccagtaaaaccaccaccccaaccaaggtaccgaacactttcatctctctggaaagtccccttgtgccaccttccagtcaactctcaccctccagaggcacccactgttcagatttctacatgcattttgcctgttgctgaactggaacctcacagccttttacgtctggcttctttcacttaacataatgtttttaagtcatccatgtagttcattcttttttttgttgcagagcaatattccattgtgtgaatggatgtactttatccatcaacagttgatgaagttgggttggtggcactttttggctatcgtgggtaatgctgctctggatgtttctgcacaagtctttattgtggacatgggtttccatttcttctgggcaaatgcccaggaacagaattgctgattcattaggaagttatatgtttaacttcataagaaactggaaaaccgcactccacagtgttcatgctattgcacattgcccccagtgccatgtgaatgtttcattcttggggtctagaatatcttactgcagttttaattggaagttctctgatgacttttgatagagtatcttttcatgtgcttattggttatttatttcttctttaaagaagagtctagatccttttcccatttaaaattgcattgcttctatttttactgttgattcttagaagttctttacatattttagatttatatacagtaaatattttctcccagtccatggcttgcctttaccttttcttaatggtgtcttttgattaaccagacattttaaattttcatgaagcctattgtatcgggggttgtttttgtttgttcatttatggttagtactctttttggtgctagccaggaaaactttgcctacattctcctaagctcatgaatatatttttctatatttgtttctaggacatttataattcaaacttttatgttctagcctatcactcatgtatagttatgtatagtataaataaggattgaagttcatttttctttccatatacttatccagttattccagcaccatttgttgaaaacactttctttccctcattgaatttccttgaagcttgtgctcataacttatataacgagtattgcgttacaatttccattatatttcttaatttttcacttaacacaatgtttatatgatctatccg

SEQ ID NO: 2404 - DNA, 2487 bp, Homo sapiens
ggaatctcctggtctgcgggttgggaagaccatgggaaaagtgcagtgtctgggccagagtgcatggtacagtccctaacgacttcccttggctaggagagggaattccacgacccctagcacttcctgggtgaggcaacgtcccaccctgcttcagctcaccctctgtgtgctgcacccactctccaatcagtcctgatgagatgaactgggtacctcatttggaaatgcagaaatcactgccttctgcgttgagcttgctgggagatgcagaccagagctgttcttatttggccatcttgccagcacccctcccccccccacctaattcttaattttcttgtaaggagtcctaaattcaattttgacgttttacttattttcaacttctattgtagaacaattgaaacatatacaaaaatagagagagtaatataatcaacacgtattcatcacaagccttgaaaattaacatcccatggtcagtcttgttccatcttgcctttcattcccttcctgtcccagctctgaattattttgaagcaaattccagtaatcacattatttcatcctttacttcttttaaaaatatgacagaagtttttgacaaaagaatcttgatgtggggaaatttaatgataacacttttaacatgacagtttttaaaaattatgacatttgatttatattttattcaattttatggaaaataattatgcaaagtatctttttattataagaatcaatcctgcatgtagaagtcccgactaatatcaaagaacacagtaatcagtcttgtccatcttgttcaaacattgagagctagctaacaggaataagatatataaggaatacaaatgttgaccaggtgtcttagctaaagaacattttctactctgcttatctaactcatgtatttatattttcccaatccaatttcttagcaacacatttgcagaatttatttgactccagaatggctactggattattgagatttcctgaagtgaatagttttgtagagctttggataaaattagaacaatagagtcatatgaaagggggaagaatatgttgttggcaaaattcacatttcttctcatctactctctcctgatatcagacttcctcttcctgtgatgaaactgaggttcgttttgacactcctaagaaattaagaatggagggcaggtgaggaaagtaaaatagagacagcttaaaagacattgaaagagactgtaatgcaactcattcaatgtctttatctctgtagtttatgatgtctctcattgtccgctagaagggatttgtgctctcctcctggttgctgtgatgagacagatgtggaacatttcattttcctggactgtgtagacttcagctgtcatctctactgaggaggtaggacccaaggtgctaggttcccacctcagcagaacctccacccacctttcagccctgaagccatcatgtgactcgtactaggaaagtccacctgtgatgatgatgaccagtgagggctaaacaccaggggtctcccaaatgttctcagccatatacgaatttcaggctctacactggacctggatgatgaggggtgatggagccccaataataaccacagttgatttttccacaccccgttgatcagattaaatataatttagaaaaataaccaatgtggcatttttttaaacctgagatgtaaaataaaatccatgacagctgtactgtatactttgcctaatttactttctcagaggtttggaaggaatgctcagaaatatttagaggagtttctttcagtgagattacttatatttatgatattgaagatgtcttttttcaaagtgttacgtactaaatttcatctcccacagcccccttcccaaattcatgtattgaagcccccatccccattgtgactgtatttggagacagggccttcaaagagggaatttaggttacagaaggccctaagggtagagccccaattcagtatgaactgtcattgtaagaggaggaagaaacaccagagattcacttgcccagagaaaaggccatgtgaggacagagtgagaagctggtcatttgcaaggagagaagcgttaggagaaaccaaacctgctgacaccttgatcttggacttctagcccctagaaccgtgagaaaatacatttctgtggattaagccacccagtctgtggtactttattatggcaaccctagcagactaagacacagtatttaacactttcatgtataggtctttattctctgaaaatctataatattttactctagtaaaaattctcttgctgtgtggaatttatgggcactctactagctaaaatcattcactttctgaaaagagtgttgcaaagggctacagaacatactggataccattgaccaaactaattagaaaactaatgctgctcagtgactaaaaataacaggggagtgggtgcatatgcaggatggggc

SEQ ID NO: 2405 - DNA, 3219 bp, Homo sapiens
gacttacatcactcactccccctccacccagagagcaggacggaggtgtgaacttgagccagaccagaaggagctcgagagcggccgcaggacaagcccgaggagcaggcgggcgctccaggggaaaaccacgcacaaaaccttcttcagagaaaagggaagctccaaacctgactgagacaaacggaggctcttgaaataaaaagaaaataccgcaggacaaacagcctcccgtccccgggcgcaggtcgcggtcacagtggtgacctgggattgctttcccaggactgcgagtcgggtttgggtttctcctccctgcattccacagctgctctggtcatcgcaacgtgtttattgatcactgaagaatctcaagttttgagacgaggaagaaacacccattaggtctccaagacagctgtgtttcacaaactttaaggagacagaaattttctcccctggaacctgtgaaaatgtcccttttccaaggaagtgaaggttaagaggtcccgttctcacagaccctcaggaatttcacttggctccgagctttgacctccgagagagccatggaaaagctgctgcggctgtgctgctggtactcctggctgctgctattttattacaactttcaggtgcgtggcgtctactccagatcgcaggaccatccagaataatggtgaaggtggacacatttgctgaatatttaggtgccctccatgaacaacacatcctgctgcctgccttccttcccttcctcctcactgttcccctcctccccttctccccttctcctgccttctctctcactttgtttcctgtctcattttcttttttccatttccctccctcatttccttccctccctcccccctccctccatcctatccaatcctttcttttttttttgagacagactctttctctgtcgcccaggctggagtgcaatggcgtgatctcagctccctgcaacctctgccccctgggttctagtgactctcctgcctcagtcacccgagcagctgggactacaggcgcccgtgaccaaggctggctaatttttgtatttttagtagagacggggtttcaccatgttgaccaggctggtctcaaactcctgacctcaggtgatccgcctgcctcggcctcccaaagtgctgggattacaggtgtgagccaccgcacccagccccagtccttcctttttgtcttctcttccgacatctcaggctctgctcacctcgtttcctgctgaaaagccgcatccctggctgtctgtgtgaagcagaatctaggggcctccttcatgctccagcttccatccttgaggctcgcctgcccccgggcagctctggcagaggaagcctggccctggcgcgtctcctcaggagcgctcatgacgggcacgggcgtcacaaacacaccaacagaaacaacctgtttccatcgcaagagaacagctccttaacacgtagcatttcattctaaagagtgctaaacagctatgaaaagcggccagtttgtctgcacgttgggcctttcaatgattttacatcatccttgcgagagccctgcggtggtgtcacgccctcgcaccgcgggtggagaagcgtgtctttcagacagaccaagcgatttgctcaaggtcacagggctcagaggacacaatattaagcccaagaagctcacagcgtgaggggaattaggggagacagacacagacagagattcttggaaaacagcagccgagtggtcagtaccgggacataggttcgctcaggtgctgggggagccttaaggaggagtctccagtatagagcgagagcctgatcttccaaacgccagcctactttccaccacggccacaccaaactgtagtattttgttaaaggttctcagaactattaagcatttcttgttttctgattctggcactcagcactgtgccttatgcataggagacacgcaataaatatttgttgggctggcgcagtggctcattcctggaatcccagcactttgggagcctgagccaggaggatcacttgagcccaggaattcaagaccagcctgggcaacatagtgagaccccacctttataaaaaataaacattcagctgagcatggtggtgcatgcctctagtcccagctacttgggaggctgaggtgggaggatcacttgagtccagaagtttaaggctgcagtgaaccgtgatcacaccactgcactccagccttggtgacagagtgagaccctgtctcaaaaaatatctatatatttattgacttgtctgtgcacagtcactgaagatttgctagtcatctggtaaaccgcgtcaataaagctagccaaccagcatgcattcggctcacaggtggctgttttggcttgtattacctggtttgcctgtctacactggcagaggtagccagatatttgccagatctttaccatgtagagaggtgtttcattttgtaagtaattgccaaacaacttgaaatcattttaagcctttgcatactctgtgcttatctgtgaccatagatggtcattctggaggcattatagaatgtcgtagttgagggaccgtggggactattgagccacttctcactttacagggaagccaggaggtaggtttggagagggaaatccagggtcggcagagtccgggcccctccccacatctggaagcttttccagggcctcaggcggcccaatttcttgcctctgctccccaggggacagccttatgaagctgtgatggttgattaatctgaatccataaatggcactggccaataaattgcaggccattcttaaaaagtttataagcatgccattttatacatgacatttgtaatgaggaaaagagaacttaaaacaaacccaaagcatgtcattacccagcagtttcctggtcctggggcacatggcacagctggctccagccgtttccagaagtttggggcggctcacttcacccgctctatttaggggtctgggaggccaagcagataattacagtaattatcattccttagatctccatcatgccttagagtttctaaagaactgtcagaactgctaggccatggcagaaactggattcttcatcttcatagtatttataatagaattttaaaaaaacaatgtttatatccgattgaagaaatggaaatttggcaaatagagattttctaaatactagaattata

SEQ ID NO: 2406 - DNA, 4854 bp, Homo sapiens
caagatcagcttgggcaacatggcaaaacctcatctgcactaaaactaaactaaactaactaaataaataaattggactaaattttaaaaaataaataaaaatttaaaaaatcaatctgtataatttcctaaatcaacagactaaataagaaaaatcatacaatcacatcaattgatactggaaaaatacatgacgaaattcttaaactattcatagttttagaaaatttaataaactattaatatagtgtatttttttcagtgtgataaagaacatcttcaaaaagtttatggttaacaaagtacttgatggtaagaaactggatatttttcccttaaggtccagaaaaagagaaggatattatcttttatcactcttattcagtatcgtcttagcagtgccacatattgcaataagacaataaaatgaaattaaagttgtatacattaaaaaaaataaaatgcctttgtttacagatgacattattgtacacgtagaaacttttttaaatcgacaacacgaaaatctcccaggacaaataaaagactataacaaggtcacaggaatacaaagttaacatacaaaagtcaatctacaaaactgtattatactcaggtgacggataccctaaatgctctgactttgatgactatgtaatatatatatatataaagtattatgtattaaatacctttatacaaataaaggaaagaaaaataaataagaactgatggatagatagattagaaagaaagctagattgataggtgtgtgtgtgtgcgtgtgtgtttgtgttagtatatacccactctgtataccgtttgccttcagcaagcacctcagtgggttgtgttttttattcgtggtggagcgacccaaacattcattcctgaagggtctaggtcatttgtagtcctgcctggatttggctgttgtagtttcccattgacctgaatcacagggcatggtaatactaaaagatgccctaaaggatttcctgtattctacacatactcttccttacttccattgcggagtagtagactgatttcattttgatagtctgggtcagtcactccaaccaacactgtaactcctttcttagcctgttgacttagaggtaggaggagcccaaagtaactaggtgacaagcttaacttcaagttcaatggaatcattgtgtctcctgatggcagcattcccccttctggtactaagatgtctaggctagcagaacataatgtggtgggaacaggaagcaaaaattttgttaatgggtcattaggggtgatggtgagtggtgccacttccacttccaccccttcattaatgtacccatgaatcctgactatgggagaaacagtaccatatattggacacagattcaggacatacacagccttctggagaactttgccacagcactgcaaagtattgtcatctagttagcattgtaattgtgatttcaaaaggccattccattgttctatcattccagctgcttcaggatgatggagaacacagaaagaccagtgaattccgtgagcatgagtgcactgtcacacttctttagctgtagactgagtgcctttgtcagaggcaatgatcactgtgagcattggtgccatatcaaaggctcagtgttggtctctgctgccagtaaagagggcactcagtggtggctgtagccagatcaaccttgcaaggaatgtggatggagaagggaatattggacaaggtcaggaccgccacttctagagaaatgtgataccgggacaagatatgactaaaaatgtctgcagagcagcagagagtgcctacctcaagtagaagtatgatagttgaactttattgtgctctagaaaaagcaataaacccttctgcaaacttcataagatagcacagtaaaaggaactctacaccaagaggacattttcccttcaaaataacaaagcagaacacaaagtaaatcaaagcatataaacggagaaaggaattccgttgcctttgaaattgaactccagaaataatttacttaaaaagagttcctcagatatagcttgaagtctaaagacaatcattgatcatcaactggtattctcttactccatcagcactccagatacaaagcaagagaaaacccagagtaaaaaatttaaatggacaatatttcatctgcaacctggaaagtcttctatgcttgctgttgtattgactttcctacttatctcagaaaattgtgcatttaatcatctctctctattttctttgactcttttccagtgagagagtataagattgtttacctaaagacctcgaagtctagcaagataggaagcaagttgttacttaagcaggttgggggggcattatgggcacaatgaaaattaatcattggttctctttgcctatcaaaatacatcgttcacataggacccctttccccaataaatttagatcatgcctactctagaaaaggaatcacagcattgtcacttcttgatgttgtgaagtaatttgtaatgcgcagaaatgatttgaatacatgtcccaacagagctttgtgaaggaaactcaaagctattctgacataatagcaaatgatagcagagaagggactgaagcactgcagcaaacccaaaattgttccaatattcagctgctagaacaaaaaagaaaagcctcactactgaacctttttcatttcgtatagctgctcaaaatttagaaaactcatagaccataatccattaaaacagcatctattacatcaagttctaattgctaaacttgctggtaaatccttggggtaaagagattggaactcttccattttcaataaagattatttgtaaaactaaaaaaaaatccatgagacaatctgatagatgtctcattattcctgatctgtgttcttttttatttcttagccctacctctacaaccgattaaaatgcttagcctaaatactttcaccatttcaaagaaaccactacaaaaagtgctattttttggccgggcgtggtggctcacgcctgtaatcccagcactttgggaggccaggcgggcggatcacgagatcaggagatcgagaccatcctagctaacacggtgaaaccctgtttctactaaaaaaatacaaaaacataattagccgggcgtggtggcaggtgcctgtagtcccagctactcgggaggctgaggcaggagaatggcgtgaacccggaaggcggagcctgcagtgagccgagcacgccactgcactccagcctgggcgacagagcgagactgtctcaaaaaaaaaaaaaaaaaaaaaaatgctgtttttttcctggattttatgaggataaaatttagataatcttttaaaaatatgtacaatataccaaactatttaaatagacattagcattttctgttaaagtactgacatagtatttgcaactattttttaaatcatttttctactcttgatcgtttatagtcagaatttcagtcaagtttagcactatccaaaaaaatcagacaggatgtgttgcttcacaaataagaagctacatgtaagtcctgaagcacaaggtttaaggaaaggatttcagcaatgacttattcagcagatactcatcatatttcctcttgtgagttctgttatatagtccatattcctatgcttagagcagggattattctgcctcattggccttaaactacatcagccctataacctctacttccccacaggtttcagtgatctcccaattctgtcgcagaaagcttttccaacaaagtacacatttatattacaaccacaccccatatgtcctccatgaactcttattaattctccaatacacatgccattttattgctctgtgaagtcttccatgttttttccacgcatgctttctctgctggcctctgtgtatacctctattatatcatatagttctgtgcttatcacgaatttttgataatgcatttctggcaataaaggagaataaaacagaccctccaaagagtttggatgaattagagcaaggtggcttaccatcagcataaaatttcttccttaaagattagtttaattttattttagatataggggtacatgtgcaggtttgttatatggaaatattgcatgatgctgaggtttggaatatagatcccaccaccaggtagtgagatgctaccaggtagtgatacagatgctcccaccaagtagtgagcacagtacgggttaagtagtttttcaacccatgtttccctccgccattcctcctctactagtctgcagtgtctattgttcccatgtttatatgcatgtgtgttcaatgtttagttcccacttataagtgagaacgtgtagtatttgcctttctgttcctgccttaattcacttaggaaaatgacctccaactgcatccatgttgctgcaaaggacatgatttcttgaaatcatatgttttatccggtaaaaataccttaaaatatttcatgctatgccattatgtgtccttttaaattatttgtcattaataaaattgaagtttaaaattatttctaatgttcagcctttgttttgtgttctctttgcattagcactgtacacattcagtttaagaatcacctttttagattcccaacaaatggaaaagtgatatttgtataatatatatattttgtaaaacacaaaacaatatgcagcagaaaaattattgcactaagcacatgtattagaaaagaagattctcaagtaaatgacatcagcttctacatttttttcattatactttaagttctgggatacatgtgcagaatgtgcacgtttgttacataggcgtacacatatcatg

SEQ ID NO: 2407 - DNA, 6844 bp, Homo sapiens
atttgtcaattttggcttttgttgccattgcttttggtgttttagacatgaagtccctgcccatgcctatgtcctgaatggtattgcctaggttttcttctagggtttttatggttttacgtctaacatttaagtcttgaatccatctcgaattaatctttttttaaatgaaatattccttttttttctcagtgccatagataatagatgggtggactgtaacagtacctagttttcagctgaagcattttaatctccatcatttccactattaaaagaactaaatcatgcctgcttaatacgtcgtgtgtgttcgatactatttaggttatataatagtatagctcatttgaaacttagtgattctcagaaaaatctgagtattgcttatgttactaagagtttgtcatctggggtcaatacttatcatgccatattgctgtgtcccctatctcccattggagatgagaaaactctgacttttagtgtcagactgtctggaaatcacaatgtgaaattatcttctaaactaattcagctaaatcacatttaatatcagattttagtgactttctcatgactgtttatcaactcccaaatgactctttaattaattgtttctcctttactggctcattttctgtcagatccctttccttagagtgttgttttatccctgtgtggcagaaagactgtctgagattgtgctgttattaaatgtagtctggcataatttaagcacattaccttgatgatggtgatgtcactcaggtacttggcctacaaggagctagtacaatttcacttatttcattttaatggatccccttggttttgagcctataaactaaaataccattgcagtaccctccctccagcaatctcaaacttaattattccactccaggaagctgtctgatggccctgcagagacctgtttttgcactaaaacgcaatcccttattgtgtgacaaaattacttttgtttcatgttcttttctttatttatttacaaacagcatggaaaagcacttctcagcacaacttaataggtgattaccacaaatttgattttgagatttagattgaatagttgttaaagttttctttgtattctttcctttgtaatcatgatgacttcttaaatactattccaagtactgggcattgtgggtaatgtggcataaattgccaagatagctgactcaaatcttttcccctacttagttttgatattatttattaagtttcatagcttggatgacacctcttataagcccatctctaccaatatcttttttgctgctttgagcaaatttagttttctaagctaaaatttctaagtggttttgcagaaagcagaaaagacagagacacattgcagaaaaaggtgtggaaagattagagattcatagatgttgccatttgcagtacaaagttatctatgacaatggtcagtaatatatttcataaatgatcaaaagttttcacttacaatttcaacattttcacaattgtataataaccaagaaatacttagttttgttcatagtcaaaaagaaggttgaattgagagccagaaactctgtagtattttgcaagggacatatttgtctctagtcatcactttggtctatggggactaataggaaacgaacttcgtgcttctgtcacattttttgaagacaaagggacagcccatggatgtgctgtattttctattaataacatgttctttctcttcctagtttcctaggctttgaaaaaaatggtgaagagagagagaaaagagtaagagggactggcatacttacactttatgtgtgcatgcagtttttaattttgtgcttttcaaccctctctcatcagtgcaagaaattaaatgcatgagaattaatatgctcaagtcaataggtgaagcaataagctataacggaagagaaagggcttccatcatgcacaagctttatagacatttaattccctatgtggacaggaggtttacttatctgcacaagagcttcacacaaaacaagaattagattctcttcattttgagtttgcaatcctacttcatacaacaactgtggaattgagaaagaaaaataaatgcagagatagacaatatttggaaaaggagtcagaatgaaactgaattacacttgtttattttgagtttgggagaatgtggagaaaaacagattgaattaacacacacagaaaccacaaacacttttttcaaaaactcattttagtttatcttccctgaacaaactgagcaatatttagtgaagctctgtcttagtccctgtgaccacttttaaattacaggatggtcagaggaggattggtgagcacctggaagattgacaagtcacttccggcagagcaggcagatcatcaaatgtgatcaacatgccttcccctgtctccttcgtggtatttttataaagacacagtgtttgaaggacattaatctaaatgacgggtcacaggaaatgaatgtgataacaacaggaagtgtattatggagatatggttcaatacaagcaaggtaagattctgtaactagaaatattaggagatagtctggatcccagacctataaaaccatgagtgaaccataaagcattagaacagggcaagtattcatatactagatgaggctgggttttggtaactgtatataaaacacatttattaagcgtaaaacctattggccaagcattatgctagcctttgaagatacacatatgaatgaaacctgccctcaggaaattaaaagtcttatgggaggtagcctcttcaactgatagcaatgagataactaatttttgaattataaaaagcctgtataaattatgaaaagtaccttgaatgattatgattcatttactgcaataactgaaatcatgttactcttccactctccctgcaatgtatcctcttaattcagatgcctctaaggtcaatgtaatccaatctctatcagtttttcacagatgctggaattttggatagccctgggagggtgtggctggggcagaactcactctgcatggtaaaattagtggtctgatgttagaatgtgagatttcaaggacatagtataaaaccaatcatttcactggtcatgatcccttcattatggataggatggggtatcttgctccaatgaacttaggaaagaggaggtccctggattcctacttcatatgagacaacttgtttcctagcagtcaccctacagtctctagaatgaaaatgccttcatagcattttgtgctcctggtagcttaggataacaccagtgacctccatgtgattagatgcagacttcatccatcatctacatttgaaatatatgatcaccctcttctctttaaaacactttcttctcctgacttccagaacagaattatatcttgtttctcctctacctcacgggctgttacttttcagtctgttctgctggttctactttctctaatgtttccaagttggagtgctcagggcttaatcttaaggctttaatcctaccaatctaggcacccatctccagtgatctcatcaggacacatggcttcaaataacatcaatatttctgatgattccaagtttatgcctgtggcctgaaccatttctacaaaccccagacatgtatgtcaaatttccatgcaacatgtccacttagatttttcaaattgataacaacaaaaattgagttcctgatttctcttctcatacttacttccctctgcttcctcaatctcccctcacagtaacagtcaattctgttattcacactgctcagcccaaaaccttgacatagtcaaggtttcccaccctacatccaaatcaatagcaaattctatcatatctatttttgaaagacaatagaaaatctcactaactcttaccactttcactgaaaccattctcatccaaacaccagcatttcttacttggatttctgcagtagcctcatacatatcacccttgtcttattacaggttagtctcatccaaccagggagttctttttaacacatcagattatgtcactcccctacaaagccttctagtggtgatccatctccacaaagcaaaaatatgaagttctcatccagtctaatgatctggattccgtggcatttttgtgatctaatactgcccctcagtttcttgaatatgcaaaacatgttcccatctcagggccttggcgcttactgttttcattgtgctctttaccaagacatttgcacagcttatccctcacccaattctcaaccaccaccacctcagagaggagacaacacaactccctgaaattctctatctactttaccttgcttgatttgtattaagttaccatcacttaacatagttgctatattttttatgtctttattgtcagtccttcctcattgttctgtgagctcttttagggaagagactttgcttttctccatcctcttttatgaacctaaaagagcttcacataatatgaatacttgatgatattgattaaataaataaataatgtaagcccattgagaagctggactcattccacgctactgcatcactgatacccatagggaagaagagttgttgttcatggtgccatgtgatagagttttcacttctcctaaatatgagaaataaatgcatttgtccctgttcattccaggcaccattagaaccaaagcactctagattatcaatcaactccttgatttacttctgcttacttctctgcacactcgttaaccttgcccagtttctttctattgctaatctctgctttatcaatcttttcctcttggacttatagtctgtcatcagcaaaaacccctatattctgaccctcttccctaagcctgcccttcacactcttattccaatgcaaactggctatgtctcattgacctaactttctagccactttcttgagggaaatctttttttttctctcttttcctctccttctctctaacatccccatatacaacaatatctgaggtgagaacagacattatccttgctttatactttttttgttttcaaaatatttctcctccctgtgcatacaaaattttccccacctttaaagtcataattaggctctgtctcctgcaacatctctttgtagcagttatctataaacctccattcatttcactccctttttcaggatgacttcagcgtatcacccaatctcttattttctacctgcttccctttccccttttgattacttaaacaattctactgcactttccagtatgttttattttcctccatcaacaaaatggctatttcagacattcttctttcttttcagatttcctcataagcagaggagctgctgcagttgtgagctttacatctgcattaacaaggagtatcccctttatcaggaagctaaaagcttctcaaaaaaaccccagcaggctgctgtttctctttggccatatctgcggcaaatagctattccttgctttaaggaaattagaaaaagtaaaagtttagcttttccagcctttatatgaggagatagcaagggaaaagagagcaggaattatctgtagggttagccacaagaatgcccaacacaattgttcatcatctacattacaagcaggaagtaaaggccaccacacatcttttttgaacaaccttatagcctgcagctagtctctattcttgacctaccacaatccatgttccatgaggccacagtgacctttgtaaaacatgcatccaatttgtcatttctctactaaaccctccaatggttccaattacatttaggataaaacctatattccttataatggtttgcatagccctgtctattctgtgacttttatttcttaccactctccaacttgctctccctgcttcatcaacttaggcttctttatgtttctaaagcacaccaagataactcttgtcttgttccttctacctggaatgaatgtctctttgatcttctcttatctcgatccttttgtgatttagatgctggtttaaattttcctccttagacaggatttccttgaatcctctatcttaagtaactaccttttcattattgtgcttttaagttttttaacacagaatttatttggagttctaagaatttgttttttgttctggtgtgtatctgcagtttaacagggattatctatagggttagtcacaagaatgtattttcaggtcctagagaagcataggcatcaatagtaggtatcaataaatgtgttaaatgaatagcaaatgtaccagtgtgctaaacaattaaatatgtcactattagcctcttttaaaaaaaaccttgaaaagtatgtattagtatttttctatttttcagataggaaaattgaagcattaagagaaattagacatgttcacagttacactgtttggttctctaggatttatcagtggatcatctgacttggacaacccctatacttcccactgaattgtcttaatatttatgttgaaaagcaattgatcttacatgtttgagtgtatttctggactttattctgtctcattgttatgtttttttttctgtctttatgcccattccatgctgttgttgacaaaaagagtcaaactctataaaatattttaagagatttattctgagccaaatatgagtgaccatggccggtgacacagccctcaggaggtcctgagaacatgtgcccaagttggtcagggtgtacagcttggttttatatattttagggaggcatgagatatcaatcaaatacatttaagaaatacattggtttggttcagaaaggcgggacaactgaaagcagcag

SEQ ID NO: 2408 - DNA, 545 bp, Homo sapiens
cctgtcggatagtaaatcccaagtaaggtaccttctgctggaagatctgagctttcttcttggacacctaaaacccacagtcctccagcagtgaaggatccagtgagattttccaggttaacggtcataatcgcctactggtccaacgttcagaagtaacacaggcacctggacaatacacagtagatgtggaaggacacggttgtacatttatccaggccacccttaagtacaatgttctcctacctaagaaggcatctggattttctctttccttggaaatagtaaagaactactcttcgactgcttttgacctcacagtgaccctcaagtaagtgtcatattttgacagtaactcccatgtgaacaagatggtaaaatattttaaaagttcaaacagtagtgaaataacaaaatataaatcatggtaatatgatgagttctcatgttggtggtgacaattctacagcacagtcactttttagccctctgtccggacaccacaatttagtacatcttcagctaaatcagagctaaaatgaggc

SEQ ID NO: 2409 - DNA, 4068 bp, Homo sapiens
aaaatgtaaagtgtatgtgaaggtatgggggagggaataggaaggggagatgataggcgatgataacttttcattagcttctcaaaggagtctgtacatcccccgcccccactgcgaagattaaaaatggtttcttagaggcttttaggcagggagattttccctttaaaatcagcagaagaagtctggatgcagcatagggaaaggaggcgtcatcaggaagtcctaagtctgaatgtcagctccaccttctctttttctcttatattgtggtaaaacatacataacataaaatttaccatttcaaccatttgaagtgtacagttcagtgacatttaggaaacccacattgttattgggtaaccatcatcaccatccatctccagaacttttttcatcttcctaaaatgaaactctgtacccactaaatagtaactgcctactacccccaacccctggccgctggcaacctccattgtaccttctgtctccatgaattgtgatgactcccggtgcggtacgtaagtggaaccatacagtatttgtctttttgtgactggcatattttacttagcgtaatgtcttcaggcctcatccatattgtagcatgtgttagaatttcctcccttttaaggctgaataatattctgttgtgtgcatatatcacattttgattatccattcatctgtcaatggacatttgcgttgtttccaccttttggctgttgtgaattatgctgctgtggacatgagtgtacacctgtttgaaaccctgcttttggttcttttgggtatatacttagaagtggagctgctggatcatatggcaattctatttaacaatttttgaggaaccatgtattagtccatttttacgctgctgataaagacatacccaagattgggcaatttacaaaagaaagaggtttattggacttacagttccatgtggctgggaagacctcaaatcatggcggaaggtgaaagacacatttcacatggcagcagacaagagaaaagacagcttgtgcaggggaattcccctttttaaaaccattatatctcgtgagacttattcaatatcacaagaacagcatgggaaagacttgccctcatgattcaattacctcctacccagtccctcccacaacacatgggaattcaagatcagatatgggtagggacacagccagatcgtatcaaaccaccatacagttttccatagcggcagcaccattttaaattcccaccagcagtgcataaggtttccaatttctccacatcctcatcaacaccactttctgttgtctttttttttaatagccattctaatggtgattaggtgattaggattatctcattgtggttttgatttgcatttccctaatgattagtaaatattgagcatcttttcgtgtgattttggccacttatgtttctttcttgaaagaatgtctgcaagttctttgcccattttctgatttttttttaagttgtgggagttcactatatgttttgcctattaatttcctatcagatatatgattcacaaatattttcttgtatttcatggttgctttttcactctgttgctagagttctttgatgcacaaacgttttaaattctgatgaagtctgatttatctattttttgttgcctgtgcgtttggtgttatatccaagaaatcactgccaaatctagtggcatgaggcttttcttctacattttcctaggagttttatagtgttagctcttatgtttaggcctctgatccatttggaattacatctccacctttcttaactatctgtggctccttgggaaaactacccttctttcctgattcagacactggggatgggaaaattacctcaaatgaaggttaaaaaaattgcatgtatctcctatactacctaacactgagagctcaataatattttgttcccttgctccttcactcttattccttctggaaagaagagtaaggaagagggagagaaacagtttggtatttttaggtagactagggagcatctcactggctggagtaagatgtgggggcctgctgtctttgcacatcagccctggtgtttgctggccctcttttccaggaagtgcttcgggagatccaggatgcagtggccagggcggggcaggtggtgcgggaagccgttggagggctgcagaccgttcgcagttttggggccgaggagcatgaagtctgtcgctataaagaggcccttgaacaatgtcggcagctgtattggcggagagacctggaacgcgccttgtacctgctcgtaaggagggtgctgcacttgggggtgcagatgctgatgctgagctgtgggctgcagcagatgcaggatggggagctcacccagggcagcctgctttcctttatgatctaccaggagagcgtggggagctatgtgcagaccctggtatacatatatggggatatgctcagcaacgtgggagctgcagagaaggttttctcctacatggaccgacagccaaatctgccttcacctggcacgcttgcccccaccactctgcagggggttgtgaaattccaagacgtctcctttgcatatcccaatcgccctgacaggcctgtgctcaaggtgcctgaaagagggaggaaacctggacccttgctctctgctgctaatgcataattggacatcacagcctatagttcatttgcctctgagaacctggtcttgcctctgctaagaagagaaatggagggattttgagggagaaggggcaggcccttaactctttttctggttttctaggggctgacgtttaccctacgtcctggtgaggtgacggcgctggtgggacccaatgggtctgggaagagcacagtggctgccctgctgcagaatctgtaccagcccacagggggacaggtgctgctggatgaaaagcccatctcacagtatgaacactgctacctgcacagccaggtggtttcagttgggcaggagcctgtgctgttctccggttctgtgaggaacaacattgcttatgggctgcagagctgcgaagatgataaggtgatggcggctgcccaggctgcccacgcagatgacttcatccaggaaatggagcatggaatatacacagatgtaggggagaagggaagccagctggctgcgggacagaaacaacgtctggccattgcccgggcccttgtacgagacccgcgggtcctcatcctggatgaggctactagtgccctagatgtgcagtgcgagcaggccaaaaccctttggaagttcatgatattttgaatttcaatggatatttcctgggaataatgagttcaaatgaacgaatatgtggaacaaagcatcaccaacatttattttttcaggatgaggtgatggacaaaaccatcacagggaaattgaggcaaatagtacatgtaaaacaatacttcgggtgagtccacctatcccaaagtcgtatcaaagaagtggctgcagattggagcccaaagcctttggttcctcagtttccaaatggattctcactaggtgggatcatgagtttgctttggacaccccaaattctaactatttcttttgtttcttacatcctttccctcttccccagccccttcccctcatgttacacctcttgctggtttgagacgtcaatcaccactgagaaagaattaaaccagtattttgagctggcaaaattcttagcctagtacaattccttcaattaaactgtagctcaacaatgtgttctctaaaagtatgatttaatattctacctagaaactcagaatatttttcataactcctccagggcagtgtggattatgttgatgtgttaggaggaagtagaaggaagaaaatgaattgagatgtacgttttacttccatgtcaaagtcaccaaaatagcagttgaagggatatttgtgtcaggcaatagggagaataataattttatgccaccctcaaaaaacaaccacacatacacccaaattctctcactcctcagagaaaggggaaggaaagaaaagagagaagcaaaatatgag

SEQ ID NO: 2410 - DNA, 933 bp, Homo sapiens
aatcactaatgacctcatcttcaaatggtcagtgataataaacaagaaggagggatttccaagggagcagagcattaataaggttttatctactacaaaggatatcacttgggaaggaatttcttgaaactgctcccaagagagccattggaccatgtggtaaacaactcctagctgatggattattgggaatattaacatcatccagaatgctatggggagaagacaactggaagctccgtgtggacaaacctcctggactctgccccacatatctcttcccttggctgatttgaatttgtatcctttcactgtgataaaccacaaccagattattacagctgtcagcaagttcttctattgaattgttgaaactgagggtggtcttgggaacccctgaactctactgttggtgtcaggagtgagggaagtcttgtggactgtactccctgacctcacaggtgcattttccaactttatttggacattccccaacaacatcatccccttcttcaaatatgtttctgctacaaacattgtcctttagatggttcctttgctgccattatgactatggcgtaatctgtagtaaagcaccattaagatgttaatacagatgtatgtgtgaattaaaaagtgatgctaaatgcatagtaaccaatttacttcgcattaataatttagctatttttatttgtttctaaacaaaaagcaaagaggatccagtccagagagcagttgcaacagtgtgcacaatttttattaaaccgaaataaaagttcttgggctatggaagtcacctaaattcacttctcttttcctatgaactttcactttttttccttccaactctagttagaagctgacagctgacacgcccttcctttgtgcattttatcctgggacaaaatgagaagacatccttcagttccc

SEQ ID NO: 2411 - DNA, 71028 bp, Homo sapiens
aagggagaagggaacagggaccacgggtgcgcctggggacacgccccgagagccccctttgtggcttcatttcccgtccctgctgaacttcgctcgccccccttgggtttgaagttttctcgtaccccctctgggcagagtcggtgtccttctggctgtttgttaggctggaaagaggggagccaagttctttagggaaaattattttgtttttccttatctcctttctcttctcttcaggaatggtactagatattttgaactaaaatagctcagattggggggaaatggcccagcgactgtatttcatctttctggtcccaagaggacgctggaatggagagtcgtgcgtgagtgtgtgcgcgcgcgtgagggtgtgtaagtaaaatgccaaaaattaaaccacccttcatggtgcccctgaaaccaaccagtggaaagggaggtgacagtttgtaaacaacatgttttactttgccctgaaagtgtagacacttttcaagaaggccttttcgaagagtttagctacgcaaccgttttccattaatgttaccatcttgtgactcgggtgacctgtgcgacttgggtcgtgaattctcaggtcggccttcccaatgcttgagaaggttgggggtggttaataagccccgagaggctctttcagcccgtttgaggaacatacaagtaaaaacagtgatgctttgtattgtttgttcttttgagatttcgtgtgaccgtttaaggcctagaatgttggtttatttgaaggatctctgctctcctaagggtttacccagtttgtaatgaagtcttcaaaactagtttaataagtgtaggaaagtgaatgatgcgcacctctgcgaaactgacaacactaaataaatacacgcaagtacagcaaaatttacccttatggaacacagcagaggttttctgctgctccgctgatgctttgagtcctgtaaatttaataaaacttagtaacagaaagaaccagtgatgggtgtaaatggaagtaaatagcagttaagtatttattgttttgaagactgatttatctaatagaaagaattgtgaaaattcaagtttaacattagaaaacgctggtatcatatttcagaacaaaatggttccctatgttgactggtggaatactgagtctccacttgtgacaactttttgctttaattggatattttatataactttcaactacaaacagtttccaactattccaaaatgaaaatatttcatattattcttttctattgttttgcaaattattcagccaatactaaatatgattgacaatttatgtacatcaatacttaaaatttctctttattccttaatataaatgtaaagcaacagagaaaaactatttaaaatttaaagtttacttagtgaaaaatccaatttggccaattattaatttggaaacatctgatgtgcttcgtacggagccagtgtcttgcggcttgaaatcaggctgcatatgaagttaattgaaattgcttcggtattgtaattaccctgcacttttctattacttacttttaagtagaagaaaactgggaactttatattcacagaaaagtctttgtagaagggcgtctgattatgaaatactgccaggttgaaaataaatatcattttatggaaatggatcatttaaagtatattttatttgcctcacataataaataatttaccctctaaattcatcccccattttgaaaatcccatctttggaatatctaattttaaaagaaaagactcagcttttcaaagatggccccttctacttgaagggcaggatggagacctcaagaagcgcctcatggctttgcttgctttacattggtgacggatcagtgttcagggaccaggtcccagggctgtgaatgtgcccataggatttgatgtttgcgcactgacgtttcagtctttctttacaaggatgatttggagcttgtgctctccttagtacccactgaaattccgctggaaccagatataatgtcgcaaacgctttgtaggtccatcttcaatgcgccgaaatttgagcaggttattttgaaactgcatttgcataagtccatctgagcaaacatttttatggagttatgaggtgtggtttgcatcagccatctttgagaaaatatagtggagctactgtgctcggctgcaaaacaagttgtctgcctgttgatttggggaattttgtgagctacagctttggatgaaattctcctctggtggaacacatattaaatattattagagaacctctattttttctagttattttagtgaggtcgttatgtaactggtaagaggagaagttttgattgctttcaaaatgatggcgacatcaatcttcttcatgttgcatagtgcgtttgaagattacaaacatttttccacttactgtctatgtttactgatttttattagtaatggcttttattttagatcaaagtcaatgactttggaaaaaccatagtaacaattataataaaaatcagttcctgttcacgttatatttggtgtttagagaactgccgtatactacatttacaaagataaacacatgaagcgtgatgactaataatgagactgattttgtttgttttatggacccagtcttagtacttatgaagattgcatctagagttaatttctctggagtacaatgatttcatttccttgtcattgtatttttagcttccattaagaatcatccataccttttctgctcttgtttactgtaaagattatcagccatgtatagacacagataattaatattttataagatttttattttaaatatgcattctccaaattggctaatatagaggcattattgtatataaaacacgatttaggctatttaggaaacaagaaatataaataataccctaagaggagatttgggataagttaggaaatcagaataatttgagaacttaacaaatatatattttttccatactagcagaaataagaaaacattgacattctggtgaatgttttataaggatttatctcctccaacatttacaatgttttatttttaaaattattttgttttaatcgtgagctttaaagtcaaacctaatcctttatttataagaagttatttattaaccttgatgaacgtcagaaatttaagttttaggttgccagttttaaagcactcattagaatgaaaacagagccactcaattccgtgtgaaatgttgaagttagctgtcagatggaaccacgaagtataccactagccatggaggaaagaaaccaaacacgtgcacccctcttatgaagtgaatgtagaggtgattttcctaacttatttgatttgcagcaaaatattcctgggtaatgcgtggcatcaggttgcatatttaatttgagtatagatgacacttttttctgtattattttttaagcagtgaataaaaataattataaacaatagaaaaagttttggtttagcatttgatggctagtgttacctgcgtgtaaatgcttgtagttaatgaaaacatgaatccagctttgatctctttgatctatagtcttccgtatagcattagaacactggctgtctatattttcagagcaaagtgctcccctcactcggaatagaaaatgttgtaagtagcaactccgatttacagactctaattttacagacattctgcagaaggatctccgtgtaactgttagggagtcattcgcaggcaagttgtgtatgatgttcacccactttgatgggtatgctgacaattacatccagagtcagagagaagaaataagaatttgctaaaaagggacattccctttcattcatacttggtcctttctggaaagaggatggaatttctaacatctgtgccagttaacatcagtttgagcccaattttaggggaaataggaatacacttgtagaaggaattttgaaaattttaaataccatcttaaactgcacataagacaagcattcagcagggaaaacatctgagaggattaagcctttaccccaacagggaagaaaaggggggggtgctattttcttagcagcctgaatgattcttttgcttatctagaaagctttccaaagttttatcagaaaaagaaattttgcttgagggtttgttgtgataagtatttttagatagtatgtataatcatttagttgtgaatttttctcaaattgccaaagagatcagtattatgaaatgtagtacattattcccattagtcacagtaaaggactatgcatatggtgcacacagagctgttctaatgccagtgctgtaggggggaaaagaagaagaagaagaatttgatcaccctttttatttttctatccatgtattcttttgctacctccttcgcagtttatctaattaataatttaaaaagcccaaatctgtccattggaatgtgaactctgatctgttaagatctctttgccagtcctaatagtcaccagggggcagaaaaaaaccaaccaggattgactcacagtgaaatgattccacattatccagtttctttctttccttctgatttatttatttatttatatatttatttatttatttttgtggctttaagttcttgactccagtttaaactaatattcttccccgcccacaacagccggtcctcaagtgaacaaattgatatagctcaattcacaggtttgataaacaagaatacacaaaatgttgggaactggggtttaatcaagggatagaaattaaaatggactgaactaaatatggaaagtaagaattgaggaagcttgagatactggagttaaaacccaaaagagaagttcagaagtaggacacccctctcccttcatctgtcctggtctccctgccagacaaaagcttgaatggtctcctacaccacaaaatcctacttaatctgatttttatttcctgccacagtgattatttaattggggatggtctaaatgatattatttggtatattttaacagggaaaattgctgtggatctgcagctagtgtgagtgactggtagctgcgtttagagtgttgaaaagttttgcattaagtaaaatgatccatattacagaatcatggcaaagatggtaattagtggtttgcagaaaggagcacacggcagttccctttctgtttaaagaacctggctggatcttgagaatatgcgtgttatcctggatgcctaatactgcatgttcccaccagtgagtagactggcagattctgatcctaattaagaagacatgtttttgaatcaggaatgtgaatttggtttgcaacaccaccacgggggtattgttggtgagctgatagtttgactggctccatgggtggtcactgtttaaattccacccaactaaagagctgtacaagattttagtcttcaaagtttacacacagcaagtgtggggagaagttatcactgccagctgttgggggaggaagtgaaagtgagaaggacccctccccccaaataacttgtgtgtgttttggatatgttgcatatatccatttaatatgataaactctttaccgcggtggaagttacagtcaagttgattgatcttcctcttccccacagctcctgatggattttataagataagtaagtcccctgatggtttctaaggcaacttttccaacttgctgacagcagatctgtaggggagatggcacatattggtgctgatgtactttatgggcaaaaagggagcagttaagcaacttgcatgaggatgtgttcataactcacagctcagttggacaaatcaatctttccatgtgttcagaaacaaaaggcaggggggtcatgcatgtgtttgggagtggttatcaccccatgaagatagtttccacgccaattttgccttctttaatgtggtatttgctttaaggctgtaccagggccacttgcttctgccttttctttgcacctgctttctcttgatcacactaatgacccatcagttctcagttaccacttcccactctgacccaaacctggaaacctccaattgctgctgtctggacatcttaaatactttttggttttgcaacttgtctgtggactccttcccgaatatgtttttaagttttgttaggcctgcccttcaacctgccctccagtgtcaggagtagactaggtaatatatattttaaagatgcattggtttcactaaatctcctcctttggtttattttgaattaattattgaacagaatgatttaagatcagtctgatattttcaggtgtaaaatgagcatctttgctctaagttaattactgggcttctgtcgaggagtgccacagaggaaaaaactctggactgggagtcagtgacctggacaagccaattaacctttctaatctagcctctccagggattggaaatgatcaattgcagtttcttccaagaataaaattaggtggctcttgtgcaaatcttagcaaaattgtggagtgatacccaatgtagaatgcctccctccatctacttcctccatcacctgatacggaatatgtcccacatcaattaaatttagccatggacacaggtacatatttgtgacactgatcacccatgaatacaacaataaccacaaaaagagaatgaaatactttctctagcattcacaaagaatatttggatcagtgacataattttaaaagtcagaaaaataaacactaatgtcagtgaacaggaaaaggttttatactgttcttcaatctctaaaaatgtttttggtataagaataattttttggaatgttaaagtaagtactttaacatttactttaacaaactgaaagtagcactttcagcttgggagacagagataataattttcatgtgtctgaattggattgtgttaaacacaggccaacaggagtgtgtttggtgacatcgatggtttcagagtcagagaatgtaaacataggacccacaaacgttttacaggagcacggctgtggctactgcagggactcctgaaccgtgacgcacagtcagttggccgcagagaccagcctggagctcgccctaaaacctctttgcagccttgcagatgtcatagttgtcccaaagctgggcctcatgcttccgtgtagcctcactgaatcaggagaccgagtgtttccagagccaggatgtgggcgctgtggggccagtgctgcatcctcctgcgctggcaatagcagagttgtggagaaactttatttggtatttgaaatgatcaatattttaaccttctgcataaaaagagagagaagtctgtgattaaatcttgatttaaagtcttcaaatatgtacatacatgaggatgaacataagcatatttatttcaacactgtctagaaaagtgaaaattagaaaccacttaaatgtttctcagttggaaacataaaccatgtgtaggtataaggtcatgtactactcagccattagaatgatgctgctattttgcattgattgatatggaaggagaaccatataatattaactaaaaaaattacaaacagcatgtatgcaaagatctcatgtttgtttttgaaaagatgtgtatgagtgtgtgctggtgcctgccagccttaaaaaacatctgaagaacaaatgtaaagaacattaacagtagttctaactctgggtggggcaattagactggtttgtctttttttcttcctttttaatatggtctatttttttaaaattcagtgagcatgtattacttttacaataaaagaaaacaataaaactatttttttctttatctatttcttttcctaaccgtctgtacctgcgagtatttcatttttaaaaacagcaacagaaggagtagacatttcacattggtattgcactgtcttgaagactgagctgccctttagcatcttacattttagtcctggaaggtagctgagagctgttttagcccagccttcctgtttttctaggtaagacaaatgagcatcagagaagtcaagtgaattgttgaaggtcacacagcgagggagtcatcaggctgtgatgagaatccctgtatttctgtcttatattttctgctaagccaccattttgtcatcctgggaatggaggagagagaaatggaggcattcataaattaaccgtgtatgtaccagccttagtctactcacttcccctaagagggttgagaaaagcatccttggttgtgttatctcctctcaccccatcctgctcacccacccacacgggacttttatgggagtggcagtagactgggtctctcctgggcatctcatgctctgttccttcctgccaaacagaagccaaccatcacattttcttctctgctcttctttgttcaaggttactctttttccccagatccttaatagaggaaaaacccagtacctaccttcctttcatacccagaaacgtcctcttaacaccttcaagctgtggtttaaagatgaaccttttgagatgtaaaagcataactaatatttaaaggaaacaaaacacattttacttcttactcccaagccagttataggaatgcccattattatttctgccaccccaattcccactctgcttcaaatttgtttcaaccaaggatataatttggactgtatttttaaaaagtaaaccttgctttgcggggactatatttgcattcttgcttgcccttgagtgtgctctctcttgctttttcttttcctgaactatttgaaagtaatttgcataactataattttgttatcatagctcaggaaattagtcttatttaatttttttctaataaacactaggtttttaactttcatttgtcagataatctctcatatagctgatttttttttttttgcatttgtttataatgtctttctctttttttgagacagggtctcactctgtcactgaggctggagtacagggtgcaatcacagctcactgcagccttgacctccctggctcaagcaatctcccacctcaaccttccaagtagctggtactgtagacgtgcaccaccacgctctcctaatttttgtattttttgtagagatggggtttcaccatgttgcccaggttggtctcgaactcctggacttgagcaatcctcctgcctcagcctcccaaagtgctgggattacaggcatgagccactgcaccagccatttcttctttttaatctaccaagtatacccacctctttctactttccaatactgaagattacaggctagttgtcttggagaatgaaccatgatatggctgtgactgttgtttcttcatgaccagatccaggttaaacattttggcaaagataggctaagagtttgaccccttgtttaacatggcggccaccggattgctccattgtagacagacatttttctgtttgtgataagtagtaagttgtctgcagaggtgctaccatgagaccctctgaatatctatgttccaacagactttcatctggtggctttgtcttttaatttgattaaatatttaaggagcaattgtaatgaaatatgtggatcactttagaatgcatgagtttggacacacagtttatatcaaacagccttgcaaatatgtttgcgttgtatcaccccatagatattatctagagcctctggatttttctagtcctgacttcataggacttgatccatgggtcagctacttcccatttaactctataagagacattccatctcttgagttgcagtgcttttaatgtccattttaatgctaatggaaataagtggatactgatgtaatttgtactgctcatcagatttttttgggtatcctcttgaagttatgttggttctttgcagaagccttttaactctgttttcaaaatcactgtatgaagcaggctttaaaaatgactgatgacttgccctggtgcctaaactgggtgagtcttggggctggtcagtgactagcagtttgttcatgttttttagatttaagttacacagctatttttgcctgttccactttggtactcctattttcatacacaaaatatgtatgggtgaaaaaggtggtgtggagtagtgaaaaggagcaggagcaggcatgatctatgttctggattcagctttgccactactaaccctgagcatcagtgttcttatctgttaaaggaagcagtaataataaagtgaataacaactaactcgtacagagtgctttctgtgtgccagccactattctaaacagttgaggtattttcaatccatttacttcaacaataatcctgtgaggtaagtgttgttattctccccatcatgcagatgaggaaactgaggcacaaccttactaggacccaggaaagctaagaaaaatagtatttatgaaaacatggtggaatggggcttggaataaagaatgttatactaattcaagcaatcctgtcttctctgtgtaaatatctgtttccttaatttatagaaaatccatcacttacaagaaaatattatagaaaaaaatgactaaaataaatctgaaagtaggtcaaatttaagacaaactaagcaatccaattaaaacttttttttcctgtttccgtcccccacccccgcccttttttttccccttaaaactttaagtacagctttggtttaaagtgaaatctatatcccaatttaaattccatgaacaaatctgactctggcatttgattcactgtcttactctgcttgttatgcatgttaaacaagacctaaatttgatgctcacagagagcacataaacacttataatcctctcagcatgtgctaaaataataacagacacgatagtttgatttgcaaagtgtgtctgccaacttccaccagaccatttttgaaccaattcagaaaaccaggattctgcaatgattaaagtgtccaaggctcctattcatagcaaaaggaattcctgacttgaaacaagtacacatgaagctcagctagtctctgccagacatactttttgaaccatctttgcagacattgttacaagtgttcttttgctttaagaaaccatggtctgtaacaaccagactgaacagaatccataaactggggaaggattgtgccttttgatctgcgacagggtttacagtaaaaatcctttaaaccatgagtttctcagtgtatttcaaatagcaattcaataatgctaacaattcagaggtctaataataaaatttaaaactttttttggtcttttttttttcaattttaagaggtataattgaagtgtggtaagctgcacatgtttaaagcatccatcaggatccattaaaccattaaacaattgagataataataaacattgttggctgggtgtggtggctcacgcctataatcccagcactttgggaggccgaggcacgtggatcacctgtggtcaggagttcgagaccagcctggccaacatggtgaaactccatctttactaaaaatacaaaaaatttgccgggcgtggtggtgggcgcctgaaatcccagctactctggaggctgaggcaggagaatcgtttgaactcgggaggcagaggttacaacagtgagctgtggagatagcgccattgcactccagcctgggcaacaagagcaaaactccatctcgaaaaaaaaaattatcaccccacaatgtttcttcatacttcttataatttatctttccctcttctccttatccccctcacattcagggaaccactgatctgctttctttgtttgcgtttcctagaattttatacaaatgaaatccaagtatgtactcatgtgtgtgtgtgtgtgtgtgtcttctttcactattttaaagtgcataatttagtgacatcaagtacgttcacagtgttatgcaaccatcaccactctccagtaccaaaatggttgcattgcctcaaaaggaaacttcatacctactaagcagttgcttcccattcccacctctccccagtccctggaaaccaatctgctttccatccctatggatttgcctattcgggagatttcatataaatgggatcacataatatgtggctttttgtgtctggcttctttcacatggcatcatgctttcaaggttcatccatactgtgtcatgtgtcagcacttcatgccttttcactgccgaataatactccattgtataggtaccgaaaacgttttctttgtccattcatctattgatagacatttgggtttttccacctttttactattgtgaatagtgctactgtgaacatttttgtacaagtttttgtttgaacatctgtttttggttcttttgggtatatatcttggagtggaattggtgggtcatatggtaattctttttttttttttgagatggaatcttgctctggcacccaggctggagtgcattggcgtgatctcgattcactgcaacctcttcctcccgggttcaagcgattctcctgtctcagcctcccaagtagctgggactacaggcccatgccaccacgcctggctaatttttgtatttttagtagagatgggatttcaccatgttagccaggatcatctcgatctcctgacctcgtgatccacctgccttgacctcccaaggtgctgggattacaggcatgagccaccatgcccggcctgttcttttttttttttaatggccatcctagtgggtgtatgaagtactatctcaatgtggttttgatttgtatttcagtaatgactaatgatattgagcttcttttcatgttggcttgttggccatttgtatatcttcttttgaggaatgtctactcaaatctatcatccattttaaaactgggttttttacattcttgttttggaatggtaagagtctttgaaaattctggagagtaggcccttatcaggtgtataatttgcaaatatgttctcctattttatgggtttgcttagcataatgattttgaggttcatctatgttgtttcttgtatcaaaactttgggccttttactttgctaagtagtattctgttttgtggatatagtgcaaactctttatccatctgttgatggacatttaggttgtttccaggttttggctattacaaatgaagctcgtatgaacattcctttgcaagtctttatctggacatatctttcagcttctcttgggtaaatttctaggccaatgatattttaaccttttaggatcacaaatattgtacataagaatcattgtttgggtgaaacgtcttcaaatttttattagtatgtcattgaatggagcatgttaatgtaaccctttaaggtgtttaaagaatatacactttttcatctttgttttcagaatcaatcactcattagtttttttttcttctgttgatgaatcttccttcaatagtttttcatttggcaagtaattatgaccatggaagtcgggacacaagatgaaaaagacaacaaaactgcagaacttcaaactgaaagaaaccctaaaaatcacctgagtcagctcttttattttacagaaaaggtgatgaggtccagaaaggagactggatttaccaaaggccagccgagtattagagcagttcggtggagcaggggaaacttacacacctgtgagggtaatttgacgtctcctagccatgatgcaacagtgctggggggtgagtgaatggcgctgtgttttacagtctgtagcattcacagggcactttgtttccttctaggttatcccagttaatcctccaacaaccctgtgaagtaggtagggactaagtaactaggagtagctcagggtcacctagccaatgatcggagatcccgggctcagagccaggccttctgactccttccaagttgcgtgccctcctctttttcgtttgaatttcctcctccttgtccctgcccactgccgtccccttagttcaggcctcccagctctacccccggcctcctgctggattgggctccactccttctttctctgcagcagcacagtcttgaccttgtcctctgcttgctggaagccctgctgtggcttctcctggcctttaggttaaggttcagactgcatggaaggcctttccagatctgccccactcagccctccagctccagaacttcctgtcctctcttggctgccctctttccctctcctcaactagaacattctgaattctgcttagacctcacctcttccagggagctttccccaaccctaagcaggaaggagggctgagtgaccctcttcctgtaattgtctgtggctcccatagtagcatttgtccgtgctctcctcttgcttgtctcccataaagaccatgcaaagtccttgcagtcaaggccactgccactcacctttgctatcctcatcacctagcagagcccctggcacatagtgtgttgaatatctgggaatgaggaacttaactgcaactgaactttcaatctaactgacttggtgatgagaaatactagtcaggatgctctcatgggtgagacctgatgtgacgccaaagcttggttttctccagcttatgttttatttggactgcctgtctgaaagggctagacagacatttatgttcagagaggccatataagaagaatataaatgcggaaagtcataaacttcagctctgctctgggctccactctcaagccactgtgtgaccagaggtagcacttagcttcttagagtccacatgggttaaagggggaccagggtatggggcttgttcaaacagtcaatgagatgacaggtgaacatgccttggtaggaaagcagtactgaatacatgtgtcctcatgtaagccagctttttgtctcatgctgtcatctccagccagaggccagattgtgtgcaggcaatttccaggctgaatttctgagagatttgatccaaataggataaatggtggaaatgaccactaggaacactccttaaaacctgcttgcatcaatgctttcaatgatacatttctgcatctcaaaaaaaagtttctaagccctaagctagcatctgcctatttcaagcaatttctgttcttttttttcttttcttttctttcctttcctcttcctcttcttcttcctcttcctcttcttcctcttcctcctcctcttcctcccgttccccttccccttcctcttcttcctcttcctcttccacttcttcttcttcttcctcttcttttttttttaattttttttttgacagggccttactctcacccagactagagtgcatactgatcctcccacctcaacctcccaaggagctggggctacaggtgtgcaccaccatgcctggctaattttttttgtatttttttgtagagtccggttttcaccatgttgctcagtctggtctcaaacttctgggctcaagcgatcattctgcctcagcctcctaatgtgctgggattataggtgtgagtgaccatgcttggcctcaagcaatttctaaaataacacaaatcaagacaacagcaacaccaagatactgctttattattgccttgacatttgcaataatgacagtttaactatagcagtaataatgacagtcgacttgtggcagcttaaaaaaaaaagaagctgcctggaaaataagtgattgctcacgattcctcagggagacttactccaaccaccctatttaaattgcatcttgaacccatctcttcccatccaggctgtcttattttgctttatttcttccacttgttgtcttctagcataaggatccccaacccccaggccatggacgggtaccaggctgtggcctgttaggaacgaggccacacagcaggaggtgagcggtgggcgagcaagcgaagcttcatctgtatttacagctgctctccatcactcgcattactgcctgagctccgcctcctgtcagatcagtggtggcattagattctcataggagggcaaatcctattgtgaactgcacataggagggatctaggttgcatgctccttatgagaacctaatgcctgatgatctgtcactgtctcccatcaccccgagataggaccatctagttgcaggaaaataagctcagggctcccactgattctatattatggtgagttgtataattatttccttatatattacaataaataataaagtacacaataaatgtgatatgctggaatcatccctaaaccatcccttgccaccatagtccatggaaaaattgtcttccaaaaaactggtccctggtgccgaaaaggttggggaccgctgttctgacaaattatataatttactcatttattatgttcttactgtctattatggctcctttcaccctgcccccaccacataagctctccaatggcaggagagttgtactcagtgatttaccccccagggcctaggagcaattcctgacacctggaagatgctcactaaatatttgttgaatgactaagtgaactataggtaaaaatactgactttagtgattgttatgtggtggcatttgttccctctctgagcccacctaggatatgaactatatgggcttcagggtctgagttttgtgattcaggaaactgaaagtggaaggtgttagaagattgtagcctctgctcctgtggggttcttggaagtaagactctccctgggcacccgtgacttggtgctcttctcatggcccagctccagcagttgccagtgtagccagaaccccttaggctgggatctgacttgtgtatttggtgggatcttgatggtggagggagagcagcaggcctgggctcagtccctagacatagaggccaaaaaagattggaacaaccgtgtgtccagcaataggggattcgtgaataacacttggctacatcctcccaatactattcggaccatctctgggtacggatacagagaagtctcaagaatatattactaagggcaaaaatcagggtgtggaaggtatatacagttggctgccttctctgtaagaaagcagggtgagaggaaggtgaatatgtattcatatttgcttcagtgaccagagggtgagatttgagagatgttgaaagtaggggccaggcacggtggctcacacctgtaatcccagcattttgggaggccgaggtgggtggatcacctgaggtcaggagtttgagatcagcctgaccaacatggcaaaaccccgtctctactaaaaatacaaaaaattagccaggcatggtggtgggcacctgtaatccaagctacttgggaggctgaggcaggagaatcgcttgaacccaggaggcggaagctgcagtgagctgagatcatgccattgcactccagcctgggtgacagagcaagactggtctcaggaaaaaaaaaaaagatagtagcattgagtggcagagtctatatgctgtctaatcccagctgctgggaggacgctcaagggagatgatcttcagtggtgttggtgtggataggagccagcacttgaatggtaccattaaattccaaatagatctgtgctttgttagaagggctgtgaagggatgaggaaagaaaaaagcactgagaagctctccttccccagtaaactttcatttccaattcaggaagccacttgcggttcacaaagaccaaaactaatctatcatattttcaaaccgaatatttaacactgtgctgacttctctgacatcactaggggagacagagattatgtgtaaagtgccaaactgggtcaggcagttccttgagaacatcactgccctttctcaaagaaatttcctcggtctaaaatgtagagaattgaatcagatggctttcattcacatttctctcagaggtttttaattaaagctcccaagattttggaaggattaaagaaaacttgtcagcatgtaaaacatatcactttttggtagggaacatgaaatgatacaacctttatggagaagttggcaatatctagcaaaagtacatgtgggttaccttttgaccaatcaatcctattataggatctatcccaagatacacacacaaaaattttttaaaagacataggcacaagcttctccatcatgtcactatttgcaatagcaaaagactggagacaacccagatgtccatcaccagggaatgggttgagtaaaggatcgccctccttcctctatactgatgtgtagaacacagtgtctgagattaggcagcctgtaggctctgatcttcctgttcatccctacattggacatccctcaaatctggcccctctggtcactgaagcaaatacaaatatatattcaccttcctctcaccctgctttctttctttcttttttttttaagacagagtctcacactgtcgcccaggctggagttcaatggcacgattttgtctcactgcaacctccgcctcccaggttcaagcaattctcctgcctcagcctcccaagtaactgggattactgatgcacactgccacacccagctaatttttttgtattttagtagagtcggggcgttgcccagactggtctcgacctcctgagctcaggcaatccacctgcctcagcctcccaaagggctaggattacaggcgtgagccaccacacccagccatcaccctgctttcttacagagaagatagccagttgtatacacattccacaccctgatacgtagaacacagtattctatgtatcaatgacagggaagggggacgatctccgtgtactgctatggaatgatctccagggcgtactattaaatgaaaaagcagagtgcagaaaaagcggatggcatgctatctattatttaagaaatatacatgtacttgcttatacttttttaaaaatggaagaataaaccaataaaaatatttacctgtatgtgtaggtaggaaatggaagagtgggtcagaggtagaagctagacttctccaaatgtgttttgttttgtagatttgactttggaagcttatagatgtttgtcttaattataaaaaaattaaattcacatggacaaaagtaatccccaaaaatcaagactaaagtgaaacaaacttatgtatcaagttggtggtttaaccacacaattatttcagataacttgaaaacacaattaatttaattatacatccctagtgtatatcttaccgtcaacgtgaatgccaaattaatcttgagctgttttcagtaatattgtaagtaaaaatgttgatagaactgtactgacactaatatatatccacacacacccacataaacatatgagtatacataataagagcaattatgttgcaatcattagaaaccaaaattttcagtatacaaaaacagtgacaattttaccatcaagatattaaatgaaaatcctgtaattctaaatttgaattggaaatattagtaagaactcctgatgtattttcttttaaacaaataaaaaaatttttctaaccttgtctactgaacagcctagaaataatgacaaacctagtagcagtaagcacctgtaacatccagattatggcctctaagtacattttttctgctaaaaagaaactaagaatccttagaaaaatgttgattccaggcctggggcagaaagtgtacaagatgagctggaatatcttgttgtatcagaaagcaaagaagctatcaaagaccacggtgtcctgtgagaagtactcagaagctaattgaaggggctccccctgtccaaatattgaacaatttgggcattaaaaataataactatagtggatttacatacatcaaatatattaacatgtgcaaaatctataagttaaaaaaattcagtagtttcggccgggcttggtggctcatgcctgtaatcccagcactttgggaggctgagagggaggaatcacctgaggtcaggagtttgagaccagcctgaccaacgtggtgaaaacccgtctctactaaaaatacaaaaattagctgggtgtggtggctaacccctgtagtcccagctactctggagattgaggcatgagaatcgcttgaacctgggaggtggaggttgcagtgagccgagatggtgccactgcactttagcctgggcaacagagtgagactctgtctcaaaaaaattttttaaaaaagaaaataaataaaaataaaaaaataaaaattcagtagtttccactatagggtgctggggaaccaactttcatcccctttgtcttcctcctgtcctccttcttcagtctctctctctctctctttttagagacagggtccttgctctgttacccaggctggagtgcagtggcaccatcatacctcactgtaacctggaccccctgggctcaagccatcctcccacctcagcctcctgagtatctgggactacaggcacatgtcaccatgcctggctacttttttttttcttttgtagagataggctcttcctatattgcccaagcttgtctcaagctcctggcttcggtgatcttcccgcctcagcctcgcaaagtgttggattacaggcatgagtcaccatgaccagtcagaaaattcttcatagaagaatgccgtctaataaatacagaaggaatgaatattagcattttgcaacccctggtgaataatgagtttagacaatgtggttgttaatggctactaagctgttaggtgcagctgatggcgttctttataatggagggatcaggctgataatattcaaacccactgatcgatcttaatgtcttggcaggcttgagatttaactaccagtttatagaaaatacaagggatgcaggaacatgtacaaatgatatcgggcagatgaatcaggtaatcagaaaatgggacatgctgcaggcctggtttccttaacaaataaattttaagaatcaaaatagcaggaggggttatctgtagattaaaaaggacttaaaatacttatcagcaaaatgtagtatataattcttgtttgggtcctagctcaaaacaaatctaactgtaacatgtatacatgcatgcatatacatatatatgataatctatgatatatatgataactaagatattatatttgaatagtgaggttaaagaattatttattcatgtattatttatttgattatgtgaacattaaaaagaatattatttattagttacttatttatagctgtggtaatggtattttgattatgttaaaatacagaagttggctgggtgttgtggctcatggtcgtccagcactttgggaggccaagatgggcagatcacttgaatccaggggttcgagaccagcctggacaacatggtgaaactgtctctacaaataatacaaaaaattagcccagtgtgatggcacaaagaaagaaagagagagagagagagagagaggggaaggaaggaaggaaggaaagaaagaaagcagttatactctagggttgtatactaaagtatagattaaatatgatatgtctgggattagcttcaaaataatgaaggggggtgcaaaataaacaagattggccatagattgataatttttgaagctgggtggtgagtacatggaaatcattatattattctctctacctttgtataatttgaaagtttccgtaataaaaagttaaacagaacaagacatcagctcagccacttggccagttctgttttcagatgtccttaaatttaatattgggctgtggagccgacagacccttcttaaaaatcacctgggggctgggtgcagtggctcatgcctgtaatctcagcactttgggaggctgaggcaggacgattgcctgaggccaatagtttgagactagcctgggcaatatagccagaccccatgtctacagaaagtttttaaaaaattagctggctgtggtggtacatgcctgtagccccagctactcaggagactgaggtaggaggatcatttgagcccaggaatttgaggctgcagtgagctatgattataccactgcactccagcctgggtgacagagagagaccctgtctcagaaaaaaataaaaaacaaaaatcacctggccagcaagtaggaggctgagatcctaactcacatctgtctggctccaaagctcacagtctttccatcttaccttacagaatttatgtctctcttggggctcaaactattgtaggattgtttagattgaggattatagggttttacaagcagctgtaatataaacatgggaaaattggggcaaggcaaatcaagaacaaaaactgccaccaaaacatcagagtcggtcttcctttgagggcgggaaatttatccaaggataagggaagaaaatggaaatagaccgcattcctcccactgtggccttattgggccctttctgttgccaccatcctgggctttggattgagagagatctgggttaggtagcacagcctgttacttaggatgtgtgtggtcttactgttctgtgccacagttgtttcaaccaacctcatttggctgttgtgaggatgacatgagattgtccatatgatgcttaccacagtgcctggcaagaggtgaggtctctgatgttcatttagaaaagaagactgcagtgcattcaccaagatcctaagaatcccaaggctgggccggagcttatgtgtttggacatccctgtgacgtgggtacccccactgaaccccatgatattctccagcactttcttggggaccttgggccaccttgcctaagtttgggatgatcatttagcctgaatgaggaggctcagtgctctaaggatggcattttttctacctggctccattttattttgtcatgtggcttgatgggcatggacagtggggaagatcctgcctcggtgggtgaatgaaagggactgttggttgatatctggcacagacagataggaagtgaagaatgtggcacatccttagactgcccgttggtgagatctgaaactaagtttctcatgactggactgtatttctttagctgctgggtgtgaaaagccccagacattggcttctgcttctttcaccatcattatgatttgtgggcattgatgctaggcctggaatccctgcagcattcatctctgctggggttctctaatacagcggctgagaacggtgctaattccagctgccagcatgatcctccttccctggcaagagggagccccgctcagagaacatttaaataccgtagaaccatccctgttacaggtttcctttgggatgctcttgacgcaggaaatatggcttattctcataaatactttgagatgtacttcagtttctccaaactttatgcataacaacacgactgtaacaacaaaaagggaaattcttgaaagaaaaaatattagcagtaatctctttgtcagattgttatttttctcttttgtgttccttccttttatttttggtcatgtgcatatattttaaagtatcacacatggttttacattctattttcctgttaacattatgatgtaaaaagacttttcttgcagttgcatcctcttcataatttaatttttcatgatggcattggcgctgccaaagaaagtcactttcccatgccaggagaaaagaccatctctcctgtggctgcctcgaagcccccaggcctagaaacgtctccaatcaggaaacagaagcctccagtggatcatcttcagggatcgctggagaaccacgtgggcatgtacacatacctcctcactgagctgacttacccaaagttattattcacctactgatggacaatgatggttctagtttttctgtcttatcaatactatagtaatggctttcttcatgcatgtcattttggaatattttctcagaatgggattattatttctaagcgtatgaatatttttattgcttttgatatattagccacattgctttacaataaagttgtacctgtttaaaaagttagcagtaacataggaggatattggtctcacaataactaagcggaaccactctgcccagctttgaattccagcttgacacttggcatttaccagctgtgtgaacttctgcaaagtatttaacctacctgtgcctcagttactgcctctttaaagtgggagtgacacagtacccacctcataggtctattattgggaatgagtatttgtatattgctcagaacagtgtctaccaaagtattatgcattgtgcgctcgtgaaacaaacacctctccagctcaagattttttttaaaaaactaatttaatagaagtaaaatgacactgtttaagatatatatatatatgtatatatatcgacatgcttattaaccgtatttacaagaaacactccctttaaatctctttattggtaaagatatcttttaaaatgttaatttacagaagagatccattctggtgtgattattgatattatgtaggaattctttttcagcttttacagagttgctatccctttagggtggagtctcatcaccaaaatatcacctgggacccgaggtgctgaggctcataatcagccacttagctctgaagacttcaaattcaccccagagggacaaacttagggggtattttagggccctattagggactcttcttcctatcttgtccgatgacggctctcggaggctcctggttttgatgtctggcattgcttttacccggtgggcttcagggagccgtccctgccgcgctttgcgtttctccgcgcacttggacagggttctgccacgagggaggcgatgcctggcgccgcgggtgggggcagtggtgagacttcggcccctggtggccggagaggtcgcagcacttgtcagtttatggctccctcggctttccccttcttaatccgctttctgctgagctctccgaataattcaaccctcgtgtttgaaaactagaagcctgagaggtctcagcgagacagtcaaaggggaggctcccctcgccgagtgtcacccgggaccctgcgtccccgctctgcagagaccttctctccgggctgctgccgtcctccctcgcccggcggagcttccgtgatcgtcagccaaagcccccggggcggtgcgccgcaggcggtcttcccgggtgttcgcggaagctgcgcgctcgcgcccccacggttctccagcgacccctgaagatgcttccgtccgcggataggggacgtttcagacctggggtgggcacagcggtccccggtgagatggtcttttctcctggagtgggaaggcaactttcttttggagtgccagtgcccccagagtgctaggttgtaccgtggacttgtacttgagtttttcaaataaagcttgacacatacttagtatagagcagtagaaagcagggaggaaaaactcgtcatgggtccactatctaaaatcaactgatatttggaatagttcctttgcttttttgtctatacatacgttagatttattttttctagtttttaattgtactatgaagctcaactttgaactttgcattttttctcttattattattttacaaacatacatactggctgcataatattctgtcatgccatatacagccactctacttttgaatatttaggtgtttttttattttcattaaaaaattctgcagtaaacatctttctggctaaaacttgtttccgtattaggttatagtctcattatcatagggcagagtgagaatgtttttaaggttcttgatacatattcctgaatggcttttctttcttttttcttttttctttttttttccttttttctgagacggagtcttgttctgttgcccaggctggagtaccatggtgcaatctcagctcacagcaacctctgcttcttgggttcgagcaattctcctgcctcagcttcccaagtagctgggattacaggcacacaccaccatgcctggctaatttttttatttttagtagagacagggtttcactatgttggccaggctggtctcaaactcctgacctcgtgatccacccagctcggcctcccaaagtgctgggatcacaggcgtgagccaccatgcccagcatccaaatggcttttcaaaaaatttgtataaatgtttactcctgctagctgtgcttaagtgtttatttccggccagcctcaccagcaccaggaattatgagaatactcttaagataatgtcactaaggccacaggcgaggagagcttagaaggtactggctgctgaagtctgtgtgatctgaaacctagatgtatattctgcaatctgcttgtttccaactccccacattctgaggacagtggcctatattgaaactggaggaatgaggtttacttgtgtttcagggattgaagtggtactagaggttgtgttggattgctaagttcagagagccatcagaaattgttatgagcttgagtcacataaaaatggaatatcctttactgtgggtggcatagctttttagggttggcttcctaaacattttggggagaatgaatctaccagcagagaagctttcctttggcagtctgagggtgtatcttcctgaggcaaggccagacttgaggatattctaatcctccttcctgcatttttatattgcaatttcttgccaaacttgctgcctgaagagagacgatatctctttaagggtgcattttagttcatttgtgtgtcaggtgggtgggaagtaatataaaactcatttatggctactcagtctgcaaacatattggaaggaagggctgggctttaatatctgtgtaggatggaagtcatttttgagttatagtcaattcttatgttctgtaaaatccattagaaaacctgtacccgtatcagttcacatattctgcacctggctctcctgttcatggggaattgcttacaacagggaactcttaaaaccaagactgctgtttttgccccactactttcaggttagagcaggattccagtgtcctgaagtttaaacacattctgagcatcctctgagaatcattcccaattccaagcccatttccagacgatgagcagacttgaattacataacctgtagctgcacatttttgtcgtgaccacgcaagctcaataatgtctcccaagtcttgtagatcactttgaagctcactggattaatggtgttgaatctgtttaatccaaataatttgaattgcatcaggaaacctgcatattaacaagctggtaataagtgcaggcgttaagattgatcactgcttaagtcttcaagatcacatacaaggtctggtgtttttgaggctgtcgatgtactatattttttagattctttcttgatttcattctgcactcttgacatttaaaataatttaaatcaataacttcagaattctcccaccggaggatatgcctatttgatgtgattgtgtgtctgtgtgtgtgcacacactagctctgtattattgcctatggaggacatagaaatatatcatatactgtcctcaaggagcttgcaaccaagttgtggggataaggcaaacaaagtcaaaatatctaatacacgttccaaggcaggatgcaattctgtatccatggtacattgctgattgctgatgatgctctaaatgctgactctaaatggtggactgcaatttgtctggaagaagaacaatggatcatctgtgtttgggggagacttcatggaggtgggatttgggggagccttgaagaagtgagcaagttttggataggtggaagtgaacttactggctatacccggaaaagagcaggatgggaataaaggaaaagagagcctgttttggtgaataagtttaatattgaattgtgatagtcaaaaaaataggtaggatgatgggctaggtttgggaggaggctccaaagttaagaagcgaggcttatccttgagatcatggcctttaccacaaccagcaccatcatcattatgagcagctgtgtcttgcattcttataatgtggttctgaggactttacatgtagtatcttatttaatccccaaacaaccttatggaacagataacaattgttatgtccactttatagcagaggaactgggatataaagaagtcaaccaacttccagcgggtaaggtatgtgggcaagcaggggttcagatgaactgaatcaggcagcttgctttcagagtctgttcttcaccactgtataatactgtctcttggtgcttgttgaaagcccctgttgagattaacatagtccccctcaagttctaagggagccccgcctttcaagtcagacagacctgggctcacattctggctctaccacttaccagctgtgaccttggaaattacttctctgagccttgatttgctcatttatgaaaaaggaagaatatttacctcaggttgttgggagcattaaatgtgataatatatataatcatttagcagaatgcctagcagagagtaagcaggcaggaaatgatagctgctatggcttatatttcacagatatatgtagggttataatgcagtctctgagaatgagaagcagtgagggtggacatgatttaggtagagtttacttggtagtcacctgcaatgataattagctaacggatagtgggcgctggatttcttcttctggagcatcccaggaatggactatgaattccagatgtggttctgctttgctccaagaactgactgcatttccttttgtcttctaaaacccagagggtgaaaccaggacatttccattgtactgaaatttggcataaaatctggtgccaattgtacatcccaggggctgaaatcaggatatgctgaaattcccagtgtcctcgctctgctggttcccacttcctgacggcgctgacagataagtgccctgcatctcacagagagagaaaaatagatatttggaagtggtatcttttattgcctataaagttaaacaatgcacgaaacaattataaccaaggcagagacgtttagacaacatgcataaaaggaaaaaaacagtggaagagaaactttgctctaagatgaaatgctaattctaactatcgctctcagaatttatggggcaacatcacttagtacttcttacacttgcgttcctgcacatttcaaactgttcatatggtagtttttcttctgtatgacattctgcaattgtagagtttttctttatattacttcattcacaaatttcaaaattcacaaagtgtctatcaattaggaagaacaacttcttgtacttttctgatttgcagtctccttggttgtgacaaacctatttgttcttgtccctgtatcgttgatataatccaacttggcttctttggaagcaacaaatgctattttttttgcttcaaatccaatattggtttttaaatttgtggatgcaagaggctataaagaggtttaaaatatatgtagcttgaaaatattaatgtttttaaaaaatctcagagtcactttagaattttaaaattttcaagtaaggctgcaatcagatagatacttgtagactgtcttaggctgttttctgttgcttttaacagaattcctaaaacaggataatttttaaagaaaccaaaatttatttattatagttatgggggctgagaagtccaaggtcaaggggctgcatctggtaagggccttcttgctggtgggaactctgtagaatcccgaggtggcatagggtatcacatggtggaggaggctaagcgtgctagctcaggcctctctcctcttataaagccaccagtcccactctcataataacccattaatccattaactatgaatatgttaacctataaatggattaatccagagcccttatgacccagtcacctcttaaaggccctatctttttttcttttttctttttttttttgagacacagtctagctctgtcaccaaggctggagtacagtggctccatctctgctcactgcaagctctgcctcctgggttcacgccattctcctgccgcagcctcccgagtagctgggactacgggtgcccaccaccacgcccagctaattttttgtatttttagtagagatggggtttcaccgtgttagccaggatggtccctatctcctgacctcgtgatctgcctgccttggcctcccaaagtgctgggattacaggcgtgagccaccgcgcccagccaaaggcctcatcttaaaggggacaaatattcaaaccatagcacagaactatttggtgctaaatggtattttgggaaaactggagtgttacatattgtttaatttttccaaatttctgataaaacggaagatcttagatagttggtgtgttcgatgggcatgtatctcatgttacttgtcttcatgttgtagacatctctctaaaaataatgataccaaccaggctggtaaaatggctttctgaattgttttactcgagtcagaggggatttgcaccctctagatgttgctccttcacagcttaaccctcggggaacttcatttttaattcattcaactgaaagaagtatttactgaacacctattatgtgctaggtgctgtcttaggtgctgagtgatgaatggaataggtaattcttatggatggagcttcctgtctagtgaggaaaactaacataaaccaaaaaaataggtaactataaaacataaactgggataaataatattaaggaaaagaaaggatttctttcaaccttatctttcttatagacaatgtggggaaatagagctatgggagtactcaaaagtttatccacacaaaacaaatccctataaaaacctaaccaaagagcaaagattaaatgtaattatgcaaaaaaatgtttaggtgtcaaggcatttaaatacattactttgccattaagtggctatgagggtgtcactaaatggaattctgtttcaagacgtacttgagctcatagcatgttgagaccatgatcttctcataatttggttcactttgattaaagcagcatcatgcccactgcagcatcatcagagaaaggatctcctgagttaaggacacccatggaaagcatcctattgtgtgatttctcccttattgttcatttctgggaaggtacagtttggttttggaaagcactcttgagtgtgcaaggccgggggagtctggggtctactcttcatcctgccacccactcccttgatcaatgaacttggcttctctgagacttggagatttggtttccacatctggaatataaaggtgttgagcctgatgaccttgaaagatttttctaggtctaaattttattacagaagcagtgggcaataggagaatgtttggtggtagattcacttcatatctaatgaagatgtgacattttcatgatatgctgcagtagagggagcactggtccaggagtctgaaagttcaagctcagcaatacagagacttttggaatgacttggtttatgttcattcaggcctggagcacagatgggttcatgctttgctgcaacccacacttggagataaagaggctctgcagtggtttaatatgcaggttctcggttcaaatccaggatactctgctgaggagccatggagacctgggcaggaaacttggcctcctggagcctcaggcttgaatatatgaaatggagcctctgcttcttatttataagtactcctgtcttcctcccaaggttggcactaggatgaaggctgtataaagtgattagcacagtatctggcacatagtaagtacccaataaatgctcattgtcctttttcttcttttttttatttttaattttttttagagatagagtcttgctctgttgcccaagttggaatgcagtggtgtgatcatagctcactgcggccttgaacgcctcggctcaagtgatcctcttgcctcagcctcacgagtagctgggactataggcacgagccaccatgcccagctaatttttattttttgtagagacagggtctcactatgttgcccaggtgatctcaaactagtggcctcaagcaatcctcctgcctcaccctcctaaagcactgggattagaggcatgagccaccgtgcccagcctcttcttgttaataattatcatagttcctgttattgcagttcttaagctgggcacatcatgtaagcccctatgttttggtttcctgcttatggtgtctgcctcatggggttgttttgaaaatcaggtgtgactttatgcaagggctttgcgagcccctggatcctctctgaagggctgggcaggcaaagccacaggctggcagtctgtctgtctgcagcgtggctgtttcctgagagagggcttggctgagggctgggaggcaggtccgccttcctctagccctgatggactggggcacatgcagacgcacttcccagccaggcagacagacccagcacacagatggccacagcggcattcacttggtgattgtcattcacagctcatgccatctggtgccagagacggtcggcgggcacctcaatctcagtttcatccctggactgacactgccccttttaacctgctcttctcatattttgagataagggcacagtaggacagcactgtttctaaatgactttaagaacaattatttaggctaattaaaaacaatgaaacccagaaactgtgagtggtggcattagagccgggagccgggcacctgttgtcatgcaggctgtcctgggggagagcaattagtttgtttggcaaaaccactggaatgttcttggtgggggcggaagttcaagtttggagtgggtggtgggtttgctccttggatgtgttgcctccttcggagcagatggagtcgaaagaattttcagagtggggaggggtggcactggccagggaaggcccacagggctgttttccctgtctgaatggtccattcataaaattgcctcctctttcttctcctgatggcactggccactgcctggtttcccccatctcaggggttcggttctctcaaagctgggggaggaggagctcggtcagctaaaaaggtggtaggagcctccttctccaagtctcatctgttctcctgggctggcatgatggatggcctcgggctgctgggttgtgtgttcagtggcgagccaggatttgccaagggtgtttggctagctcggggactgacacatacggctaactagcgtgggctgtggtgcgctgtcacgcaatgcgtgtcacctgggggcggggagggtgcacgcctgggggaggctgtgacccacctttcatagtggggcttggcaggaccttctccttcaccccagctttgatgcacctataccaggtttgatcagtaaggttggaggaagacaggtgcttctcgagggtccgtttgctcagctgcttcttgctggggacagctgcacctccatatttccttcctgtttctctcgtgtgctcccctctccccactcatttccatttacttctctttcttttccacttctttcttcttcagtctgtctcttattctctctctgtatttttgcgtaattacagacatgacttgttacattcgtgaaaaatcttaagtctgcctggatggtttctgtctagggggcacttgcttgatagaagagaaacaggggcaccttcttctcgcacattcctcactgaccatgcagggacagcctttgagcaaacaagggagagacctctgcagaaggcatttcactcccttgtcagggctgtgcgagaagctggtgacagaactggcccggaatcccagggacacactgtctccccctgctgttagaccacgtctcctcgcaatagggtctgcaccaaacctcctcctgccaacacttccaagaaaatcttcacatccacctatctttaagggttagtttaagctttgagaaatggcacaagagagatttagatgtctaatttcatcctcttgtttagtactttatatttaagtacatgaaaccctaaactgtaaggtatttgtaaaggcagtattggttgaggcatgctctctgctaatcttttctgccttcaggtcactggcttgaagtgtcagtgaccttggaattatttttgcagttgcttttaagccctgtaaagacaccattggaaggttgaggctggcctagaaatggcagctgctgctgctccccgttagcctgaggtcgggtgaggagttcatcacaattactgtttaactttttattttaaaatgattttagacctacagaaaatttgcaaaaatagtgcagagagttcctgtatgctttttacccagctgcacctagcgttaacatcttggataagccatgatacatttatcacaaccaagaaaagaatattggcacactattaataaccacactacagacatttttcagatttcaacagtcttttcattaatgtttcctttttcttttccttttcttttctgcttttttttttgttgttgttgttgagacaaagtttcgctcttgttgctcaggttgcagtgcaatggcatgatcttggctcactgcaacctctgcctcccgggttcagatgattctcctgcctcagcctcctgagtagctgggattacagttgcccatcaccatgcccggctaatttttttgtatttttagtagggatggggtttcaccatgctggcaaggctgatctcgaactcctgacctcaggtgatccacccgcctcggcctcccaaagtgctgggattacaggcgtgagccatcacatctggccttcactaatgtgtttttctatttcaggatgcaatccaggatcccacctggcattcgttgtcatgtctccattagcatcctccagaatatgacagtacctcagtcttttcttgtttttcatgaccttgacatttttgaagagtattggtcacttattttgtagaacacagatggagccaactttttctatctagggccagatagtaaagagttttcgctttgcaggccacatgttctctgttgcaactacccacctttactgttgtggcacagatcagcctcagacaatatgtaaataaatgaacatggctgggtctcggtatgacttcatttatggaaacgggcaaaggttcacatttggtccttgggctgtaatctgccaactcctgttgtgaaagattcctggatttgagtttgcctgatgtgtcctgatgattagattgaggttatgtgtgttggaagaagattcccaaagaggggatgtgcccttctcagagcatcacttaattgcttgcttaaggtggtgttaactgtaaagttaaaagctgctattttttctttgtaattaagaatatttcaggggagctactgtaggattatgcaaatatcctgtttcttttcaaactttcacctgctaattttggcattcatctgtggagcttgcctataatagttatcattgtcatattctaacagtgattttccatttcagtcattccttctccatttattatttggaattcttctgtaaggaagagctgttgttccttcttcctcgcttgtttatttatcaagtatttatgtcagtatggagtcagatatttcttttactttttgggttatgatgatcacaatttttgattgtgtcattgatcacaatttttgattgtgtctaattcttgtgatcaagaattagatgagagcaaaaaatccaaaagtggttgctaagtgttgggctttttttgttctcatcgaattcttgaccaccttcttgatttcatagtcagctttattctaattacaactttgtgggcagccggtgccctaagacctaataggtctgaatttcatgaacttgttaatggcagaaggcagttttattttttggctcaaagcactggtcagatttacaatttcaatctacaacacagctggtgctggttgagttgcagtaagagtgtccgcattagagcgattggagctggtaattggttttcattaattttgtgtgcaagaggagattggtaatgttttctcgtaaatgctaggtcaggtttgcattttgagagtggttccagttattatctctccctatcctcttattccttaagagcttcctttttgttctgttatttgttggggaaggttatttaagagtttaaaaccttgcttcagtgaagagttaaagcgaattgagttttgtaacttttacttgctcatttctagattaaattaaaatgtcagtctaaatgattttgcctcaattggagagccaatcaagacttccaattcaactttcaaaagctatttgacctgttttaaaaaacaaaatgaatatgttgagtcagttttttaaaataggagaaacttctatttctatctacagttgaaattattcttaaggtaactgtatggaagattagtgaaatgattgatgaatgtggcttttatgtttttgtgggttctttagatgatttcagaaacttgtagctctttgctggaagataatggaagaaaaagaaaaatcaagttatatcctgtgactaagaacagagttgtatgcctcactctgaaatatttttaattaactatattttggggcggcgggagatgagtaaattcattcagctcttaaagaaagtcatggaaataatttttctacagtgtcaaggaaaacattgacagacaagaattgtcatttgggatgggcgcagtggctcatgcctgtaatcccagcactttgggaggccgaggcaggtggatcgcctgaggtcaggagttcgagaccagcctggccagcatgatgaaaccctttctctactaaaaatacaaaaattagccgggtgtggtggagcacacctgtagtcccactactcaggaggctgaggcaggagaatcgtttgaacccgggaggcagaggttgcagtgagccaagattgtgccattgcactccagcctgggtgacagagtgagactccatcttaaaaacaaaacaaaacaaaacaaaacaaaacaaaagaaaaagaaaaagaaaacagaaattgtcatttgcccaagatattgttagaacaaaaccaaaccaaaacaacacaaaaaacaacaaccaaaaaataatatggggagtttctgatttgtcttggtacagaattaaaagcctcataaactacagcttaatttccaccctctttaactaaagaagtatgtgctacaaaacactgtagaagttcaggccagtttccactcataatgggaaattgcatgcaaaattcaggcatgctgttcctacttaacttgttcatcttgctccattgcagcactggatgaaaagtgaggattttaatactttaaaaaaatttacaagagaaaatcgtagactttgtcaccatgtgtttatttcactatctgggatgcagcctaaataaagttatgagtcagatgtagacctcttgaagcttgggagcactccgccggccctgccctgccaccacgcacacacaaaatgtgaaggagacaagtaaagagaactgctggtgaaacagctggatgattgcggtggatcctaacatcttgagaagtgaatctgtttgcaaaagctttagcacaaggagagcgatctgcctgaattgcggtagagagtgttgtttgcgcatttgtaaaacgaggcgaatgacccagctgttggccgtaggggcctttgctgtccttcctggggtttgtggtcgctgccgaggatcagcactttcacacgcgaccttacgcattccttgtcatcttgtccttggcgggcctgtcaaaaagaagttattttgaaagcgtatcgctgattgcacattttattccataagtgctcagcgcgtttcatgtaactcctggaggcctctgagataagagtggaaaagtgccctgtgcccttctgagtggtgggtgatctattttcgacttggagactggtgacaaagctgtcttctgtcaggtcagactcgcagggactttcttgttttctgttcctctgttgacagctgtgcctgtgttcagaatggtcatggggtagctggaagatagctctggcatttaaacacctagataggaaggagacgatggaatgtatttttctttgctattttggttagcaagtccctagtagtccatactgagaggggaagaagcagagagacctttgggagggcgggcaggaaaagatgtccaacttcaggtttagaaggcacagagggagttctaccgttggtatatggtataggtatttttaatgcctagaaagggaatggctggaaggaacatgaaaaataaaggttggaattgaggtagccttgggcgggagggtcgggaggtgggttcgggctaacgtgagtaacaagatcagggcaagactttttttttcggtatgctttgtgaaacaaattgaaactaacacactgaaaattgcatttttataatgcttttacataatgcaggatctttgttttaaaagcacagtgacgcaggctgacatgataggagaacttttaagagaccctttaaatcctcacaggtatttaacgtaagcctgagcgtatagctcggatggggatcagtttaaatgctatatgtattcccagcatcttgcatccacattgaatagctgtggagctttgacaagttctttaatctcacggaccttacttttctcatccgcaaaatggagcccagtccattcctgcttcaaagggctcttgtgagggcccaaggtacagcgctacatgacaatgtcgtcatgactctttaaatatcctatgaaacctgtgatagaaacttgggctctcactcccagatcttactttccttactctttattattactatttatttatagtagctagtgactaatgatgaatgattcttccgcttggcccccctatagttaaggtcatggcttccttcaagaatctgatggaagtatgagcctccttcccccgatcccacccccacacaatttagcacagaatgccagtaattcagtctgaagcccagttaaaactctctgattttaatgtgctttttaaaaatggaaattacacatggtagcgcacgcctgtagtcccagctacttgggaggctgagacgggaaggttgcttgagcccaggagttcaaaggctgcagtgagctaggatcccaccactgcatccagcctaggtgatggagccagatgctgtctctaaaaaaaaataataaaatataaatggaaattacaattttatctaagagatatttttacagatgtctggaatttggaaatttctgcttataggcatttctatccatcatttatttttacagtaaaagaaataggccgggtgcagtgactcatgcctgtaatcctagcactttgggaggctgaggcaggcagatcatttgaggtcaggagttcgagaccagcctgaccaacacggtgaaaccccgcctctactaaaaatataaaaattagccgggtgtggtggtgcatgcctgtagtcccagctactcgagaggctgaggcaggagaattgcttgaacccaggaggcggaggttgcagtgagccaagatcatgccactgcactacagcctgggtaacagagcgagactgtctcaaaaagaaaaaaaaaaaaaaagaaaaaatttgtgttccttgtataagcacagtgcttttctagtactgtcccagttcagctgcctatggcaagattgtaaactatgaaaagtaagaatgtaaattaaacacagtgaaaagctgagtcatatggtaatgtctagaaaagtagtaagatactaaaagtatgtaagtcaaagaggcccaaattatattttcctttccatccttaaaatgtcatagctaactagagggttaacattttttaagtgctgagtccaatcaatgtgatttaaatcatccatgatatattcatagctgaatgattaagttggatgatgtgacaaaacacttaacttgtatttatggtcattgatgattttacgcattattagagagaagcatagttacacccaattaaatatagacatctgatccagacatcagttctgtaatttcatgggaaaaagtaaatctaaacgagcaaaaaatgtctgggtattaactccagtctgatggtattacaagttttcccagttaattagtaacacatattatagaacaaatgtttgaaacagaaatctcgtgattttgcgtaacaaaccaggagttgagctggaagtctctgttctcccactgcgttgctgtgtgaccttgggcaagtcacttgaccattgtccacctgtgatacaggggatgtgactacatatctcgaatgagaaaagacttcttcccatgttaacatgttttgactttacatcaattgtgtcattgctgcttttttaaaaatgttgcatcaacatttacgatacatataaaaaaggtacacaaattttaagtgcatagctcattgaatgtttactcttctaaccagctcctagattaagaaataaaacatcaacatcctagaagtcctccttgtccttcctctgggtcatgagtgctactcctaaatggttttgtgtgtgtgtgtgtgtgtgtgtgtgtgtgtgtgtgtgtgtatgtgtgtgtatgtgttttaaaaaggagagagagaaataatgagttgataatttttagaaatttggtggtctaacaaattaaaaatcaaatattattcatttggaatcctaataatccagtccacaattccttatctgcagttttgaaatacaaatagctctgaaaacagagaggtttttcttaaagttttgagcaaaagtatttggcaacaaaatctgacttgataggatgagaggctgtttgcagtctttatttttaatctcacatagtgtgactatttatgcattttactcaagaaatgttcatgtgtttaatgctatggttctggcctggactctactgggttcaaagtctagcacatgcatcatacttgtttgtttttcaaaataaaaaagattctaaatttcaccaaatttggccctaaggatttcggattcataccacaacataattgtttacacgttgatgtcccaacatttttactgcttagatttgtatgatttttatctgaaaagtaaagcagatatagttctagttaactgcttggtgcattatcaaacatccttcttccaatcctgcatttaaaaaaaaagcactgttactttgcaataattttagatttactaaaaaagctacaaatcaagcacatagagtttccctaacttcccctaatgtcaataccttacataaccatggtacatttttcaaaactaaaacattattaatgttggtacaatactattaacaaactatggacattattcagatttcttcagttttcccaccaatgtcctttttctgtttcatgatcctacccaggatccaacatggcatttagttatcatttcttcttagtcttccccagcctataatagcttctctgtctttcctgtttttttttttaatctcctttacagttttgaagaataataggatcttatagaatggcttttaggcatttttttgtttgtttgcatgtattttaaagtttttaaaaattaaactttgtattttgaaataattctacattcacctgctgttgtatgaaataatatagaaggaccctgtgtaccctttattccgtttcccccaatggcaacatcttgaaaaccatcacctgatatcataaccaggatattgacattgatagaatcaagatcagtagatcctccaaccaactcaactcttgcactcccttggttcagcacgtgctgactggggcctcccatgagtcaggctctgctggaggcctggggacacaggggtgagtgagagacaaaacctgccctcatggagcttagcttctaggaaacagacatagcaagtaaacacatgcacaaacagtataatgtcagctaatgagtgctatgaggaaaaatcaatcagactaaggactcagagaaagttggaaatccatgggccagccttccctttcagctctattggccggagctcaggggcaggtgcctgcttttgatgggagaaaatatcagtaacagtttaattggtgttttacagttccatcatgtataactattttatatctttgttggaaatccacacggttgttctgtgctggtagtgcgggtctttaaaaatctagggagtttgtttgttgggaaattccgtggaaagccttgtttccgatgcttctagtcccacagtgtagagtccctcctgttggtgatggcattttgtacatttagtgacaattggcatagagtataaagccttttacaagtctaaagtagcagtgtttctatttcttggtattcttcatatcatcaagaagctgtgacaaaatcagagaggtagaagccagggaagattctggattgcatatatttagatgggcttttcatctgattgtcaatttgtgtcactcataaaagagatatcttaattttaagtgcttccagaaaatgggaatgaaacaatgcttaaatagggccttcagatcaatttatggaatgatatcagttatcttaaaaaccctggaaatgagtgatttaaaataaacaactatggcctttttttattgtggttaaatagatacataacctaactatttttaattgtacaatttgactaggcatggtggcacacacctgtaatcccagcactttgggaagctgaggctggaggattgcttgacgctgggagttttagaccagcctgggcaacacagtgagccctcctgtctactaaaaaaatttaaattagctgggtgtggtggtgtgtgcctgtagttccagctacttgagaggctgaggcaggaggatcgcttaagcctaggaatttgaggttgcagtgagctgtgatagtgccactgcattccaggttgtgcaatagagcaagaccctgtctcaaaaaaaaacaaaaaaacaaaacctgtacaattcactgacattaaataggttcacaaagttgtttaaccacccacactatttccttaactttttcatcacccaaacagaaactctctacccattaaacaaaactccccatgtccctcttcccccagctcctgctaacctctaggctactttctgtctctatgaatttgcctattttaggtatctcatataagtaaaaccatacaatatttgtcctttttgtctggcttatttcatttagcatcgtgttttcaaggatcattcatactgtagcatgtatcaaaattgtattcctttttatggctgaataaaatatactttgtaagtacaatatacgtatatatcacattttagttatccattcatctgttgatggccagaagcatcgttttcaccttttggctattgtgaataatgcttccatgaatgttggtgtacaaatatttgagtccttgctggacttgaaagacctgagtcaatacttttgggcatatacctaggaacagaattgctggatcttatgtgttatggactgaatgtttatgtcccctcaaaattcatatgttgagatactaaccccccatgtgatggtattaggagatgaggtctttgggaggctgtggagccctcttgaatgggattagtatccttatgagaagagacacgaaagagcttgctcttgctcttgctctctacccataccatgtgaggatagtaggagaatacagtcccaagttagaaggagtgctttcaccagacaccagatctgccagtgccctgatcttggacttcccagccttcagaactgtaagaagtaaatgtgcgtgttcaagcaacctggtctatggcaatttgttatagcacctcgaattgactaagaaaatatgataattctgtggttagcttttgaggaactgccaaactgtttcccacagtggctgaaccattttatgttcccaccagcaatgcaagaggattccaatatctctacattctcaaacacacttgttattttgtttgtttttattatggccatcctagtaggtgtgaagtagtatctcattgtagttttgatttgcattgctctaatgaccaatgaggttgagcatcttttcatgtgcttattggacacttgtatatcttctttagagaaatatctgttcaagtcctttacctgtttttgaattgaattttttgttgttgttgaactgtagaatttctttatgtattcagaatataaccctttatcaagcatatgatttgcatatattttcttccactctgtgtgttgtctttttactctcttgatagtgtcctttaatgcatgaaagtttttaatttttatgaacttcaatttatttcttttttcttttattgcctgcgccttttgtgtcatacccaagaagtcattgccaaatccaatgttacgaagcattccccatatgttttcttctaagaattttatcgtgtaaactgtagtttataatctcaagttctggtctttgattcctttttgcatattgtgtaaggatccaacttcattattttgcatgtggatacccagttttcccagcaccatttgttgaaaagactgtgctttccccattgaatggccttggtacacctgttgaaaattgatcatatatgtaaagatttttttttctgggttctctattgtattctactgctctatgtctgtccttatgccagtaccacactcttttgattactgtagctttgtagttagttttgaaatcaggaggtatacatttcccaactttgttcctctttttcaagatttctttggctatttgggatttgtcccttaagattccatgtgaagtttaggataaatttttctatttctgaaaataatgttattgggattttgataggaattacattcaatttgtaggtcacttacaatattaagtctaccaatccatgaacatggaatgtctttccacttattttatcttctttgagtttattcagcaatgctttgtagttttcagtgtagaagcctttcatctccttgctttattcctagtttattctttttgatgctattataaatgaaattgttttcataattttctttatggattgttaattactagtgtgtaaaaatgcaactgattttatgagttgatattgtatcctgcatctttgctatttgtttatgagctataaccattgtgtgtgtgtgtgtaacttgagggttttctacatataaaaccatgtcatttgcaaacagaaatagtttgacttcttccttctcaatttgaatgcttttcatttctttgtcttgcctaattgccctgtttagaacttctagtattatgttgaatagaagtggagaaagcaagcattcttatcttgcttctggtattaggagaaaacttgcagttttttgttttgttttgttttgttttaccattgagtatgatgttagctgtaggtttgttgtatctaacctttatcatgctgaggaagttttttcttccattcctagtttattgagtgttattgtcataaaaaggtgttgaattttgtcaaatgcttttttgacatcgattagatgctcatgaggttttcctttttattttgttaatgtggtatattacattgactaatttttttatattgaactatctttgcattctgtgaatgaatcccacttggtcatagtgtataattctttaaatatgctgctgaatttggtttgcaagtattttgttgaggatttttgcatcatattcataatggatgttgttctatcatttttcttttcttgtactgtttttgtcatgctttggtatcaggattatattagcctcatagaatatgtaggaaatgttttcttctcatcaaatttttggaagagtttgagaaagattggtgttaattcttctttaaatgtttggtagaatttaccagtgaagctatctggtccagggattttctttgttaggaggtttttgattactgattcaatctccttatttgttatcggtcttttcatattttctacttcttcatgggtcagttttggtagattgtatctttctaggcattcgtccatttcaaacgtgaccattctaaactaaactgttggcaaatttgttactactgtctgttttattgaattactttcttgtcttagagtgaaactctcattttaaatgacatgttatttctttccaaggtaaagtaccaaggaacatgaggcttttgcttgtatatatgattgttaatgtgtattcaatttttgccaaatatttaataaaatattttactatatgtcttttgactcattaaaagtgggaaatctcatttgtgtataagattatcaggctatataaaaatgattccaacataccagagacatagtttagattacagggcctctgtggagtttttggtaaaatatcattattgactcacaattatcctcactcttggtaaactgactgcttttatatggtccttagcccatttaatttgtgtagcagaatgaaccagtgttatatttggctcaaatttaaatttctccattttcttatcagacactgggtcagagagagctaagagaagcaaccagcatcagtggggcacaagagctttgtgactttcctgtgtgcttctacctggtcttcaggatgggtgtttcctggtagacagtcattcatgcaacaagcatttgctgccctctaccaagcaccgtcttaaccataggtatcccaaccatgcagaacacagaagcgcacaaagcagacaactccctgtgctttgggagaaccaatgaacccaatgaaccgaatgaaaccaaagccaaaaggcagccttgatcccccaaaagaaattgattctgtaacccaaattgtaaagtttagagctttgtatttttgtcctattaaagaactgaattcattctcaggcactgccatctttgttggggctgggctagctcttatgtcaaaagcttgagcagccacttttaagaggaaggggactacgatgatgcagtcagtaaatttgtgcatggccttggaaaccttccagaattgtaagtgaaagctgatattctctccacagaagaaaatatagcaaaatgggaatctaaccatttcattggaacaggagattggactcaagttactaatacaggaaaaggcaagtagagaagggttgaggtttgaattctgagcagttctgcttgaggtgcagagctgatgatggtttgggttaagatagcaatttccaaaccacagccctcttgctaacagcaaactggattataccataagaaggcaactagttcagttagaacataccttagtattacattttaatcagacaccacaaggagctgactgacgtttaactccagagttgtaacaattttgaattgttgaattcaaaattcaacaattttgaattttgcccaaatttaggaaagaattggagtaagtcaggctagtggcctcctatagcaagtcaggaaagatatactagcagagtatagtgtcatgtctgtggttcaaaggttgtgtccttacctcttgagttacattttgattgacagggcaaaactgaatttttcagatattgtcacttcaaaggattcttaaaactctgccacaggattgatttttgttacgatatcgtcaggcagtgagtgagatgacatcctgaggtgctgaaatccttaagttttctggcccctgctgagtggatgacccaaagacccctgcagtttaactgaggtgtttattcatctgcagactggaagccaaggattggaaatttaacatgaaataaataattaaacctcacttccacaggtgcagagggcataaataatctaactgcatgctgcccaggcattccatagcatgggccatttagatttaatgcccaggcactcacttgtaactgaatatgtcggaaggtggctcctgcctgggatgggaacgggtgctatttcagagcagtgtgtttgtctgtctgctggaaagctgcctccaccctcagactcttctggagaccctttgctgtcttggactccaggggaaatgtgtccgccccttgcccagcccagagtacgaaatctacaaccaactcctcttctggttaaacaaaggaggtgatgtattgaagagaggcccaagagaaatgattcatttcatcagaaatgtttggagaaacagatgagttcgctgatgggagtggacttcacacactttgttctcagagtcatgagtttgaacctgagatcatttgagcattgggaagtggctgaaagtgggtgtcattttctgctttaacagcaaatcttgtgacaggcactgagaggtagcaatccattttctggtgaccaagggtaaggatgcaactactagttctaattatgtctgcatcacttacatggctttgcacacagtacaaatgtaataaaaatttgttaaacgagtcactgaaagaacactgatgcattgtgatattttgttcttcctaatagtggtcttgcctgagccagtgtcactcacagtggaggtccctggaccagcagcatcagcatctacttaggaatgcaaattctcaggccctgttccagagccaatcagtctccttagtgggcccaggaatctgtttttaacaaagcctctggtgattctgatgcctgcggaagcgtgagccacactgggctagagtttctttggccagggaagtgatttaagaattgtacgcatccttatttcctctcctcagtaggaagtcaccatagctggttgcaagagaatcgcattttaaatctttagatgtacatgtccccaaccctactcccccaggacttcttacccaggactcagctagtcccctggcttttttttctctccagatctcatgtttccagattctgtgctcagtcacttcttgggaaatacagatggggttgggagggaggcatcctcccctttgctgattgctggaggggattgagctgtcacgtcagacctctgctgaatgcccactgtgtgcaatgcctgcaccacagtgagcagtgcacagtcctcatccccaggacctcagaaactccaagggtggcagaccttggaagtgatgaaggtggggatgaagtggcactcactgggctggatctaggagcacccagatgggccaagcgcaaccgtgggctggggtggagtaggagggcttcctggaggaagtactgcctgggccatggctgatagggcaagtgagtggcagcagggtaaagagagggagagccaaagggaatttgaggctgaaggagcagcacagcttaaagcacactctggagagggtttcgtccaactctgggggaccttttttgctttttatgttactagatatagtaaagtctgcaactcttacttttacagcttgatgaattctcaaatgtgtgctcatccctgttaccaccacacagaccaaaagactggagatttccagcctcccaaaagggagcccatccacagctccctgccaccaaaggcaacccccattcttacctctgtcatcatagattagttttgttggggacttttttagactatccacttcttaaggaaaaaaacttatcctgtagagccaaagatggctcaggcttgatatgactttgagttatgtgttttgtttggtctatgcagaattttttttttaagctcattgctcagatttaaaagttgggggatttcacacaacaaaagcccaacaacactgggctcgtgaacctcagcagcagtgctgggctgtagtcaggtaggaaccgtccccctgaagatgggtgtccatgcgtcagtatccctggctgttccccactgctcactcctagccagctgcacttttgttacttgcctggcccacttgggcttggcccatgagttttcaatccctgcctttaaatatggttttgtttcttagtttggggcctcctgcatgactgagggtgcttagtaatttccttggttcactcttcagtgtgtattgagcactaactatgagccaggcccatgccaagagctgggatacagaggtgtgcccaggcagagggattgaggtattgtttgttgtttgccatgcaggcagccagaaatgtggcacagtcctacctgcatgagttcacttctcaccacctccttggatgccacccatgctggttgtttcctggcccctgagcccaccttgtttcatgatcatcacacatccactgtcactatcccttcatttcctccctgtctggtcctcatccttccctcaagcttttgctcaagtctcacctcttccaagaagtcttcactgaccagccctttctcttgtgatgcctccctcccctgattttatcagcgtattccccacaccacaatcccatcaattctcaattatttattccctcacattgaagaaacaggggccttgtttctttttttttttcttttttttttttgagactgagtctcactctgtcgcccgggctggagtgcagtggtgcgatgtcggctcactgcaagctccacctcccggcttcacgccattctcctgcctcagcctcccgagtagctgggactacaggcgcccaccaacacgcccggctaatttttttgtatttttagtagagacggggttttactgtgttagccaggatagtctcgatctcctgacctcatgatccgcccacctcggcctcccaaagtgctgggattacaggcgtgagccaccgcgcccggcccttgtttcttatattagttatcacaggccctatgggcaaagacttcccctatacttcccagcattgctccagcatgccctgcacagttctgagcttatggcagatacccaggacacacaggaggtgggctgggaagggcaggggagcaccggaaaaagaggctgtgatggcggcccctggggaggccagaaggagagcaccaggagttgccctcgctggcaggagcctggcaggaaccctgcctgtccttgagggcccatcttccttgcaagagtgttgacaccctgtgaggagggtgcagaaactccagccacagggccacagacgttctggacagtgtcatgtgaggtggcattggagcttctcctcttacagcctgacagagtgtcccttggggtggcaggttcattgaagacagcgtggaactggatacagaaggtgtcattttgatggccattccttcagctttatgccatgctccatagacagcctagggtacccctctctgtcccacttttagttcctcagtgatacagattgctaaaggcaactcaattgcaaatagccccgcaccatgtgacactgcctccttgaaaagtacttcagatgctggcagaggatggtgacctttcagtggtatatgcctgctctcagcccagccagacagaccactgccacagaggtgggagaggcaagaagagcctttaacttaagggcacttggcaaagggctgtctcatttgctagggttctgttatatgtcacttggtgtgcaagcttccaagaactacttggcttcctgacagggaacatgatagaatgtcaggacctaagctaatgtaaaatatgctttggccagccaagtcatgcacaggcaatgcaagaagccattggtcgttcacacgtctgcgccatgttagacgggggctccactgatggacttaacctttccagacccacgtgatgatggagatccggcaggcagtggcttcttactcaaggcatgctgattttgaaaagtatgagggcatctttaaaaaaaaaaagtgcattctttttttttttttttttcctgagacggagtcttactcttgctctgtctcccaggctggagtgcagtggtgcaatctcggctcactgcaatgtttgcctcctcctgggttcaagtgattctcatgcctgagtctcccaaatagctgagattacaggcgctgaccaccacgcctggctaatttttgtatttttagtagagatggggtttcaccatgttggtcaagctagttttgaactcctgacctcagatgatctgcctacctcagccacaaaaagtgctgagattacaggtgtgagccactgcacacagccgtttaaaaaaacaaaacaacaacaaaaaacaaaaaaaaccaaacctgcattcttaaagggtacttgtttcctgtcgctcttttttcctttatacggtggtccccccttatccatggaggatatgttccaagaccctcagtggatacctgaaactgcaaatagtactgaaccctatatatatatactatgtttttttcctatacataacatgcctatgataaggtttaatttataaattaggcacagtactcttgtgcgttggggccattatgaagcgaaataaggatgtcttgatcacacgcactgccgtatcatcaccgtttatcctatcattgaggtggctactaaatgacttgcgggtgggaagtatagacagcatgtatatgctggacaaaaaggtgattcacgtcccgggtggacagagcaggatggcccaagacttcatcagactactcagatcagtgtgtaatttaaaacttacgaattatttatttctggaattttccatgtaatatttttggaccacgcttgactgtgggtaactgaaagtttggaaagcgaaactgtgggtaaggggggactactgtattcccctcttcctgtttttcacctctcccatgcctccccctagtccctcccatttctgtgtctttgtgtttatctgttgagcctttggcatgaacaccagacaaggttggctgggtttataggtgctacattttttcacttgggcgcttcagatttagataataggatacagagacctagaggtttcatccaagtttcagccttgggccagttagggagtgtggaattggcaaccttttatgactgttaagcaaaatctttgcagaggagctgtaccaattaagaaatccttggctgccaacaggaaccccaacagtggcttaaaccagagggacatttctcatctcaacatgaaacctggaggcagaggcctaggtttggtttggtggctcaacagggtctttagggacccaaagtctttccatcccctaccttgccacgttccatgatgtttttgttcttatgcctatggcctcctcttcacaggacagtgacagaggccccaggattacctacttacatgccagcaaccaaagcaggaaatgggatgggcaacaaataaaaaccctctttgggccaggcacggtggctcacccctgtcatcctagcactttgggaggctgaggcgggcggatcacctgaggtcaggagttcaagaccagtctggccaacatggtgaaagcctgtctctactaaaataaaaaaattagccagccatgatagcgggtgcctgtaatcccagctacttgggaggctgagacgggagaatcgcttgaacccgggagatggaggttgcagtgagccgagttcatgccactgcattccagcctgggtggctgagaaagactccgtctcaaaaaaacaaaacaaagcaaacaaacaaacaaaaacctctctttgcttctgccttatctgggaggggaaattttcagactcattgcaaaggaaatgtcatttaaatgtgaaaactgatgcacagagctgagtcattttgggatacctgtgtgagccgggggttccattttcctggtgacccttctcaactccgttcccagtggttctttctcaaaattacagattgtgaagaatttttttttttcctcctagtttcttccagcctggagttcacagtggggcttacttctcacctggtcagccaaagcttaactgaaaatctccaagagttcctgtctttagaaacccataaagtccggtcctactccctggtactgattctcctttttttctgaatggtactcgcatcagcctggaccacggggaacatgctgttcccatcatttaccccgtgtatgagccggagatttcactgttagtgttaagttacagtgccttgctggttgggagcttgccttttgaaaagttcaggtccagccctcctttgccttatcttgggaaatgactttctgctaaaataatttcggtttgtacatatgcatgtccatgcacacaccccagctccacaccatccagtgggaaagggagtcagggatttcatggtagctgtcattttgatgaatgtccctgtgtccacccacagaggccgtgacattcctgcctttcccacttgataatctgaaaatctcccaagcctgattgccttgctataggcctgcaacctggaatgctgcataggttctgagtttcaatccccagggtccgcactggccaggatctgtaagagcctgtgggcttgatgctgataaggcagagagctaacgggggattatcagagagggagagtgccagacaaggtgcattcctctggggatagagcagcaggactttgggagctgggacaattgtgtgaagcaggacgtgattgcgtggtcttgtttcagccagcctcagctatccccttttatctgcccccagaggcactgtgctttttaggcctcctcaccttccctctgaaatgtgctccccaatgtgcccacctcttctttctgttttccagcctctgctgggcaaaagtgggaagttgctctcaagtgttaaacgtgttcactctcaccaagtggaagattttacattagaattcaatcattctgtttacttcctttaaagtcgagagcgtatcagctgagtgtggtggctcacacctgtaatcccaacattttgctaggcctaggtgggaggatcacctgagggcaggagttcaaaagtgagacccccccatctctaccaaacaaacaaacaaacaaacaaatttgctgagtgagatggtacacacctgtagtcccagctagtctggaggctgaggcaggaagattacttgagcccaggagtttggggctgtaatgggctcggatggcgaccgtgcactgcagcccggggcgacacaatgaggccctgtctctaaaaaatacataaatgaagttgaaagcatgtgaagtttatgattggctttgtgatcggaaggatgtgtcatgctttcccctgggtgttgggaaccttctgaaagaactgctgtcggaattcagggtcttctgtgcctgtccacccactagccctcatgggcgtaatgcagagatctcagaagggagagctctggatccagactgcttatgttggaatcatcttccacccacttactcactgtgtgccctttggacagttatttaaccactctgcacctcagtttcttcatctgtaaaatggaaattatggtacataccacatatgattgttagaaggagtcaatgagttaacctttaagtacttaaaatggtatctggcaattagtgagcaccatgtaagtgtttgcttaataaatattaagagtttggggtttggggtgggttttttttcttgtttttttttttgtttttttttttggttggcttaatacctttctaactgaaatttttgttgagataattgtagattcagatgcacttgtaggaaataatttaggccaggtatggtggctcatgcctgcaataaagcctcactttgggaggccaaggcgggtggatcacctgaggtcaggagttcgagaccagcctggtcaacatggtgaaacaccatctctactaaaaatacaaaaaatgagccaggcatggtggcaggcacctgtaattccagctactcgggaggctgaggcaggacaatcgcttgaccccaggaggcggaggttgcagtgagctcagattgcgccattgcactctagcctggacaacaacggtgaaactctgtctcaaaaaaaaaaaagaaagaaagaaagaaagaatttagaatgtatcagttaaaaataaaactaaaaaaggaaataatgatgagatttcccatgtaccatttatccagttcccccagtgataacagtttgcaaaactgtagaagagtatcacagccaggatattaacattgttacaatctacctctcttatttatcttataaaagatttcccattttacttctactcctttgtatgtgtgtatatatttagccctatacaattttatcacacatgtaggttcatgtttccagcactacagtcgagatactaaatagttccatcacaaggatctcttgctttgccttttacaaccacatccacctcccgccctttgacgaaacacctggcagggactaatctgttctccatttctaaaattttgtcgtttttaaaatgttatataaatgaaatcaggccaggcatggtggctcatgcctataatcccagcattttgggaggccacggtgggtggatcacttgaggccaggagttcgagaccagcctggccaatatggcgaaacaccatctctcctaaaaatacaaaaattagccagttgtggtggtgtgcacctgtagtcccagctcctcaggaggctgaggcaggagaatcacttgaaccagcaaagtggaggttgcagtaagctgagatcacactaccacactccagcctgggcaacaaagcaagactctgtctcaaaaaataaaataaaataaaagcaataatacagtgtgtaaccttttgggacaagcctttccactcagcataatttcctggagatttatctaagtttttgagtgtatcaatggtgcattatttttccttgctgaatagtattccagggtatatatgtaccacagtttgtttaaccattcacctattgaaggatatctggcatctttccagtttttggctattacaaagaaagctgctatgaacatttgtgtacaggtttttgtgtgaacataagttttcatttctctgggaaaaatgcctaaaatgcctaagagtgcaattgctgggttatatggtaattacatgtttaggtttactactttaataattataaaaaacactttgttatttaaatttgtacctcccaacagtaaatggatgttccactttttgacttgcagctaacattgtattagtatttgttaaataaattaaaacagaccactggcttttacaatgtatccaggactgtgtaagaggaaagggagaggaggggattcagatggtttggtgacagttcttgtctttaagacatgtgtcatcttagctctgggaattgagtggctggaaagaagagccattagactgtgtgcaggcaaattatagaaggcctgaaacagcccagaggacagccatgtgggaggtgggagatgaggacagagtggaggtttggagaagccttgtcaatgttggtgccaccgatggctgagtttggaaattttatggtcttttgtatttgacaaaaaattggaaatatttgaatttgaagaaaagccattgatttttcatggaatattatatgtttttggttaaaggtaaggattattgcagtgataaatccctttgaaagggtatacttttcttacaagaagaaaacagaagcatggccttgctggaaaatggctggttttagtgactcaccattgtgaacaaaaagttcgattgttggccaagtcacagagtggttttcccggcctccagcacgatgctggttctttctgtggattgggtcattttgatggagtgcagtgaaagttcacataatgtgtttgacgcctggaacagataatttttcacattactgtcctctatatgacaacattattttcaataaaaaccatgcagtcagcaataattttcttgatttttttcttcagtttgtaaacaatgaatgattgaagaagaatggatataagttttaaatatactactcagatccaataaaatatttcacatctgaattagcatctgatttttcatttttataatcactgtgctatcactgtttataccaaatctgttttaaccagtgaatcgataatactgcagggattggagatacaaactgtgttggaaatggaattgaaaatgaattgattctaaactagtatgaatttattttctaaatctgtgtgtgtaggtgagtctggatttgcatgagcaactacaaatccaagagttctccaaataaatttcatgtaaataccatgcttatgaaagcgtaagtaatacacatatgctaatttgaaacttacatatatattaatctcaacagtggttgcaataattgtttggaacctaaaccaacaaaacaattgtttttgtgaaggagtagcttctcattgacattgtttagactactgacgcttggccggatgcagtggctcatgcttctaatcccagcactttgggaggccaaggtgggtggatcacttgaggtcaggagtttgagaccatcctggccaacatggtgaaacccccatctctactaaaaatacaaaaattggccgggtgtgatggcagagtcttgtaatcccagctacttgggaggctgaggtgggagaatcgcttgacctgggaggtggcgtttgcagtgagccagaatcacaccactgtactccagcctgggtgacagagtgagactccatctcaaaaaaaaaaagaaaaaataaaagaactgctgatgcagatgacttttagtagttttattcctgttgtaaaaatctctagagacaacatcctaccttattgcctgcactggggtagcagtttggttgtgtagctgtgtgactttgagcaagttgccttcatagctatagtcatcttccttatctgcaaaatggtaaagctttctgtgggttaataatatgatccacacaaagtgtctggagtggcattggcatacaataggttcttaagaaatgtgagttgtcttcacttctccacctggaatgggcaatatctgtgtgtctctgggacagccctggaccttgaggttggagctcagcgtgaccagtcacagagctgcctcccttttcattctctttctgatatccgccaggaaatgcaacggttctgtttaagcagcattcattgagtgactacattgaactccaaaggaagcttgaataaattctagagtttctttgctgtgtccatgcaagcttggatgggagagctattctggtctctcttgggatgaaagggtgggaaatttcaggacggagtggtgggctgtctgtctggagggtgaacctcaaaaccaatggcgattctccttggcttgagggtaaagaggctctgcagctgtttctcctaatcaaagagggttggttgtagtcaggccatttacaaatcactttccttttctttctctgtcttggtcttgcctcctcctcatactgataattgccaaagaatgtggtccaggcctttttgtggcttttgtgagccttttatagcagtaagaaggaattctcggtattctcatcgtgtataaaagatcaagctattcttatgcatgacatagctcatgttgaacgtggaaaaacgcttaaatgacccagggaggctctaggatggctactttacatagcaattgtgtgctgtaaaatgaacctgttgcattttaaaggggctaaagagaattcttaattttgtacagtttaatctgccaagtgataaggctttcttttccctttttaaaggaaaatctatttagtgatggctatagggaatattgggaaggaagctcatatttttaatttaaacaattagaagtgtattagaaaatctatcctagaaaaacatctcatgttgtaaataagctcagatgtagattgttggatataaaatggagcttaagattttatttttgctaacctgatattccagagtgtatattgtatttttacaatattggctgcatagccaattcatttcaactggaaaatacatcaaaaagcatataagttaatcaagatcaagctaaaatacactttaaaaaaatgttttttctggttttattgcctgccattctgctgatttatttcctagagaaagttaaacatttttaaaacacagaatgaatggttttaaaaggcaaagagcatagatctgaagccttaaaaatattactcagctataaaaaggagtgaaatcctgccatttgcaataacatgaatgaaactggaagacattatttgtgttaagtgaaataaggtaggcacagaaagacaaattttgcatgttttcactcatatgtgggagctaaaaattaaaacaactgaactcatagagagtaaaatgatggttaccagaggctgggaagagagggtagaaagtggggatggttaatgggtacaaaatatagtaagatagaatgaataagacccagtattggatagtgccgcgggatgacgatagtcaacaataacttattgtacatttaaaaataaccagaagagtggaattgtaatgttcctaacacaaataaatgacaaatgcatgagttacctgatatgattattatatgttgtacctctgtgtcaagacaccacatgtactccacaaagaggtacacctattatgtacctataacaataaaaaattaaagaaaacatatgaagtaaacactcggttataaaaaggttggatgaatgagcattggcagggctagcttcactggcaggtgatctgtgctgtcacatagggccccatgcttaaaggggctctgtgcttgggcgtgatgctctggtaatcaccattttgaaattcttactaatttctgaacaagggccccacattttcattttgcagtgtgccctgcaaattatgagctggtcctatatatcagctacccaataattcagctcaaactagctttggacttttgaattttaatcctaatcttaactaacgtttatcagattgtttttttctgtatgtgaatttgtgaggaccagcgtgatgaactttcatgtagataatttttttcaactattttcaaagggctaagtattagataagtggtgtttttaaacatttttatcttgtttcatacagtataaagctaaatcccacttatttactagtttctggtaaaatacgtaggttctatatatttttgctagataaaaacaggtgaaataaaaccttatttctcaaattattaataaagtattaatagtggctattgctgaaagctgggatttcaaatgattttcactttctaagttttatagctctgagttcaagtttttacaacaaggcggaattatttttgtatttcaggggaaacaagaaacaataaagaattttttgaaagtctgttcattgtttcccattctggaaggtggtgttggggcattgaggatcctggggttcctattcctgagggcaaccacagaaaatttagtgaagttcaagaaatggcttggaatgattgagagtgtggctggggtggcaggactgtggcagaaacgtccagtggggtttgtaaacttaggaataatctgggcctggcgtccaatttcacgaggcagtgatgcaattttattttattttgagtccttggctatcaattgtagtgtgtctttgtttctcatttctttttctttttaaatgttctcctcacctcatccctcaatagcaggtcagacgtgttgctgtgagccaaagctgcatgttgcctttgaaccaggacagagctatcctgatgcagggtcaggttcaatgtgagacaaacagctttggattctaaacccttgttgacatctcagccccgctgtacaatgtggcatggctaatgccctcctgctgcttgtgaaatggccaggatttaaatgctgggatcgggagtcaaagacccaggggatgaccctggcattttgatgctggacgcttgcctaggagagggcaaccccgcaggcatgctgggaacactggagcagacagcaggccattctgggagcagcccacactggccagcattgctgcctgtctgttagagggagtgtctgccctgaccctgggaggagggaccatctcttacttttctgtctgtaggcagaaatgttttcactaaaggccctggcacatcttaaacatgattttaaagatcagtgataatttcttttttttttttttttttaattgggatgggatcttgctttgttgcccaggctggagtgcagtgttatgatcgtagctcactgcagccttgaactcctgagctcaggtgatcctcccttctcagccttctgagtagctgagactacaggcgtgtgccaccatgcctggctattttgtttttttaattttgtagagatggggggtctcattttgttgccaggcgggtctcaaactcctggactcaagcaattctcccaccttggcctcccaaagttgggattacaggcatgagcagtggtgcccagcctcaattatgatttcaaaaatcataaagttcaactaaaaaagtcagaacccattagagatgaacagaatgtttgtttttttaaaacctttgtcccttggagccccagggactccaagacatgtgccctcctacacgtcctccagaccagctttgctcacatcagcgttctgttttaggctttcacctagtatttcatatgaagaaagagttcatgtctaaaaagcagtaccactgaattcgatcaacttttttttatcatgctatttgatccttagtgtccaaggtccctttagtgctgacgagtgaaaacagataccaatagttggactatgatcatattgggcagtttcctttgtatttgaggtgggttttcgcgcaacaagctggtggtcatgctgaactggatattccgcaataatctggaaatgtagccaagactgcaaattatgatgacaataatcagacacttctgtagcatatactgtgtgctcgcacttgcctgagcacttcccatgtgattgctatttaatcctctcaacagccaggaggtaggccctgctgccagccccatctcatggtgcctccggttctcaggttggagaacaactgaatattggggctgccccactgggcctcctcagagagccacttttccatcttcagttctctgcctcccagttaaactcccagccccagtaggaaggactgaggcgggagaaggagctcacagtttggagaatgcagttttcttggagagaagctggtccttccctcccccttcccctttgggggcaaatgatggggcttcctttttccaaagttttctgtgcagatagggcaccctggcatccagttttccagctagacacgtgcgtcatcaggaacagctgcctgccctgggctcctggcacaggagaaggagaagtgaggtcaggaacccttatcccaaagacaggcttcatgtgagtcccaggctctggacttgtggagccgggcaggtgacgtgaaggccacagttggctgggactgcttttgcttggggaaccagaaggctcctacatgtggaggttgtcatgagacacacccctagaagggaatccggatttctccagggtcatctagaggagtggtttgggaggaggctcttgttactgtcccccagcccaagaccatggaggacttgtggggtgcgtgtgtgattagactccagccgggcgattgtggccacccctatccagtggtgcaggaaagaggccaggaaaaccagcctggctaacatggtgaaatcccgtctctactaaaaatacaaaaattagctgggcgtggtggtgggcacctgtaatcccagctgctcgggaggctgagataggagaattgcttgaacctgggaggcggaggctgcagtgagctgagactgtgccacttcactccagcctgggagacagagtgagactccatctcaaaaaaaaaaaaaaaaaaaaaaaaaaaagagtccaggagaggggaggtgtgggaaggacaggccactgccacctttaccccaagctaccaccactgcaatagctcttgcctggctgggaggaggggacaaaaagaatgtggaatcagctatgagactgaagttttgaaatgaactgagctgagtcttagaaatctaaatgagactggataattgcaagtgactgaaaagtcaacggatgactttaaggaagtccccactaatggggaaagtcagagaaggggttgacattgcccagatggggtagttatgtaaaaaacgaaggcattctatgtttgtactctgtgaactgagactgccgcataagccagcctcctttatctatcagtctgatccagaagaattattgatttattcatgcatttatcccacaatgcttagtatcatctgcgtacaatgctaggtactaggaaaacaggacttcagggttttgcaaatgtgctctcttcctacccactaggattctgaattcctacacagggattgtatcctttttttttctctgtccctcacctctgtttattgttgttactcatttaatattgtaaggtaatgtgttgttgatctacagtgggaaagtgctagcattgtttcagattcaggaagcttattcacattagtaatggtaatttcttattagaatcagtaatagtaagaagtgataagatccaagtatggaagtagcattttattttcttttttctccaattgaattatcatatattttaattaagatcatgttttatattattttgtgtcattcttcagtaggaaatgatgcatcagaccaaacaaggtgctcagttacagttagttaattgtgagttcatgtatggttttcaggtaagtcatatgccagctctggccctcatttttgtcatccctaagatattgtgtatgtttgattgtgtggttgtgtatagcagtagcaataatagtggtggtatcagtagtaatcattgtgaacagagatgattcttttaaaattaaaagctactgcaatttaatagctactgccatagtctgagcatgacatgaggaggttggctagaatatttcaatctttattgattgaggccaataaaaactgatctagaggctgggtgcggtggctcacccctgtaatcccagcattttgggaggccaaggcgggtggatcacttgaggtcaggagtttgagaccagcctggccaaaatggtgaaaccccatctctaccaaaaatacaaaaattagcagggcgtggcagtgcctgcctttaatcccagctactcgggaggctgaggcaggagaatcgcttgaacctgggaagcagagattgcagtgagctgagatcgcaccactgcactccagcctgggtgtcagaacaagattctgtgccctgcccccaaaaaactgatctagagaccccaataattacctttcagttatgtcatgagtgtgtacttaatcacctggactccactatataatctgtttggcataaactgtttttgctcttttctgtgattccccaacacatctattacaccctctgtagagtatcttaaaatggttgccgtcatcctgggtcacccctaactttggcgtccatatttgtaaagtgtcttttccttcctctttgactgcctcagtttcccccagaatacctcttgtgatgcttcttttgttctgtccactccctcagtgcttgctctattctccctgctctttagggcttttagtgtgagaatcacagaagataagtcattgacatacatacaggcttgactaacggggcagatgcagagaagtggatttttatggaaaatatatggaaagaaacctggccaaagagccatcactaggattccaggtctggcgtggccacagatctgctgtgtggtcctaaacaagtctgctacacagagtaacgtgcactaggcttagctagtattataactgttgctggttattagataatctttcctggcctcagtttccttgctgttaagtaaggaacatggcttgagtgatatcctgagtcctctccactctcattttaggtgcaatacgattataaccctgactaggataaatcactagggaacaaagatgaggccctaaatctcctgtgtcccttatgacactttgcacgctacaggggcagagtagtcatttaataattcagtactgcaactgggtttttagggcattgctgaggaattttttattatctaaatatatgcattactggcaaattaaagaataaatggacaaattctactcagcatttgtacagtgttttgaaagagactcacattcatcaatttaatgtcagcctcgcaaccattccctaaagtaggtagagcacatctgacctcaatttatggataaagaaatggaagcttagagaggggattatttttttcaggtttcccagctagtaagtggcaagtctggaaccacaatcccgggctccttatccctgtgccagtgcgttttccagcctactaaggactacgtttttgggctagttgggaacagtaagaaatacttcattgtgaagactgataatattcagatgtattaatccctagaagatacatggcccaaaggatcatcacccaggaatgttattagaatgaagcttacccatctcctgtgaggacctggctaagcagatctgtgcctggagttacagtcatggcagtgctcctgattctgaagatgggctatgggaagaggactttgggacatgctaagcctcctgagtagacacttgagccttggcatagttgggattagggaatggtaggagaccctcttaagaaagaaaagagtgttccctgactcaagagcctcatgaacctgggtcttgcccatgctgggtagctagaaatgtaaccatatctgcagttcttggaggtcaatgaaaaggttgtgtaaaggagtattgtttggcagatgtctctagtaccattgctgcaacaaataaagctggcttagcactggcctgtctgaagctgtgctctgcagtggttgtagtcatactgagctgaccacctgaccatctaggctcctaggaactgctagaagggccagacaatgaggacccaagagcttccaacccaaggtactcctagaagatcccattacttgacagcagcaacttctgcttctagaacttgctgagagacctgctgatgagagcagctgctgtcagctgtcaggaggagctgctgccccaagagagcaggaacagcctctgggagctgtgggtggcccatgcccaacaggagtcaccagtaggagcagcagatagagtaccaggtgaggcagtccttcctggttgtcctcagccccttagaattgttgagaaggggcaacatggtccatcttccaagaagaatccttccctagtagttgacctggttggagacccagcagctcagggtggaggctccagctggcttgaattgtctcctggtcttcaagtcacttgttggaggggtggcccagggaaaaaggattgccttcccaaatgatgttgatgaaaataatatctgtaatccaaaaggtttttaaaatgtaatttattgcctgggagcattggttcaagcctgtaatcccagcactttgggaggtcgaggcaggcagatcacgtgaggtcaggagttcgagaccatcctggtcaacatggtgaaaccccaactctactaaaaatacaaaaattagctgggcatgatggcagactcctgtaatcccagctacttgggaggctgaattgggagaatcgcttgaaccagggaggcagaggctgcagtgagtcaagatcgcaccactgcactccagcctgtgcgacacagtgagactctgtccaaaaacaaaaacaaacaaacaaaacaaacaaagaaaaaacccataatttgtgaatattcgtacttctatactccatcactctttactgactaactcccaagtggaagtgaatgtttccatcttgtgtcatcacactgtctgcagcactttcatatcagccatgcatgtactccttcatcagatgttggttgagtactgtagatggctcaggccatcaaatgtcagttttcctttgctgcattgtacttatgtacatatcttagccctccactagactaaagtcttttttgttaagtcctgataggttaggtttatgctgtagccacaaaaccccagaggtttaatacaacaaaaattttatttctcactcattcacaaatcctacatgatttggttgggtgaatattgaggggctgctccatatgattcctcagggactcaggatgactggggttccaccatcttatagctgagctaactggaacatgtggccttgatcactgagatggggaagagagagtactgaagggtctcacccctgcaattacattgcaattacaattacagtactgaagggtctcaccccagcctggagatagcatcacgtctactcacagcccattggccataactaatcacatggtccccacttaactacaagggaggcagaaagcgtaatccccctgtgtgcccagaagaaaagaactagatgagcatgagcactagaagtctctccacaagcttttgattatgttcttggttccctcactcacttgcagcaaagttgtctcaggaagtatcacattcttcatttgtaaaaaggggataatgtaagtgatgaaaagtcaagtatgtattgccaattttccagtttggaaaagactaatcaataatttaggcatcctctgtgtgaaggtcttggtcttttctctttcctagtaatgaggaggtagaatggtaggtgcgtaattaggggcagaagcagtccccttagaaggccccagatgtctccctccagggcaaggcttagcctcatttcctgccatagaacaactcctgcaactgcataccaccctcaccccagagcctcagggcacctggcttctcctgctctgtaggcctatatggaggcccattgaccaggtctcaattatgtaacatctggcctaattaaacgtgtactgtttacctttattcatgcaattgccattgaaagagtaggatttgggattggggtgatctgggtgatctaatattgcaagttattatgtcctaacttggagtcagtgtacaagaaacaatgatcagagttcagaagacagtgggtatttcagtatgcatattcatggggaataaatgactggagtatagagtaaaagaattatggctgggcgtggtggctgatgcctgtaatcccagcactttgggagaccgaggtgggcagatcctgaggtcaggagatcaagatcatcctggctaacaaggtgaaaccctgtctctactaaaaatacaaaaaaaaaattagccaggtgtggtggtgggcgcctgtagtcccagctacttgagaggctgaggcagaagaatggcgggaacctgggaggtggagcttgcagtgagccgagatcgtgcccctgcactcccgcctcagtgacacaactccgtctcaaaaaaaaaaagaaaaaaaaaaaagatttaaaacatggaaaatttgaatttacaactgtgcttgttatccttcctgtaattgtgttttaaacatcggttgattgagtttttttcattgtttgtttggtttttgcataaagaaatgtttgatatcacatttgtcttgtccgtgtttcttgtgacaggccccagcactagtgtggcaatcctcaactgcaggcttctgaggacagaactgtgtgctgcctgcttcactctctctccaagctccttttgcaatgcaaaataaggtgtttaataaatgatgaggctggtgaaggtggtctgcagtgacagccttcatatttaattcactacaccctcattctttcctattctttagaagtactgttgggaccttcaaatctcataaatattctactgccctcctccccctcctcctccctcctctccagaaaaattccatctgtgcaaatcccattttgttccaagggtgataatcttcagggaaacttatggaatgtgatgggtttactggagttcctgggtgacaggcccccaagaacccccttcagttctgcagagcttactgtagagatgacatcaatgtcccctggccatctggaatgaactgagtgtgaggtggagagagtgtgggctttgaagtgtctcccacctgatttgaatcccacccctgccgttgactggttgtgcgacattgggtctcagttcagatcttgttcacttgtgttctgtagtggatcctggcatctgttgctccatctgcctgccacagtttcccatccctcttcctctggttttgattccttgaggggaattcctcatccacctcacatggtcctactgtggctatcagtcatggaatcacaaagggatcttcctcactcactggagtgggcaggtgacccaaagcgctccattgcactggccccactcactgtgcgagggaggagcctcattctcaagcaaccccagttagcatttctcctgggactagtgcatggagagaaacaatcccttttgcacatgggctgcctagaaagaatgtgagtctggggcttcgggcatctgttctgtttgacatgtggcaatatcctttgagaatgaagaaaaacagacaagcagcctgagagctagggcgggggacagaggcttggccacatggcttccacccttgcatgcagtgggcctggagtcagcaccacccctgacttcccaaggacagaagccagcacttcccctttttgtttcagcaactttgggttgggtttctgtcacatgcacttaaaagagtttgaatacaaatacctttatcatcctctagtttttaaaacacattacattttataagcaatatataaattcataattacagacattcaggcatcttagtttttccttagaagaccaagtactcagaggagggctccatgcttccccacctctgcccaactggactctcccttgcaaaacatgtgtcaccactgacagctgtttggggtataaacttctagccctttttctggtatttctatctgtatgtttgtatacatgcatagatagtttgttttattttttagcatat

SEQ ID NO: 2412 - DNA, 663 bp, Homo sapiens
agcaggcagaggtttagaggcagcagaaccatgggtaagcaatgaaagggtttggatgtttgtgcccccaaatctcagattgaaaggtaatccccaatgttggaggtgtggcctggtgcggggtgagtggatcatgggggtggacttttaacaccatccgcttggtgccttctttgcaatagtgagtgagttcttgtgagatccggttgtttaaaagtgtgtggcacctccccttgttctcttgctcctgctctcaccacgtgatacatcagctcccccttcaccttctgccatgattgtaagcttcctgaggtcatccaaaagctgagcagatgccaaccatgcttcctgtatgtacagcctgcagaactgaggccaaggtggtaggatcacttgaagttgggagttcaagaccagcctgaccaacatggtgaaacctcgcctccactgaaaatacaaaaattagctgggcatggtggcaggcacctgtaatcctagctactcgctaagactgaggcaggagaatcgcttgaacccaggagacggaagttgcagtgagccgagatcatgccactgcactccagcctgggcaacagggcgagactccacctcaaaaaaaaaaaaaatgtgtaattaactgttccccatgtcaataaatattct

SEQ ID NO: 2413 - DNA, 755 bp, Homo sapiens
cagggcctggctgacacggatgcagcctctctgcttggagttgcgtctccatgaatattttatgctgggggctgccgcacccgctccgggcagctgccagcacttcccggtctcggtctcgtattagaagaggccaactcagcgcgtagaggcaggcctccccgtggcagtgccctctgaccttgggccgaagggggctggagaagtggcttgtggggagggacagcaggacgcaggcggcagcagacagatgtgggaaggcttttcagcctgcaggagggtcagagccgtgtgtctgctgaagcggaggacgtccctggcacctcagcccgagaccgaggacgagaagaagcgctttgaggaaggcaaagggcggtacctgcagatgaaggcgaagcgacagggccacgcggagcctcagccctagactccctcctcctgccactggtgcctcgagtagccatggcaacgggcccagtgtccagtcacttagaagttccccccttggccaaaaacccaattcacattgagagctggtgttgtctgaagttttcgtatcacagtgttaacctgtactctctcctgcaaacctacacaccaaagctttatttatatcattccagtatcaatgctacacagtgttgtcccgagcgccgggaggcgttgggcagaaaccctcgggaatgcttccgagcacgctgtagggtatgggaagaacccagcaccactaataaagctgctgcttggctggaccc

SEQ ID NO: 2414 - DNA, 8467 bp, Homo sapiens
gcccaggctgcagtgtagtggtgtgatcttggctcactgcaacctctgcctcctgggttcaaatgattctcctgcctcagcctcccaagtagctgggattacaggtgtgcaccataacatccggctaatttttgtatttttagtagagacggggtttcaccatgttggccaggctggtcttgaacttttgaccacaagtgatccgcctgcctcggcatcccaaagtgctgggattacaggcgtgagccaccatgcctggcctactttttgatcaacatctatattgtctgagacttttttttcccatgcaaaagactggatattacaaaattcacccatggagttgtgtctgggtccccaatctgttctgccttcatttataaaagaatttaaatttttatcctagtgaattagtatggtggtccatatggaaattagggtaagcatttcatcaaagcctcgtagagtctgccacttaccgaagacagtctgaagattagttccaattataaagactctccattcatgggcctgccctgggcttaaagctatttggacacatagcttatttagggaacaagttgagagctattttatatttcataaaactttataactggtgttttattcacaaaagtctccttcctttaagacatcaaaacattcccaaatacatcacactgaaaacttagtggcagcagtctatctgtgactttcttcatttctgcagaaccacatgtaatttggaaaatgagcaatatggaatgtgtctgcctgagataaaatagttaatctgggttcaagcaaatcagtcattcaataaatatgtattgattacctaataggtgtgcttttcaaagctgtgaggatattgcaataaataaaatatgcaatgatgcctgttcaaagacagtttatattctttggtggaagagaaacaatcaataataacccctccaaataagtaaattattgtgtgtgtcagaaggtcatatgtgtcatagagaaaagtatatccctgattctcaagggaaatagagaagggatggtgtcacaagttatgttggggtattgggataggtttctttgagaatgtaacatccaaggaggtgatactccttaagagagtatagtgaggaagatgctctgaggccagagagtgcttgacaggtacaaagaacacattctgggctagcagtgaggaacaggatgttgaggttgtcagagggagatgtagctgggagccggatcctgtaggagggtcttgtgggccactctttagtctttgatttttactttaagtaagacaggaagtctttggagggtttcaaatagataagtgaccatcttaactatctcactgctaaataagaatagaccatgagagggtgaaagtttaagctgggagaacttagaagtctattgctaccatctaggtgagtgatgatggtggctatggtcaagttatagcagtgaaggtgaagataagatttccattatgttttgtaggcagagtaacaaacattcaccaaacatcagagccactacgtgaaatgaaaaaaacaacaacaacaaaaaaaaaacgctgaaactagccttatgtgctttcttattttgtttttctctttttatctcactgtcatttactccactcccttcacaaagttcttgagaatccttgactttccaggcttctttcagctatgctatctgtcactcggcctctatactgaccagttctgtgtaccactcctgtgcttctctccagctagcctctctgaattgatcctagtaacggttcgcactcaggtgttcaatgattgacaaaagcttgtcttcctctctaaccccgcactccctggggggatttgctttttttttttttttttgaggtgtagtttcgctcttggcgtccaggctggagtgcaatggcgcaatctcggctcactgcaacctctgcctcccaggttcaattgattctcctgcctcagctgggattacagtcacctgccaccacacccagctaagttttgtatttttagtagagacggggtttcaccacattggccaggctggtcttgaactcctgacctcaggtgatccgcctgccttggccccccaaactgttagaattataggcatgaaccaccacactggccaggatttgcattttaattgaggggagtgtgcagtttaactcaaacaagagaattgtcaaaggaaaaaacagggatcaagataatgcagcaaatgttacaggtttacgtcatgaagaaaaatgacttcaaaaatctgtattagaaatgttctcagggcatgcttggagtggtggaaggaggtctttaattagccaggcttgtctaggacttgaaccatagacgaagaactaaaaatttgtgttttttcatgtccttgaatcttattgtaattttcaattagatatttcaagtcaacaaatatttgctgaacatcttttctctgccaggtttgtattaggtgttgaaaataaatgaacaaataatataaaatctctcctctaaaagatctagcaggcagatagggatggcaaaatattataataaaatgaaacaaaattatgcatttaaggtgttagaggaatgaaaagataaatgagggatgcagtggggtcctgggaagggacctgtcctgggaggttttctcagttgctacctcgcccatctgctttgccaggcagtttttgacagttgtatcctccacctctagcttttccattatcaggatcattatagattgtgctctgccagtaatccagatataaggaagtgtctgggcaatccctatgaacgggatcagggcttggttgagctttcatctcaggactgatgtcagggagattctgactcaggtaagacagacgtgatcaccgaggagcagaaagtgtacatgtagagtgatgctctcatctctgcccaggaatgcttctggaagaagttggacatggtggtagtgaggcccttcaccatggtttcctcatcctattgtttatataacccaagtttcttgcatttactgcaccggtccccaacctttttggcaccagggaccagttttatggaagacagtttttccatggattgagggtttggggatggttttgggatgaaactgttccacctcagatcatcaagcattagattcttataagggacacacaacctagatcctttgcctgtgcagtcacaatagggtttgcactcctatgagaatctaatgctgctgctgatctggtaggaggcagagcttaggcagtcatacacgctcacctgctgttcacttcttgctgtttggcccaattcctaacaggtaccagtttatggtctgggggttaggggcccctgatttaccacacttaaagtgtaactgtgagtccaaacccctgatcctcaaagcaactaacatagttcactttgtgacctcatggatctttattactagagcctgtggtgaaattttagacatcagcaacaggatatatgactttagtggaaaatattttctgaaggggcagaatgtgttcttgctatccttaccttcaaacccagaatttatattgcagctggcaactagcattgcccataaacaggattagctctggtaaacataagtaataaaatgccattttgttttccaaacctaaactttgacctgcaccatgcagaggatatttaagaaatattttttaaatgtttactgaaagcatagattacaaattggagagaaccaataggtattattgccttgtttgccagattcaggtttaggccaatcatttttacctcctatgattagctaatgtttactctaaccctgtaattccacattagaatgattagtaattttaagccaaagaggaaaataaatgaatttggtttagcacctggaagccttgaaatgcttaagaggaggtgtgtttcaaattagaataaaaaattcatatttagatcgagtacatattgttaagagaacccagaggaaaaacagtggactcaaaatgtgtctttttttgggcaataaataggatttttatactgaaaaggaaagggtatgtatgtcttagaggagtagtgcatgtcatgtagtaggtactcaataaatatttcttggccaggcatggtggctcacgcctgtaatcccagcactttgggaggctaaggcaggaggaggccttaaacctaagaattcaagacaagcctggacaccatggtaagaacccatctctacaaaaaaaataaaaaaaaattagctgggtatgctgccacatgcctgtattaccagatgctctggaggctgaggtggaagaattgcttgagctcaggagttagaggctgtagtgagttgtgatcgcaccatggctctccagcctaggcaacagagaaagactctgtcccccaccaccccctcccccacaaaaaaaaaaagaaaaagaaagagaaaaaatttcttgaataaatacgttagttgaacaaccataaatagatttacaggatcagttaatgtccaccaagttgggagaccccagtggcaggagttcctagtccttagtatatgatttgagtgaagataaaaatgacacacctaacaaaatgtttcatgaaataatctaaaatttcttgtcttcattgcttacaatgacaaacccaatctaatcagataaaacttgataaagataatgcctaaagccctgtttttgggtataaaaaggtataaataagcataaatataggatggaattattagtaaatgttttgaaaaaagatgaaaggattaggaatttaggtgatagcctactcagtgtgatccaacagtatgaagtaattccaacctcctttcttgcatatttttaaactctccacaaaaactaaggagatgatcccaattattatcttcattacattaattgagtttatcatcaatatcatggaggtgatgatttgatgattatattttactatgtgctaaaaacacatctattaaacgctttttataattttaaggaatattatcagaggagagcaatgagggtagtggaattcttcacttgagtatcagggagttggtgaaggaagcaatataattatgcagaagagagctcttggcatgagccatgatttcaagaggggggaaataggaccaatgagataagttagcaggaagcatattttggctcaatgtaggggagaattttgtactaattctaacacttagacctgaatgttctgccttgggaggcaagcaagtgttcatttggctactaaacagaacagagattcatgtgtcagatgagggagttgaaccaaatgaccttctatatcacttcttatggtaagattctttgacattttgtgtgcaataacaagatatgtctctgtacaggctttcccagctatattctttagggaagttgaggataggagaacaagcactgtaaatgattacacatcctgaaatgagaagcaagggcatttgtagatatgtgcatagttgttgggataaagtgcctgtgtccaaattccagccaggactgacatgcactatctggtgaccttcgattagttatttaacatttctgtacctcagtttccatatataaaatggggatagtatagtatctacctaatagctttgttgtgacaattgagtgagttaattcactcaagcttttagaatggtacctggctcatagtgattgttagatattgttattatgattgcaactataactacaattaactattcataaaaccatcatagagtgagatggtatattttattctgcattacatgtaggcttaggtattctttggaagaaaatattatagagaaagcacgtatattggacacaggcaggctctttatgggctgcgtggtcttggacaagtcatttgacctctgcttttcttaataactgtctagttataggacttctgtaaaattaaatgagtaatagtaataaatgtcaacgtagtaataaatgtcagctcccatggaaagatagtatttcaatttccgtcctttttcaaatatcttgttgtctagagaccacagcagtgcagggttaatgtagcaacttagggcttgaagtgacctgagacatcttctagcaattgccgctcatgtaggagatgggagtgtaggttccttaagagttaagagacttgcagaaagcgacgtagcttcttcctatgagggagaagagctatatggaggagagaaagtggaagataagtaaacattcagagtacttttttgggaaaaagtgtgcagcttcggagctcttgtgcacgttttgctgagtgcgtgtttctgaatgattgtgtgtgtgtctgtatgtgagtacatatgtatatatgtatatattcatgtgtatgaatcagagtgtgtaagtgagcatgtatttgtgggtgactgattatcttgctagtgtgactttctatgacacttgctggcatgcaggccttgggttgctaattccttttcattatctaactcagtataccaagaaaagaaagaaaacagtgaaaaagagaatgcattctgctgttagctggatgctgactttcttcttctgggtctggcactttgattcctcatgacttcaactttttcctaaggaaaataaatgtgctagcctcttaccttcaccaccccactttaatgaagcttccttcaattacatctataaaacccaaggtttaattttatttgatgacactgtcttctgcagacactttgttttgcttttgaagacactaagatagcctggagctctgtgccaatttcctcactggtactggccactggggaagctgcctgagacaagggcatctgaagtgacaggagccttgaactcagttcatcagctggagacccagagcagtatcaaaactgagtttttgattatgcatatttatcctgatttctacagcttcctcatgctcacccatctccctcagatattctacaacactgaactgtattattctgagttgtacttaacacttaggaaattttaacatttgcttcattaacataactgttagaaggtgcagggggtgatgaggtttaaaaaatgagtttaagatcaagagtgtgtactttttgtttttctttatggagttacattgctgatattatttatgttcaaattattgactactttgctgcttgtataaaaaatggctgctaatttttatgtattttgatctctgtttttacggatgatgcaagaaaatgatcaagagctcaattacacttattggcataatatttgttaattgtgacactgtagaaaagaaacattcctttgaggatcaagcagagccatctcctgtcctcatgtatagaatagtactcccattagggaatgctgccaatgaaaaatttatatataactttgtgtaaaggaagtttttaagctctgaaatggagtggcatatagttgcctgtaatctctaggctgatattttactgtggcatttcttcgcttctcattctaataaaatattaacatggtaagctaattgtttctgtcagaaacaagttgttcagcataataacccttttcttcatttgataacgtatcatttaacttggtagaactgtctgaaaattatgtcatattctttcccattttcatctctactcttgctttctggttgcccattctagcaatacaagaccaagtcaagctacaaggcttttgcagcaatccctacaaacacattgcttttggaacagaaggcactagatgaaccagccaagactgaaagtgtctccaaggacaacacattagaaccaccagtggaggtccccaaagacattgttgggttctgacacagtcaaaactcctacaactcttccaagagcagctggtcgagaaaccaaatatgcaaatctctcctcaccatcttctacagtatctgagagtcagctggtatgtatcttctaagtcacagatctactgcaaattctgatctctcaagagagctttacctgagtaaaagtgaaaaaaagaatacatttactatatatatttttattcacttacttgtctaataacattttactgatattttccaaaagctccatggtggttgttttgcaggtgacaaacatacgtaaaactatacatagaccttacttgctagtaacttacatccaagtagaggcattagaagagattgtgaggtcagatgaaagatgccattagaatttagagaagagagcacactctttaaaggaagagatctaaaaagagtttaaggagaaggtcatgattgagtaggatagtttttggatttgaggaaataagaaatagatatgtcacacaggagaattagcatgcaaatggtctagatcagtgctgagcaatacaaacacaacgtgaatgacaaatgtaagccacatatgtaattttaaaacttct

SEQ ID NO: 2415 - DNA, 10339 bp, Homo sapiens
gggcgggcctcgcctcgcctagggaggatgtggcgggtataaaagccccacccaggccagccggctctgctcagcatttggggacgctctcagctctcggcgcacggcccagcttccttcaaaatgtctactgttcacgaaatcctgtgcaagctcagcttggagggtgatgtaagtatatcactttcactttatataatttttgcaagttggacatctctctggataaccatattactctctatccttgtacatctaaggaagatggggacaattcagacagtcatcatttggttctcctctttcttaatacttcagctgttcctagtagttcaatttgaaggaaatatcatggcactggaaacttttcttggcctcacattaaaattggacagaattagtgacactggaatggctggaattttattctgccatacttagcatgtcattggtaataactgttatgatggtacatgacttttaatgtcatgtcctgggattttattactggttggcataagccacagccatatcaaaactaattctgcatcttttggatttcttacagtgtccaggaagttattccagatgaagacttatacttttattttatttattaatttattcattttttgagatggagtctcactctgttgccaggctggagtgcagtggcgtgatctcggctcactgcaacctccacctcctgggttcaagcaattctcctgcctcagcctccccagtagctgggactacaggtgtgcaccactacacccagctaatttttgtatttttagttgagactgggtttcaccatgttggccaggatggttttgatctcttgacttcgtgatctgcctgccttggcctcccaaagtgctgggattacaggtgggagccaccatgcctggctcgaggacctatactttaaaaaatttcacacctggaaaatattttctctaaaaaagctaggatatttcttttaaaaaaccaagaatataatgaaattattgtaattcatctgtttcctttttttctgtggctattagggaatttagaactaaactgaattttctttcataggaaatatgtgaacctagaaattctgttgcatttgtttcttttttttacaaataaaaaatttaagctatatgtgaagttaaaattatttcaaatacttttagaatcaagtggaatataaattatgaatatgtaaaatagctaatggtactatacatcttccaggtcatcctggcagaaatggcttttacgcagactcagcactgatactggtttgtagccatatccgacagatctttcaaaatattctttgattgaaattaaaatgcaatgaatcactcaacagagggttgacagtgacttgggtcacatggtgcaagaccctctgtattgttcatggtacttgccatcaaaatgttcaaattaatggagcctgtgaaagcacaggttgtatggagtataaagcctatagagtttttttaaaatcttttttcttcttgaaacgtgtgcatgctgtttttgggaacaatacaaactgcatgttgaagtcagacaaattcaggtgctaaataatttgtttctctaatggacttagattgtatttgctatcaggttttataagagggctttttgtgtagcctctgaagttactctagtatatttcttatgtgtggagaggtggggcagaaatagaaaatgtcacatgttccccattattttaaggaaagaaaagataactttgtctcactaatttcatttcagacaagtggattttataggtaataggttcaattctcgatttaatttcatttccagagacactataaaatgacacaaaacttttccccctcactgttgtttttggaacaagacgacatatctcctggtaaatgcagtcatacatgatatggctcaatgcctggactgcctgccttgtaaataaccgatggcactcttaataaatgggaaaatgtttttccttagatttcatccacattttatagctaccatagcaaacacactgagtatttcaaaatagcactttgcctttttcctgaatgtgtgctccatgtcatcaagttcatcttactggaaagtttaagtggtgaaattagatggaacatactttgataatgcattgcatgtcaggttataaatatgaactggatttaatatttggccaagatagtcctcacaagtgcgtttggaaacatttgtcaaatgctgaacttagatttctggcctctcctgggagtcatctagatataggaaggcatcttagatgctcacctatacagtctcagtgctaataaaatggaatggcgtgggtgctgggtggtttataatgtgatgcctgtgggtggagaagtaactcacggatcttggccttttcactcttcacagaaactgcgccaaggccaagtcatcacattatacgggcattatgtgctgggggggttggggtgggttgcaggatgggagccttgatgatgaggatgggcagtgatgctgcctccaccagccatcagccaaccacaaccacaatgtacatcctctttgtctgcccttagctttgggactgggtagcagggagagggaaaactataagagcatttcaaagaaggagggaagttaataccttgaaaggagaactgacgtagaagcactccattgtccttacctcaatctggaatgggagattcccatctgtcagatcaggaaggataatgagctttgaaaagcactgaaaggctgggcgtgagccaccacgcctgtaatcccagcactttgggaggccaagatgggaggatcactagagcccaggagttcaagagcagcctgggcaacacggcgaaatcctgtctctacaaaaaatatgaaaaaattagcccggtgtggtggcaggtgcctgtaatcccagatactcaggaggctgatgtgggaggatcatctgagcccaggaggttgaggctgcactgagccatgatcacaccattgcattccagcatgggcaacagagtgagaccctacctaagaaaagaaagaaaagaaaagaaaagcattgggaaaggaagagggtatggtttagaaggcaataagaaatcttaggaagagtggagggtggtaggcacaagggatggtattaataaaggcagagggaaggatacagaggagagggggggaaacacaaggaggatgtgggccgtctggccagaccaccttggtgccacagtggtgaccaaagtaaagaggtgggagaagctgcttccctcatttatctgaattgtaagctcagcaacactggcccagtagaaattcatgtacctgtagcagaaacttagctaaacacccttgtccttgaggcatttccacattttcagcttatttcgaattgttgccagcccagtttaatggtcttcagagccatcctgagtaaatgctggcttcaggtctccagctttgcattgtctacttttgatctctcactaaaagtaagatgagaagttgaaattgagacagcatattctaaactagctgagcctttgaagaattcttattagaaaaaatgaaattgcttgcgtgaagtgtgatggtgtgttaatacctacctagttacctagtatgagaatgatctgaattgttaaaagaaacaataggaaaacatattaggcattgttatttcaacaagaggattttaaatgtgtgtcatttgagtatgtttatcttttaacctcagcactctacacccccaagtgcatatgggtctgtcaaagcctatactaactttgatgctgagcgggatgctttgaacattgaaacagccatcaagaccaaaggtgtggatgaggtcaccattgtcaacattttgaccaaccgcagcaatgcacagagacaggatattgccttcgcctaccagagaaggaccaaaaaggaacttgcatcagcactgaagtcagccttatctggccacctggagacggtgattttgggcctattgaagacacctgctcagtatgacgcttctgagctaaaagcttccatgaaggtaaatgcatgtgagatgtcatctctgtcaaatctgctattaattttgtgaattacagctttctgagtgtaatttggtgattttcagttttgttgaattctcatttggaaccattttttaaaaatgaactgaagttatatgtctcaggatttgtaccaaaaatatttcaattacttgttttaagactgtaaagaaatttcatgatgctgagaagtcagttaccagctgctactactcagcacctgggcaattggaataccatttgggaaaactacttccttgattacacttcctcctttaaaaagatatgttgtgatattaaggcaagaaaaaaaaactcatagcttttgttaagtgaagcttgcaaattctgcccatcctttcgtgggtgtttcttcctcccatactctctctgtcagtaccatttgtttcaaattcaggcagaatcagaacatcatagtgcatataaggggtaattctggatgaagaatcgtacctgaatcgtacctgtgagaaagtaactgtgaagtctcaatgcacgttatcttttatgtttttcttttgtaaagttcttttgaacctggaattttaggttaaattaagtaaaaactgtagattggaaacctcctgaactttgtgcatacttaaaatatcaagttttttgttttgttttgttttgttttttgagatggatttcgctcttgttgcccaggctggagtgcaatggcgcgatctcagttcactgcaacctctgcctcccgggttcaagagattctcctgcctcagcatcccgagtagctgggattacaggcatgcgccactacgcccagctaattttgtatttttagtagagacgggatttctccatgttggtcaggctggtctcaaactcccgacctcaggtgatctgcccaccttggcctcccaaagtgctaggattacaggcgtgagccaccgcgcctggccaacatcaagttttatataaatgcaatagatgcacacacattaatgtatgttgtactgcaacacatttggacccttttcttagtgtgggtctgcagcatttgaacagtccgacactgccctctgctgatatacatgggtaaagtctgcgctgtagatgagggaaaccattggtcttgattttttattccgagtctgttttctctgatgccactgttcctgaattatgaacagtctgagctgtaagcctgtcaccagagctaatgtcacagttcagttgtcatccttttcccagagaacacaagagtgagggtgcttcggacactgggcatctccaaagcctggaatttgatagctcagggctgctgtaagatttgttgttaagtctctttcttcctttagttcttcagcttagcccaagctgtgctcagtttattttagcggacttgtctgagtttcctaagtagactgtactgcagaaaagacgtcattaagaatgataaaatgtcgacaacatttcatgatcctggttgataaaaatagcgctcctgaaaaccgagtctgtggacctttggaggcagggatgagtcagcctctcctaggtttcttctgaccatcaacacttcagatcagtttgtcttattttcatcaagaatctatttagttgtgattcgagtggctttactggtatctattactaggtattagggacttgaaacagacctttttgagctgtcagtcactgttgtaatctatgtaattgggcccaatggaaggtgctttaactgctgaagctttgaccctgtgccagctcttccattagctatcacagttgaatacccgtccaaaatccataaagcttgaagtgacattaactgaactatgcttaaaaaaaaatctgttttgacttctggcagtaccggtggcagtatctgccatatgttacagtagaatttgcccttgtgataggaattgtggacagtctgtggagagtttgggccgggctttggaaattgccaaggtcacctttgaatgtagacataaaaacactattggaattctcagatattaccactggtatatcagtgatggaaggaaacacatcttacattattctgcctgtcttgcaattctacaatgtcaggatataacatttctcccactgtgtgttatttttagactatatttctatcatccttgagattgaacaactgcctctcaaaatattcaaagatactcggtagtcatttaataacatttgtgtagaatgctgtatggaccttttgctaacaaggggagaatttttggctttgctggaacctctacaaatcatgattaaaaactcagaaagaagagccattggctcaaaggttagatgaagaataaaattcaaaattaaccattaacctgaggcttagcttatattatacaaactactttttcggggcatataaacgctaataagtttaattaatagctgacacgcttttcatgtgggtaagtttcttattgtattaacaccttataattgatttacattttaaacagttgtaattctacttagttcaaagtgatagttccatattcggaaagacaagtattaaagaatcctgattattaaatcttgactttgatcatgaagccagctttgaaatacatgtttcattgagtcctttcaagctatctgacatgctcaaaagtgtatatattaaatttgaatacatcacccatcaaattcttattccttaataaagtgttggtgtctaggtttatttggcacttcattatttctttttgcttccctaaagtgcctgaagagtgcataattatcaagcaaaaatggaaggacaagaatgaaatttttaacattaacccaattttacatttcaaagagtgcagctaaaaattttttcttaactatacctttgcctggtaaaaagacttactctaacaatgctggctgcaagtgacaacataaaatttctgtattcctttattttagcgagaattgtttaacaaagaaatttctaatctgttaaaatagtgagtggttattgtagaaagtgaaaaataataataagaaaaagttactttatctacccacagcaaaaggcaattgccagttttagtattttggcatattctattgctgcctcttcctattcactacttttttttttttttgagatggggtcttactctgtcgtccaggctggagtgcagtggcgcgatctcggctcactgcaagctccacctcccaggttcacgccattctcctgcctcagcctcccagggtagctgggactacaggcgcccgctaccatgcccagctaattttttgtatttttagtagagatggggtttcactgtgttagccagaatggtcttgatctcttgacctcgtgatctgcctgccttggcctcccaaagtgctgggattacaggcgtgagccactgtgcccagcccctattcactacttaaaaaaaaaaaccatattaacagttgaactccaacatgccagttccaccatcttgtgctctggtgaagcattttttaaaggaatagaaaatgccattactttgtgctaaggggtaggagtatagattcttcagaaggaatgtagaaagcaggatgctaacagacccaatccatgtttgcaatttacttgatggagatcagagaagtaggctaatggtggggaagcatttccctgctgatgttcgtgcttcctggttcacaggggctgggaaccgacgaggactctctcattgagatcatctgctccagaaccaaccaggagctgcaggaaattaacagagtctacaaggaaagtgagtagcttgatttctgtgattcatcctctcagcccaatttatgtgactctatcatggccactggggttagggttcgggctaagatgcctgcattagtgatgtgcagaagtgcctgccaccttgactatgcaggcaaggttggctgtggtccaagtttctctccttcacctcctcattgcctgcattttgattattacattccactagaacttctgtgttagaagaagggtagacaggagggaaaggagagaaaacaaaacttgtttttaaacaagatcggatgaggagaagtagcaagtattatatatggattccacttattgggcgctgttcagtgtctgctcaagaggttgccaactctggactgtggataattgaagaattacagcaagagacccctgtggactggtgcacacttagcagtatagaaggctatgaggggaataaacaatgcaacttacatcgctactgcatttcttttttgttttactttttaaagttattatcatagttttacatattttgggggtacatgtgatattttggtacatgtattatatataatatgtaattatcaagtcagggtaattgagatatccatcacctcacacatttatctttttttttgtatcaggaacattacagttcttctctagctactgtatttcaatatagatgctattttgaatattgaaatatactttcattcaaaagcattgtttaattcttagtagtttttgccgctgtgcattttctcagtggacagtaaagcacaattgtgtgtgtgtgtgtgcgtgtgtagacctccaatttttttgatgttcagaacaagtactcacagtcaggagggctgggagccagtatttaaactacacgagaggtcaccaatcaacggtgagcctgaggatccctgatttgatctagccctgctgccccctgttatggataataactctggctctgatttcatgagggcgaaaatcattctagtgaatccttcctctgtttggggttaaggagaatggatatgtccagctgacgtagctgttctgcttctcagagtcttagtgggaaatggggagattggggtggatggttggctacacaggcagaaagcataaaaccagatgtattttcctccaagtgtacaagactgatctggagaaggacattatttcggacacatctggtgacttccgcaagctgatggttgccctggcaaaggttggtttcccagtttctttctttgcccttgcttcctcccaaggcaagtcacatacctcattttatacttggagtgaattaactaaatcccctgtgcctgcatcagaaattcagctgcatttttgaaagtgggtttgcactgtcactgcagagttgtcaattttgtataataggatttcttatcctgcaaaacctcatggacaagtggactttgggagccagagaagggatgggcggctctcaagtcctggcctggatttatgtgccagagccttggccgtgtgacttagggaaggtcactttgcctctatctgtggtcatgcaggacccagtgggaagtgaccttctggtttctttttcactgcgtttacttctcatggaagaatttgcccatatagtcctttgtctggggtggagttgtctttgtggagctgattgctaatattaacacattaacatggaggaaggggcatttcccctgtgaatccctagttctggccagcgtgtagcttaatacttatgtgccaggggagggacgagagaccctgggaaccctgatgacaaatgacagatagtgcgtccggcccactcacatctccattactgcaacaactcctatgccattctccctcgctctcctctcttcgctaccacctgccccatgtaccaccatccacggatctctgtgaaatacactttcaccattttactcctctgttcaaaccccatttctgctgcatcaaatttaaactcctaactgctgtgaaaggtcctctaaaccctccctgcatcttctttgctcatctttcccgctcagctctgctctgacagggcagctccttacttacctgagagcgtgctgtgccatcccttgtgtgccagctggctctcccgctctgcttggctagctgcatctgactgacccttgaagtttcagcttaagcccaggcccatcgttcacactctttgctgactctgccctctgagagttcttcctccgcccgcattttgtgtctttctagtgctgtgggttcccgggctgctttacatttgtttccacatattcctccatctgcattgcaagctctctgtgagaaagagctaaatctcatcagctttttgtgggggatggggacagggattctgtaaggtgtgtaggccaggactgggtatcaagggggggattgttgatggcaaggcacagcccccacttccttgctcaatgattttaccactccttggctggtctag

SEQ ID NO: 2416 - DNA, 1840 bp, Homo sapiens
ggtactaaagtaccctgagcgattctcttgatcttcagccctacatctgttgttcaagtgcttaggttaataacaaaatgtaaaatacctaccatggtttcacatagttatgtgtgtctgatgtaggggccataaccgtgtgtgtgtgccttgagaaaacttaagatctacttcttggcaaattttaaatatataatacattgttagcaactatagtcaccatgctataccttaggtttccagaacttactcgtaactacaagtttgcatcctttgaccaatgtctttccaatttctcctacctccagcccctggttaccacctttccattttgtttctgtgagttcagcttttatatcaaaacatcatgctgcacaccttgagtatatacaatttgcatttgtgaattatacctcaaagctgaaaaaagaccccaaaaaacccggcatggttcctaaccaaaggagacacttgtaaggctttgtatcctcctacagtttgcattttgtatcttctgaaattctctcttcccctagaattcatactgataaagcttatacgcatttcaaaatatatgtttgaggctcctccgcgcctgcctggcaaatgactgtgtttctatagaaatgaagagcttagacgtgcctggatggctccagataacacccagctgagccttacggctcctaatgggtcccatcctccactgaaatgagatcagaacaacccatggggcctgacttagtactggccagtagaactggacaatctgttgatgggtgtattctcaaactggtactgttctgttgggtagcccctagccactggtagcaagtgccactgaggaattagaccttaaccttgacttcatgttaattagtcagaattgcagtggccccttttgttggacagcacaggaccagaggaagtggatttgcactttgcatctgctgataggaactgaaaaactgccatgcattgcctattgacctatccatgtaatttgtcatacttggatagcagaggaaaaatctaaaatactgtgtttttcaaaagaaatggaagcttattgtattaggggaaaatttcctggggattccttatttctttcacatatacacacacccagtgcaagcatgcacacacacacactcgcacacacactggatacagttttgtaggttctttgtgtcccgaaaacataaaatgttcatttctgcattttgaattatggatttgaagatccatgctgtgcaatctcagcatcactaataacgcttgagttgaatgctccaagctcacttcacaaggcagctctcgcttagggagcggtttgcatggaggtgctttgaattccgggacagagtggtttggggaactagggggattgcagtctctgttgacaacgtgtcctttggctgcttggttgttctttcctacgtttgtgtttcggtttaaggtcatggtgttgttctgggagacattagcttaaatagcgttttgtttgtttttgctttcgacgtgtttaaacgtatggatggaaactaaagttgtcctctgggaaccagggctgtgatgtgcatgattagatctttctgtgttgatggcttgtgtgagatcttgtgattacccagcgaactgtgccaaagtttcattatttattcattccttccaatgattttggagtacctgctgtggctactaaggatatcatgtattttcctcccaaatgtctgcaactcataaacctctgacagtttagaatgtgtgtggagccgggcgggatgatcataagaagagatggtgcgcttgtcacctgtacaagccacttagattccca

SEQ ID NO: 2417 - DNA, 1109 bp, Homo sapiens
aggctggagccggggtcagctttggcaccttcctccagtcagtggccaactcctggctcagtggggattgtgctcgtcccctccgttcccctccagtcttcctcccgctaccggaacgagcctcgcgcttggcaggctgaggaggagcaaagaaagcaggattaaagagaaggaagacctggctaggtctgggtggcgtctgcagtgccagaaagggaggcggtggcggcggcggctgcgaccacggccgcgcgggacgtgaggcccgagagcaaccgacgggcagcggcggccgctccagcgccccgcaccggggccgttagtcagcagaacgcgagctcttgtggaggagcagggccggcgcgaggcgagactcgggagcgtgagcggggcccctggggcgccgccgtccttcttcgccccggcgccgggggctgtagccctggtccccgctcctctgtcgggccagtctgcaggcggagagagtcggacggcgcccggagcgcggatctcgccttgtggaggacagcgcgtcggctgcggttctctctcgaccccttctgcccggcgcttcggcccgggccgctcaggtgcagagcatgaataatctttcatttagtgagctatgttgcctcttctgctgtccaccttgtccagggaagattgcttcaaaattagcgtttttgccacctgatccaacttacacactgatgtgtgatgaaagcggaagccgttggactttacatctgtctgaacgagcagactggcagtattcttctagagaaaaagatgctattgagtgtttcatgactagaaccagtaaaggcaacagaattgcttgtatgtttgtacgttgttcacccaatgcgaaatacactttactcttctcacatggaaatgctgttgatcttggtcaaatgagcagcttttacataggactaggatcacggattaattgtaatatattctcatatgattattctggatatggtgccagttccgggaaacccacagagaagaacctctatgcagacattgaagctgcttggcttgctcttaggacaaggtgcagaaacataaagaagggaagtgattttctcaaggtctac

SEQ ID NO: 2418 - DNA, 2291 bp, Homo sapiens
gccacttcagtgcttgtgagttgatgtatgtgtcaagagaactgagccaggtcccggctgtgccgcaaatcattcacgtggtgcagatggacacacgttctgttagtcaaataagcatattagattcaatgactatgaaactctccttccaggtcaaatagcctgttatttgtgcattccagtatgatcattgccatttatttaaagtatttctacctatacagatattagttactagcgactcaagtacacgttagaattaattgtttaaaagagcaaataaacctctcaccgcaatggcaattaaagacacccagtcctgctgtgtgcttcctccatttgcttctagtggcagtttcgtgtgcatttttggtgatgatgctccacggaacatctgcagatgtgctgtcaatttggacagctctgactaccgagtgaatgggaagtactaacgagaactgtctgcttgggaactccatgaagttcgtggcttttgtgattgaaatagcatcaataaaaggttgacactgtggaacaacacaagcctgcatggacctggttatctctgacctcgcaccactcatgagaccatacctgagccctactccactttggcagaactgttgcatggcctctcttcatataatacctctccgtacaccgtacaccgcagctcaaagaaaggatatatgctccctgtgaagactaatggaactgtccctcctgatcctcctacagacttcctctggcctaatgggtgcaccattgcattatatctgccatctatacacacatatacctttcaaccctgcactctctgagatgactggactcatgcctaaataactgatgctgtccctagtgtaaggtaagcactcaatagtttctcaggaaatgaatatgataaatattttggctgtttagaggctttccttcacttcattttctgtgtcctcttatttaaaaagaagtgctcactagaggttacctgaagacatatctgatccttgaaacctgcagtagtctaacacagaggccaagatcacaggtcttcataaaagtaatactttcctcatgacaatgaagtgccacagggccaactcaaaaattgagactgagcctgggaggccatgtgggttctcggctttgtgcgggcaggaattcgacagccagccaacagagtgaagagaaagcaagtttactaagaaagtaaaggaataacagggtggctatgccataggcagagcagccctgagtgctgctggttggctttttctatggttatttcttgattatatgctaaacaaggggtggattattcatgagttttgggggaatgggaggacagttatgggaactaatgtttcctccccctttcagactatatagggtaattcttgatgctaccatcgcatttgtaaattgccatggcattggtaggagtttctttgagcaagttaacgtattataattagcatataatgagcagtgaggacaaccagaggttgcttttgtggccatcttggttttggtgggttttggctggcttctttactgcatcctgttttatcaggttttttttgtttttttggtttgtttgttttttgagctaggtcttgtaaaacagtcctgccaacttcctatctcagaatcacatgtctctcattgtcctagctcagggtgataacacgggaggcatgccaggttacttgtcacccaatattcattctcctgttctgagtcagaaatgaatgaggggcttggctgtgatgttctcctctggacagagccctcacttcccagctgacttgaggctggtgtggccttgtgtccaggtatgtggccaacagagatgtaagtagaaatcttaccaattcttccaggaagtcttttcaaagagagactggacgaccttctctctttctctctccatcctgctgcttgggaaagggatgtgacatctggagtcctggcagccaccttggagcacaagattaagagccccagctaaggcaggcagagtggctggcggaagggagcaagggcccctggggaacttactgcttaccctgggcttctttaaagtggaaaaaaaaaaaaaaaagaaattccacttcctatcagctcttttattctggatgtctcagccaaacacacccaaacccaatactgacataagttatttgtcagtattgacaaatatttgtaaagtcttcacttttgaaattaaatatattcaccgtgctgtgtaaagtataatatgaatgcttttttaaaagttatttgtttac

SEQ ID NO: 2419 - DNA, 661 bp, Homo sapiens
aaagttgggaagactacactgtgaggtcttaacaatgatgggtattggattagatggggggaggcttttatttcctacttaattatagaaccaagggattgtgggtaatttttacttttttgtgtttttcaaataaaaaaataaataaaaacattttgatggtgatggtgcaggaatagtagtgatttgctccaccatggtaaacatagcttgatctatgaatgtggttgttgacagaaaatcttggaagaagaacacttctttgatgacgttgtcagagagaaatggatgttctcctaaatgggaagccttaattctgtgtgtaatttataaagccatggagaagaggagacagagtgtgcaagggaatgaagaaaaggaacaagactattttcaaatcacccatggcactactagaaatgtatttcagcaaaaggactggctgattttatgattcctgtgtccaccacagccctctaatttttacataggtaccccacatctctctagatttcaggaagactattatccttcgactttagctttctgatgggttcacaaaaagccattagtgtgctgttggtccagcttttttctgttgcaaatatgagagctacagttctgagatgaaaccacagatgaggaaattaaggagtcaaag

SEQ ID NO: 2420 - DNA, 1119 bp, Homo sapiens
ggccaccacgcaccctgggcgctgcctgcgccttggcccggcttcaggctcaggaaaataataataacgattttaaaactatgttgagcgagacacattttactcccggaatgataatgagaaggctcggcgtagggaggggaagaaggagccccccacttatataacgacttgaagttatatcacttttgcttggggagattccgggatttccgcccgcgccaggtctgaggctggttaaagatcttcaaacttttttcccttaagagccaataaacaaacagacgccccaggggccgacttaaactctggtagagcccgagttcgctggaattctcagattcgaagaaatgcacacgcctgcggtgctcgcagagaagtccctcggaagctaggcgggtcgctttcgcaactgggactccaatgttcccagtgggagcggagctctcaccgcggcagcccccaggttcccctaggcgccttagagcaaaggtggcgggggatcgcgctgcccttcgcccgccggctcggaaccatgaacttgtattccgggcgccgcgctcctgccacagtgctcggctaaagagctctaaggaattcgggatctgggtacacttcgggatctcaggcggcaacctgtctgcgccgcgcattcctgcccagatgtaccttgtttccccctgggctggcctgtggactcttgggcagctcccgggcggggacgaggggatgcggtctgggggctagtttagaagcttcgagcgcagcgagaaaacaaagggagcctggggctgggaggctctgcggagtccccgcccgccctgcagattagcaggcgcgtcgcgtcggggcttcccgggcagctctgctctggggaattagaacgaactctagcggccgtttgcaactcggctgtgggcgcgagggcatcaacaggtggccgtgtgcagcggagaggccaatggcgaggacccggactgggggtcctgctgccatgctgtgagaagccgaagtttcatggagaggccacatggagtgaaaacaaaggtgatagggacaatagctccacctgagatcctgattaatacacagactttagccatcttggatgctccagcc

SEQ ID NO: 2421 - DNA, 5304 bp, Homo sapiens
gcccagggtagactgtatttccaggtccctcagatgcagtgcaagaggggcatatgcctcggagactatgttccccaagcagctttgtgagccttgggagaccagctcaggatgaagccttgtcttctgttatccattgctgcctatctgtctattgtgcagatgaggaaactgaagccctatcgcaaggtgatggctctgttgaattctagagactgcaaagatgaagaaactaagaaactgtggcacaaattattaactatactgcccaaggtcatacactggaaatgggtggtgaagaaatgtgaagaataaaaagttcagaagccatttgtattcaaatagaatgcaattaaaaagtcccaggcaagcattataagctcataaacaagagagctagcaagaagaaaaaaatcaagaagcaaatcttgaagcaagttataacctgccagatgtgacaaaggtgatagaaaatcagaaaagaacaaaaaaagttatgaccgttaattagcatatggaaaaagataatcagaggcccccaaggaagctggattattaaaaatgcgacctccatttcaacaaagaaattccaggcagtgacacggttttgaatttataatgaggattgatgaatagaagagaattggatatttcaagaaacaaagaaatacatgagttgaagctacagttaacaaaaaaaaggtactggaggaaaagttttctaccaaagacagaatatatcactctactcttatactcttctttgtgtttctacaaccacttcgattcttcttttctgtattgtcagatccctgctaaatgtttctccagaaggtgctggttttttctggtcatcggggcactgccatcttctgtaatcgcacctcttcgaaaaatatactatttttaccaagagtaaaaatagtattcacttatccatggggaatacattccaagatccccattgaatgcctgaaactgtagatagtgcagaaccctatatataccatgtttttttcctatacatatatacctatgatgatgtttaatttataatgggcatagtaagagattaacaacaataactaaaaataaaataggataattataataatatactataatatgtgactatagtctctctctcaaaatgtcttactgtatgtaatattttcagaatgtggttgaccacaggtaactgaaaccaaagaaggtgaaacgaaggatgaagggtgctactgtacaagcaaagaaatcccctatggatattcattactgagatacttctgactgatctcatccatagtttgcaattatcttgatcgaggtctaatgattactgttaccataacactgaaacaaggctataaagcaaagtatcctttgaccaaaattgatcaaataaacatcagcaatacaaactgttcctaatgataaaaatagttactatttattgagtacctcgtataggcagacttagcacccctaatgtctgatttaattcttacaacaaacctgtgagttttgtatgatgatctttattttaaagatggggaaactgcagttcagaggggtttgataacttactcaagatcttctagctgataagggcagaactggacctgacccaagttcttctcacaccaaatcaaacacaggtaacatgacacaatgttcctataatttgtgagtccctttacagctttaagtgctttcatatgagcaagggcaacttccaaaatctgaagacactttgatcaaagttgctatggcaagagattcagaaaacaaagagagtaaaaatcttaagatttagattctaaagttggtgaataaaatgaaagtagacaaaattaattcttagcgcttgtgagagattaagcacagtctgccaatctctttgattacaactaaaaactagacagaatatataaagcaactatctgagaactttgaagagtaatagtaggcatattgaggagggaaataaaagcttgaagatcatgactgatacaggagcaagtttcccattattttaattttaatttttattttaaaaaagtagagatgagggtctcactttgttaccgaagctgttttcgaacttcaagcaatcctcccacctcaacatcccaaagtgctgggatttcaggcatgagccaccatgcccaccgcccacccctcctgctcccccacctttaaaaaaactctgccatatcttccggtttatactcaagagcagcctgaatgctggaagtctgcagcagttgtgaatagaaaaagctccaagaaaaacgcttactttttggacagaggaaataaagcaggaagtgggtttcttacaggacaaattgttcagtagaaatacctcctctcttcattttctctctttttattctctgagtcctgctttgaggcaagccccagtcatgaagctgacttctgcagtagcggccgaggccgtaaaggcacctaactctctgaaagactttttctccgatcagtggaccctgtggtcttgttgccctgcccttaaggtgaactcagtccttgatgtgtgtaacagtgcagggaggataaaaacccagtttttaagttatagtactgggaaaagggactctgggttctggaaagtgtgggggaaatatcacagaaagaaaggaattgacaaagaaatcccttgaatctgtgtatcaaatcttaaactcaccactgagttgcacatgcataaaacagatctgaagcagcacagcaaaggcttggagaactgaactacgtgtagaatgcctcctatatcctatacctgggtggtgctcccatggtgcagacccaaatatcaaagcaaatgttttgaaaaataaaaactgacattgaaacagaaacatgcaaaaggtggatgagaacttgcactccaacctaatcagattgattacaaaaataaaaatagacattttccagagcatttaaactagagtcagagactcaaaacaaaatttaaaatgtctaggatataatctgaaattactcaacatacaaagaaccagaaaaatctcagtaattctcacaagaaagtaagaatcaacagattgcaaccccagatgatccagatgttggaattatcagacaaagactttaaagcaattataatagctatgttccatgaagtaagggcacatactcttgaaatgaagggaaagatacaagttttcagcaaataagcaaaaactaaaagaaataaccaaatgaggattttagacctcaaattacaacaactgaaaaaaaagttccctggaattattgaatagcggaatggagataccagaggagatgagaaacgtgaaaatagataaataaaaattatccaaggaaaattttaaaacattttgaacataccaaaatttgtgggatgcaaccaaggcaatgcttataggaaaatatggaacattaaatgctcatattagacaagaaggtctgaaatcaaaatatagtattataccttaagaagctagaaagagttaaacccaaagtatgtagaaagaaggaagcaataaagagcagaaatcaatgaaatttaaaacagaaaaataatggaaaaaataatcaaaaccgaaagcttgttcattgaaaagaccagtaatatccggaatgaggtgagagagagagagaggaaaaaaaaaaaaacacaagaattacaggtatcagaaacaaaaaaggagatatctcaatagatgccacagacattaaaaatacaacaagggaatacaataaacaactatgctgataaatttaagactttagattaaatagaccaattatttgaaatacacaagttgctaaagtttatacaaaaagaaatggaaaacttgagtacttttatccgtatccaagaaacagaatttatagttaaaaaccttccagcagggagaatttcaaacctaagtgtctttacttgtgagttctaccaaatacataaggaggaaataatgccagttttacatgatctctactcatcttacaagaccaacataacttgcatgcaaaattagggaaatagaatagaagaataaaaagaaggaggaagaaaaggaagaggagtgtttatatgaaacataaagtaattagaatagctaaaataattttttaaagagaagaaaaatgttggaggatgcaaaatacctgattttaagacttcctgtaaagccacagtagtcaagagagtatgatattggtgaaagaatagaaaaatacatcaatggaacatttcaataaccctcataaacatagcaacacaggcacaaaaacctccagtaaaatattaatggtgcaaatccagctatatattaaaagtatattactaccaaagggaagagggttatcccagaaatgtaaggctggttcaacattctaaaatcaatcaatgtaacttaccttattatgttttattttcagaaatcattcattagtttgtttgataaatatttttgagcacctactgtatgtctggtatagttgtaggtccttgggaatcatcagtaaaatgcattaatacatgactttaattctgcagcatttagaaaaaaaactctctgatgtttgatgggtttttaaaatatatatacatatatttttattatactttaagttctagggtacatgtgcataatgtgtaggtttgttacgtatgtatatatgtgccatgtcggtgtgctacacccattgactcatcatttacattaggtatatctccgaatgccatctctcccctctaccccccctacaacaggccctgatgtgcgatgttccccttcctgtgtccaagtgttctcattgttcaattcccacctatgagtgagaacatgtggtgtctggttttttgtccttgtgatagtttgctgagaatgatggttttcagcttcatccatgtccctacaaaggacatgaactcatccttttttacgcctgcatagtattccatggtgtatatgtgccacattttcttaatccagtctatcattgtttgacatttgggttggttccaagtctttgctattgttagtagtgccacaataaacatacgtgtgcatgtgtcttcatagcagcatgatttattttcctttgggtatatacccagtaatgggaaggctgggtcaaatggtatttctagttctagatccctgagggattgccacactgacttccacagtggttgaactagtttacagtcccaccaacagtgtaaaagtgttcctatttctccatatcctctctagcacctgttgtttcctgactttttaatgattgcca

SEQ ID NO: 2422 - DNA, 6651 bp, Homo sapiens
ctccgccgagcctccccgcccgcgtcgtggccaatcggaggccaccaagctgcggctgtagccggccggatccgcggcagccgcccgcccccgccccgccgaagcgccccgtattttgctgcagcccgcggggggtcgccggagggaagcctagagtgcgccgagcaccgccccggcaggtggaggggctgcgggaaataaaataacttgggcaggaacttgattggtagcaggttcatctttggtccgcggtagggaatctaatggagatgaagaatggtggggaagggggggcggtgtctccttgggagcctaacgtacgcttctttattttgtcattctttggagatgggtaatctttcctggcaggggcagacacagcaaactaaggacgcaggccaagctcatcctagctattgttgtctgaggcgctcgccgggagccacctgcgggcgggggagggcggaggccgcggctcctctctggagctcgcaccttcagctcccacccttgaggatgtactggaacagcccaagtttttgtgttcttgttttgttttcttttgtcccctctgggagtttgagagtgcatgtttgttattttatttgaaatctcccgttttctatttctattactacctgttagtggtactgttcacatttggggccaacagtttcagggtacttttaccctctcctaccacccctaacaacaatttttaaaaaagagagaaactaaaagccggaacttgagaaaataggattatataaaagataaaatgactgatacagaattctcaccacgtaaaggatttctgctggcttcctttaaggcatgaacttcaagtgcaacacagtgagagactttacaagtttgagtcacaagcatttgtggaatggagcgggggatggggagcagtttttgttttttctaattctggtgaggtaataaattttccggaaccttttttaagaaaggtttacaagtaaatagaaatatccgttttatgtaagcttttcaacacttgggagatcggtgaacttcattgcagttaatgaatattttctgcctttattgcttgcttttctgctttgggtgactgaaatattaactttatttgagtttcaagataccgatcatttaagaatctgatgatgaacctttaaaaaccagctactaatttcttgacataactgatacagcttttaataatgtactgttgctggctaggcttttaaaaatttaatattcatagggaggcttattcaattttaattaaaacataatattgtaagttttttatgaaacaaaatttttcctggattttctttcttttcaaaagaataagaaaggttatgttaattaaatttaaaagatgagatgaaacacttaatatagtaatcagaagtgcttgttcttaccctttctcttctttttttgctagatattattgtcacactattgctagtccgcctaaaagttatctttgcaatagagtatttataaattatgctttctgggagtcatgcaaaataatagtaaaaattcagttgagatatggggatatgtttgttgtattccagagtgagatgtagagatctcatctccatggctaagatttaagcttcgaccctcgtcgtggggtttcgactgtatcctcatcactcctagcagtacccattgatgtttattgccattctgattaatttaaaggtggaacaaatttcaacatgaataactctatttcttgttagtagtatttacttgaagctttaaacatgtcctttataaattaagcacttatgatttcaaaatctcctttggaatggctgtcagtcaaggaattctctgattccaacagtttttgatcctttaagtaagcacttgcagcatgttttaaaagtccaatttgcatgcctctcactcttcagtggttgtgaattgttttagcatcttgcctcactttaagttgatcacctggtcagccaaatcttgctaataataaataataggcctctgattacaagaaggaatagtctagtctaaaatcatgctgttggagactttgtgcatccatttgatgttaatgaaagtagatctggtgttgactatgatatccaaacacagctttacctcagtaataccatacctaagattagctaacggggccattcactgtcctgggcaactgatgaccaaactcgcagatttttagcccctgctcaaagcattacttgtctgaagactggttttccatcagcctgtagaactccagggatgtaggggattgtcagtgacccagagaaacaaccaggtgttattaggggttggatggatggagacaagaaaaaaatatagaataatataaaacatgactgcattcacacatcaaaaatcaacctaatccttcatttctgacctatggagtgatgcctgttgactataagaggtctgcaaaccgttatggaaacctgattaaatgatgtgctctgaacacatggcccgtttttatatatatgtagaggtcacgatgattcatttctaagcattcatttttatatatgtgtagtttttatatgtgtgtagagatcatgatttgtttctaagcattcatttcgaaaatcgtaataatttttgttctggtgtgttttgtcaggcaggagatgctaaatgtacaaattcaccatgtgggtgtttgtgtacaagggttcttgctttggacataaatgctcagcagtagtagtctaatctagagcctcctctcccccacctccccttccctaccccctatagatacacaccgcaaagacaggccctacacttgtctttgtctctgacacctagcgcagtgtccttcccaatgttgaatgaagacccccttctccactcttcctcctctccccatcttcagagcaaactaggattgtccctctcccttagaaagtacccctcaaattacattttctccataattagctttagtgtacattaaagctgactttccctgggtaatatccctttcatagagtcatagaatgttctaaatgaaacattaaagatggtctctgcaaccccttcattttacagatgggacaccctgagacttaaaaaggtacacaaggccaccagctggaaagtagggaatgcagaatgggacccaggtccccttactcccactcttacctatgctctctatcttattctgggaagttcctttaacattgaaaaattcaactatatgggatgaaagggagatttttctttttaaagaagaaaatataatgatgctagggattagtctactatttttctcaagttttttgttcttcaaagtatgtgtgaaattgaggacataactcttcactgctctcagttttcatatgcttttcttagtgtgattatcttgtgttatttattatgattttggcatttaaagatccatatatttgatacaacctggctgctaaacacaagatagccattcatctggtgctcagagaagtagtgatctgatccaatattagaagaaaaacctggttattttaaaaaaatctactcttgtttgaagatattatttacctattgtttttcagtatttgaaaatcaaaatcaacattttcatggaaaatataaccaaagaagtaacttgaagtatgtatggtcacataagtgagttataaagttgccagatgagcaactcaacagaggcgagtaattcataagcaggccctgaattacaaggaaccccaccaaacaaacaaacagaaaaagaatcccattctgactctggaatgtagaggggtatagtataataaacagatatggctataaattcaagtagacctagctctatgaccttgagtaaatttcttaacatgtctaaggctcttttatctcgaaaatgcagtatttctttataaagtctgatgggaacacaatagagcacagtagggccttagcattttatctatagtgtattaggtatgctgatttccacagaggattcagagcacagttacttaagaatctgagggaacaccctttcacctctcccagttgctgtctgcaattaaaaaaagtgcttttaatcaaaattttatttgggaggttcaaattttacaaaacaacacaaaacctctaatgtaaaaaagcaatggctaagtaaataatctacagactggtaaaagaaataaaaatttggtggctttgtaatgtgcagaaaaataagtctagacaaagtattcacaggaaacaatataatcagtattaatgtattgatttggtgtaggagaatgaattcatatttgaattaactcataaattgataataccgagaccagggctaaaactccattttgcttaggacctttcctggcttttatggtttcttgaatgctttctgcctgtgtgctcccagagtcgggtttgcatagttgatttcatgagtcttgtttaaagatcagctatatttgagaaaataagatttccatgatatccaagaaatctaccttctgcaccagaagcatggatacttacagcggaataccagcactttggatcacttaaaatacagaaagcctatttcacaagataaacaaatcttgagaaaataaaacaaatcatgctgaagactttggtaactcttggtgccaaacttttgccttcatgtccttttaaaagcaacgatctgtcttcaggaaagttctgaaacacaactgtcagtatttagaggatagcaaaacatatttactatctgaacttatatttgattgtgccctttcctccagtgaaaattgaggcaatggataaagtattggcttgggttcaggagaccagttttctcttcccaggtctatggctgactgaataatcttacgtgtgacacttaatttctctaaatgttttctaatccatagaacagaaataatgccactattctcataagaatgctgagaggactaagaaaacaatgtcagtaaaatccacttagttcttcatagagaggttctacataagtacatgttattctttaaggctgtggattcaactataagaggaatgattggtgtctaatgttaagtcacattttaatgatgtataatcaacaagccaagtgcttattaaatccttttcttattcataaattttaaaaataagttatctttctcattacaaaggcaacattcacagatatttgagaaaattatattgttaaatgcatcataaacattcatagattatgcttacccatccttatattccagtaccagctgggcagatatggtctgagttttccttttaaacagggaatgtaaaatatcaacaatattcctatttattacagaatttacaatgtatgtcactctgacccattttttacatagtaactaaaaagagctgagtgattatcacagataagcatgatctctgggaggtctattattttgactcatccttgagaaaggtttttaaagacctgtctgcaagagatggggatagtctcatttgtaaagtatttactagagccaataataaaagtgcatttgcattccaagaccagtttatccaagccatgtgaaatttccaagtcttgcaggccaggacacaggctgtctcaaattgagggaagagggctttgaggagcctgctggtcagtgctgtgagggaaaggaggtgagagacagggataaaggtcacaagtggacatcaggaaggactaaagcacttgaggtttgtattctgtcagcagaaggggctcaggatacctatggtcaaacgataggatctggggaaggtcataatcgtagcaattgctcaataaatacttgcccagatttaggagtgagtcatacaggaaaataggacatggatttggacaggagggtggggacaagtctttcggtatccagaactgataggaagctccacacaaagggagtacctgatatgtaacagttcatccaggccagttcaccctgtactgtccctagatttgcacagttcttgatgagggagagcagcttctcatgagatgcttgctggggatgtgtggggttatcctcagttctaaaattgctacttcaacaaatgtgaaatacctatttatacttctcaacttgtttttataaggatggaaatgatatgaaatggtttttgtactttacagtctttttcagtcaaaaataagcactatttgactgaaaataagtataagctttaactgaagaagatgtaagttggctttcttaattttattgcctcattttctgaacccgtttttttggatgcagaactttccggagtattgatttttaattttttgatctttcttttttctcttcctccctctttctcttcttctttccctttctggagagtttcttcacctttttttcctacctttctgttgagatgatatttttgatttccaagaggttttaatgttctctgatttattttttatagaactttgctctcatttaataaatgtaagagcttctcctaactctacatattgttcaaagttttcttctgcttctgctttatctgagtttcttctctttctctttttttgcagtgtttgtttttgtctcatgtttgaggttttcttgaggatattatttagtatgcagaatttcatttagtcctacc

SEQ ID NO: 2423 - DNA, 7558 bp, Homo sapiens
gataaagtttgattcctttctcttttgtgtatcacccttaccagtgagttttatagttttcatgctttgataatggtgattgttattttttcacttccagatgtaagactcatttgagtacttttaaaggccagtctaagggcgatgaattctcttagtttttacttatctgtgatctgtgaaatattttctttcatcttcatttctgaaagatggcttttctgggtatcattatcttggctggcagtttttttgttttatatttcaatgttttgaatatatcatgccattctttcctgtcctataagctttctgctgaaaaaatccactgttcgtctaattgagattcccttatatgtggcttgatgcttttctcttgatgattttagaattctttatttgttcttgacttacagtagtttgactttaatatgccttggatagaacctgtttgggtttaatctatttggggtctttgagcttcctggacatggatgttcatttttctgccaagacttgggaagttttcaactattatttaattaagtatgttttctatacccttttccttctcttttccttctggaatacccataatgcaaatatttgcttggtggtcttaagggtgtcccagaaagcctataggcttttttttatttttttgtttttataaatttgtttttgtctgtctgtattatttcagaagacctgtcttctggttcagaaattttttcttctcaaagtcctttcctacaccagcattctcaaagtctgtatgatttttctaacctagtgtgtcaactaaaattaagatctttgctaaattttttaaaataacccagcagaaaacaagtactgttccagtccactaataatctccctataatctctttaaatttgtaagttggtcaaatctaccaaaaagattggccaactggaaaaatttgattttcaaatatacttctaagtattcttatgaaaaagatgtaacaaggagataaagaatggaattctgggagaaagttgtctttatttacaaagacctttggaggaagggtcagctaaggacaaggaggcatgaggaggcactctaaagaagaagctggaaaactgcctcctaaataactcaccccataatgcatcctcaagggatcatcttaagcctcatcctacttgtggcagatactgtagtttttttaggtacaagtgagtagagcaataggttagcctgtcatgctaccttgcatctatgatggagaggtgtcatctatgtgctggggctgaaggatgtgccctatatttggatcctcagatgaaattgtctggattagtagatcccatgtcaccttttagaagcaaatgtgttaacgggaattacgtaccttttgaaagggaatgccttcttaactatagaaaatgcaaccgaaactgacagtggcttgtattgttgctatgttgtgcacagggggtggttcagtgacatgaaaatcaccctgtcattggagattaaaccagccaggaacacgagtattcccatgtcatctggagtctctaacctctgcttctccaatgccatcacccctgcagagccatgaaccagtagttatttcaccttctccaactcagccaatagaaacctagattacaacaacagaaacccagattacaacattacaaacaaggacaaaacccaccaaccccattgtactcttacacaacacatgggaatggcaccatgacacattcttcaaattgcctttgacataacaatcaaactcatgtccccagcacaaaatccacagatcgccaccatcactaaggggatgtctatggaaatctgtatttctgcctggtgtttctcacttttttggatgtcaacattaacataaagtatttctacatcatctgcaagatgctgcaactgcatgtggttctgttgagagaccttctgtgttagtctgttctcacactgctataaagaactgcccgagactgggtaatttataaaggaaagaggtttaattgactcacagttccttagggctggggagtcttcaggaaaattaagatccattgcagaaggggaaacaaacacatccttcttcacaccccaataggaaggagaagaatgacaggtgagcaaagaggtgagccctttataaaaccatcagatctcatgagaacttactatcatgaaaatagcatgggggaaactgcccccatgattcaattacctcccaccaggtccctcccaggacacgtggggattatggggactgcaattcaagatgagatttgggtggggacacagccaaaccatatcaccttctaattggagctttgcagagtgcaggtgaaagacaagtgcaagcagaagatgatatctatattattgaggttaatctttatgtcatggattaaaatggtgcactttgaggttttatgcccatcactgtagaagacagtgaccagatactaccatctggtctgacaagacatactttaaactccaggattatttttctatgtcagtttcatctaacatttcaagatgtcaatggtattgggtagagtgagtctctagctcaaaactctgtgtagtcagcctcattgttaatatagttctcattttttatgctaaaactgactcagtccttctgatcattgcagagttccctctccaacatgaacgctttagaattgtatgttctctttagactccacaaatcttgtgtccatcaaagacaataatcactgacaatgtaggaaatgacttctatcttggccaccaaagctgctgagaagacagaaataggatttaaaaatcaaatctgatttgagactttatttgaaagaaattcatgattatttcttatttctatattataactccaaatgttacatttcttaggttcctgcaagggttcccagtgaacccaggtttttatttcatccatggaaataaaataggaggtagtctcatttgtctgtaacaggtgtatttgttttctcatggctctggaaatatgatgcattcagtacttgatccctggatcagggtagctattttaccagtcaaaagaagtgagtatggaccaagtagaaactaggtggagaaaatcatttgccatgtgattaaacacttttatgctgtttctactatgtttgtgccacaatactaggcactacagtaaacaaccagcaggctctctcaactaatttttacagggcagaaatgaagaagacagggcagaaatgaaagggaaaagaggaaagaataggaaaaaaaaagcctttctgccttagaaaagttacattgcaagtattatagtgtttgaaactgtcactagtttcaacccaaattctaaacttgtaaatgccttcaaaccacttatatatttaaaattgtttcagaaagttgaagggtctttttcatatctaatgaattatggtgttatttttcacaattcaattgtgaggcttattgtaaagataccttcagttaccagtataattgttgagaagtatagatttgcgagggctaggtttgtcagaagagaaacatttctacatgaacagttaaagctgggcattaatttctatttcaatttgagtaaaccctgaataattcatgcttggggtttagaggtgctcccatcataatggtctaggaggacaagatgcttgctttcaaagtgaacattttcaacactgttctgcagaggtctaagaaactaatagatcctttgaatgaaggtcctatgggaaaataaaattgtgactcatggtatttcacatttcctaaatgagaccagcctgatctggcctaaatatttttttcatactacagtgttttcttaaattgatgcaacatgcataaacctgggaatttgaaattaaagctcagatttgtagcttctctgaaaagacttggctagattagtctgcattcctgtgtggtcagggccccactagatggggccacattctctagccctgcctcctcatgtttgttacctgcctggtgcctacagggctttcagtttatggcacctgccctattctctatacctttcctggatatttattatgcatgataaagcctctgggaatatggttggctttgtttaacacagcattgcccaaatttgtttgaacacatgagcacagtgactagtagcattctgtgaaacagaatatatagagacttagggtactaaacaggattaagaatagggtgagagttctaatcctaactcttaacagtaacattagggcacattgttctttatgtctaaatctttttcatctattagatgtaatcatttccataccaactatgtcatatgatggtaactccaataaaatgttacttgtgaaaaccattatagattctgaagcagtttggagaacttatttaaaaatactatagaaatgcaaagtgttttctcagtagatttcataataatagcagatctagcattagttctcagtaaatcatttcaatggtgttatattcataagtctcttgggtatctttttaatagtttatttttgaaaaagttgatgagaaattttcctgccctcttacaccgtaaaaaattgtcaataactgagagagagaatagataagagggagaaagggatagaatttacttaatatgaatttttcctataaatatattaatcttatagattgcattgagttttgttttttgtttttgattctttgagacgcagttgagattccattacctacaatctgtcttgggacattgggacattggtgtaattaagactgtatatttaaacctaagaagtttttcacatctttaagaagtagcagagccaattgttcacttatgtctataaagatgaaataattttgtgagtacataaaagtgtgagaaactcttagtggttgtctaggttcatttgtatgtgcactcatcaataacatttttttgtttttttcgttttgaaaaaaaattcttgggcctggcgcagtggctcatgcctgtaatcccagcactttgggaggccaaagcaggcagatcacgaggtcaggagatcgagcccatcctggctaacacggtgaaaccccatctctactaaaaatacaaaaaattagccaggcgtggtggcgggtgcctgtagtcccagctacttgggaggctgaggcaggagaatggcttgaacctgggaggcggagtttgcagtgagccgaggtcctgccactgcactccagcctgggcaatagagtgagactccgtctcgaaaaaaaattattctgcttggtctgttctgttattgaagctctcaattgtattttttatttcattccttgaattcttcagctgtaggatttcaatttggttcttttttgtatctatctctttaatttctcattctggatttcattgacttatctatttgtactgagttttcttaagattattatttttgaattattttctctggcattttgtgtctttccttatagtttggttccactactagaggattactgtgttccttcggaggtatcatgtttccttgctttttcatgtttgatgtgtccctacattggtttctatgcactcagtggaaaagtcacatcatccaattttatggagtaggtttcgtaagtaaaggcttactcatatgaatgagttttgggatattagttgggtggggtacatttgctgtggtcctaggtggatgcagtagtgtagtgtccacatagattcttcagatgcagtccatgctagtggcattcatgagtgtctcggtggcctaggctgagagagttgtggatagtggtggggcagctttgctaggcatggcctcactgtgctgtttctcaggttgagggtgcatgcctgcatatcatgggtcagccagcttggagctggcactggggttatggggagttactctggctgggagtacatatacacagttgcttagccagcctggggtgtggctgccaagagctgcccacagggatgtttctcaaggcctggaacaggagcgcaaggctcttcagctgacctagggcatgtcggccaggcctctccaggggagggctgcttctcaagcctgggatgtaggcacacagctacttggctggcttggaggcttgtatactggggatggtccccagagctatttctcaggcctgtgtcataggcccacagctgctcagtcagcctgggtgatcgccctccaggggcagcctgtagggctgtttttctcaaaccctgattgagtgcattgggcctttgggtagctcagcgggtgcagcaccacagggctgtttgtacatcgttggttgtgggtgtatacttcacctggcctcagagcatgtcagttgtttggaggcttcatggcctctcgccctcaggagagggcacgcagcaattttgccagttcaagggtaggtttacactagacaggactgccagactgcttttgtgtctggaagtgagttggtttctctgctgtgtaggaccagagtgacagccaatcctggacccaggccccatgcagcttaggttgtggcagtcagccacccatatgggcttggtggaatgaagatagaaccccagtggtgtagaggtagtgttactgactttcagagcagggtgcactcctgatgttactctggtcttaagatggctctgtgctgtagaagcttggcatacaaggctaggtgggagtggggagtgcgcgcattgttctcctaatctgggacaatgcagctgtgagggttcctggaagccctccaaactgggctcaccatttatgaggactatgacattctcttgtagaaaggatggtaagtgtttgtggtagcaatgggggctggtagtgttcttctgcttactttttccctgtaacaggaagtttctgctgctttggggcagatctcatccaatcagagaagatggagttacagaggctaggtgtctccaagctgcccacctggacttctaatcaccacaggtgcatctgcacttccctgctgcactccagtgctctctgttcaacactccaatcaaatctcatctgtatattcattgccttgtctctttcttgtatgggggaactggcatcaggcatctgtagtcagtcatcttgctaatgtcactttgcgttgttattttttttttccaggtatttctggtctgcagatgattaagtctgtgggtacagaacctgcagttagagaaggccagctgtatacttcttatgcgcttctgccagaaaaaattataatgaactactacgagaagtataagcctcgaatgaatgagctggaagcttttaatatgttgaaagttgtactggctccctgtatagagactttgattcttctggatcgactttgttacctgaaagagcaggtaaattatgttattttaaaatacacaacaaatatcttattaaatacagtaatatagagccacttatatctaggataagagtctttcacataaaactagtaagaaaatttttctcattatattttcatagtttaaatgttcattccatc

SEQ ID NO: 2424 - DNA, 593 bp, Homo sapiens
ccctgagaagcgggctgactcgccaccagagggctttgtcaccgcccttcaaacgatcctcaggcacacagacagacagacagacagagggagtcctggatgaatggcaaacccttcagattctaatttgtttctcaatcagttgcttcctcgtgtgaaatgaggggacagacagctgatctttctgagctgcccatggctgggaccactgcctccattcccaacaccctgctggggaccccgccttccaaagaacatgccccaggcacacaggtgagctcccgccatgcactccccgtgaaagggaagccgtctggaggcagtgtggcacctgaagacgctggagctgctgctgtcagggacacacgccctgcccattcatctgccttctgcgccgggagcccccgcagatgcggaagatgcagggaatgattcagccccagccttaagaaaaagaggcactgaagaaaatgagtaaagaggagcagagtttcttttttcctcccaagtgaatcattgaaagaagtcagatcattccagatttcctggtctccttccctcctgaagaaccactggaggaacgaggactccca

SEQ ID NO: 2425 - DNA, 1354 bp, Homo sapiens
atatgaggatgctttttgagaggcttttcttcctgaaagatggcaaatgcttcaaaaactgaacaagttgataaattataccgggacgagctcacccaccactgaagtgcaaccatctttggggtagctccctacagctgtttaccaccatgctgtggtgcctaggagcagtctgtcataaagaaaagaagaatgcacttggaatataagcaacaggcaatttgcagaagagaagatataattatctagattggaatatgaccaggacaaccataccattcccacaaaccaccaagaaggcaaaaaggagaagaatcagcctcacctctggcttcaactttcccaggaagagtagaaggggaaaatgccaactcttttttccaaagcaagaacggccagaataagatcagttatgagagaaagaaccctaatacccaaagcctcttctatcaccagtttcctttttactggtatgcctcatttgctcaaccttttctaaagtctcatgcttatcataagggatgatgtttgctacaggagacaagaactaggatcttccttccaacatgtccctgaaaaggaggagcgaagctatgatgtttccattgcttgctcccaaaccattgatctttaatttcatactacctgagaattttagcacaacacaaactccttagtgaatggcctaggtttcttgatgcaatattcaccttgaattgttttatactagcacttgggcagtaattaaagggacctagaaagaagcaggggaattgtggaggtgagctggggaaagaatagggaataaaagtaagacaaagagcacctgaaatacatcagctttgcctccccttccttctgccttgaaggcttctatcaactaccttggctacaccctcccttcctaccataatcacctctccagattcaaaaaggcctgtgaaagatttattttctctttttttttttgagatggggtctccctctgtcacccaggctggagtgcagtggcacgatttcggtttactgcaacctccacctcccaggttcatgggattctcctgcctcagcctccagagtagctgggattacaggtgcctgccaccacccccggctaatttttttgtatttttagttgaaatgaggtttcaccatattggctaggctggtcttgaactcctgacctcaggtgatcctcctgcctcaacctcccaaagtgctgggattactggcatgaggcaccctgcctggctgagagatttattttctaacctccttccaaaacaccaccaggctaaaataaaagggttctcgatttcctatctgacataagctatcccttgaaaaaactgag

SEQ ID NO: 2426 - DNA, 1609 bp, Homo sapiens
ttccagaacccccaacatctcgactaggcagcttcctgtgcattaggaacagaatctttcttccctgagaaatcttagttcccaaatgctatgagaggaaggacattgcctacacggtaggtcagagacctccactgatttatgtgtctgttcctttatcaagcaggccctcagcctagcggtgcagagaggacatggatcttcccgagatgcccacagtctatgagagagaaagaccaagaaaccgctggaggactgggtgagcagtgctctgaaccggagaggggtgtccgactcaggaaagacactgtgaaggaggcctggcaggttctatttttgaaggtctgggcagggaccaaggcccagcaagtgtagccaaatcacacagcttcatctgccttccctggccttgatcaccaccacccttcctgctccctcctcttctccctcctggaagaatgggtcctgtcttcaggccctgagcatcactccggagagtgagacagacagacagacagacagacagagaaagagaggtggaggctgagagcaagaacaactctgctggaccttggaatcagagagatttattccatctctcctaaatttgaaatatttttcctgggttctctccttgggaacgcttatgtgtaggattaatttatgactagatcccaaatgaaaacagttcctaagcccaacacccaataaagtccccattgagtttcttctcacacttcctccccacctggcaggcgaggccgctggctctggtgtgtgttctgagctcactgcaggccggccactctctggggcaccacttctgtcctgtgcctggctctgtccacagcacaggccccagtgtccgccccagcgtactgccttgctcacaaatgctcgtttgccttccgttcttaatttataaactgtttttcaaacttgttggctgtgggctttgatcctggggctgtgagtcccaagcggccaggcaccaggcatccactgaagcaggctgtgtccacagcacccaaacaggctggtcctgggactcactggcttggaagatcagaactgaaaagaccttggaaatcacctcattttacagagaaggaaactgagataagtgagttgtccatcgtcatgcttaaaacaaggttttaatactggatttctgttgtttttatgccagtcaacctcagaggcattgggcaatggaatcttctctagttgactctatcctggtgtgagagggatttggtgagtcaggctcctgacccacgctcctgagagcagcagcctatggctcaaggccacaagggaagtgatacggtttggctgtgccccatccaaaatctcatcttgaatttaatccccataatccccgtgtgtcaatggagagaccaggtggaggtaattggatcatggggtggtttcctccatgctattctcatgatagtgagtgagttctcacgagatctgatggttttataaggggctcttcccacctttgctcagcacttatccttcctgccaccttgtgaagaaggtggcttgcttgcccttcaccttccaccatgattgtaagtttcccgaggccccccgactgaac

SEQ ID NO: 2427 - DNA, 1115 bp, Homo sapiens
tgtaatcccagctactcaggaggctgaggcacgagattcacttgaacccacgaggtggagcttgcagcgagccgagatcatgtcactgcactccaccctgggtgagagagtgaaaccctgtcaaaaaaagattttttttctttgttgttctactcagaattcttaagtcaaggacagaatgtccatttttaataagctccccaagttaattcttatgatcaaacatgttttaagaattattatgctaatcggggcaaccataaggagaccctgtctctacaaagaaattaaaaaattagcccggcatggtggcatgtgtctggagtcccagctacttgggatgcttgatcccagaaggttgaggctgcagtgagccatgaacgtgccactgcactccagcctgagcaacagagggagactctgtctctaaaataaaaaaagaaattcaacaaaaataattcacagggctaacacatgaattaattattcctttacttattcccttctaggactcaagtcttccctactttggtgaatgtttgaagcctagagaaacatattccatcaagaaagaataataattaatagaacatacggggtattgctatattgcccaggccggatttgaacgcctgggctcaagagatcctcatgcctcaacctctgagtaactgggactacagaagcgaaccactgaacctggaaagccttttttttttttttttttttttttaagactgagtctcactctgttgcccagggcagtggcacgatctcagctcactgcaacctccgcctcctgggttcaagtgattctcttgcctcagcctctcgagtagctgggattacagatgcccgccaccacgcccggctaatttttatatttttagtagagaagaggtttcaccatgttggccaggctagtcttgaactcctgacctcaagtgatctgcctgcttcagcctcccaaagtgctagaactacaggtgtgagccactgtgccaggcccttttctgtttttttagggcaagaatgagactgtcactttacttgcaattacagctgtatagcagaaatttttaatgaggaggacatttttaaaaatagtatttaca

SEQ ID NO: 2428 - DNA, 488 bp, Homo sapiens
ctggaggctggaaaatctaagatcaaaatgccaacaggtttggtgtctggtgagggcccactctccacttccaagacgatgccttgaacactgcatcctccagcgtggaggaaacacagttcctcacatgtcagaagaacaaaagaggaaagagagagcccactctcaaaagcccttttgtttaaggtattaaacccaccatgagggaagagcctacatggccttaccacctgttaaaggcttcacctcccaagaccattacattggcaattacatttcaacatcaaccttcaggcctccacttaagcgagttctgacgtcagtgaatacttctgcagcatggaagtgccaggaccctcgttggcccctgatggccaaatagcctcactctccattagaagagaaagcctcactctccattagaaggccaggagagcgaaatcagggattgctttcaaaacaaacagtgtggcaataaagaatttcag

SEQ ID NO: 2429 - DNA, 1410 bp, Homo sapiens
ggcacacttactcaaagagtatagattgagaatatccttttgcaaactatgtataggatactaaatagaattatgtttcttagcccatggttctatggttgtataaaaacaaaggtttggccaggcgcggcggctcatgcctgtcccagcactttagggggctgaggcagacggatcacgaggtcaagagatcaagaccatcctggccaacatggtgaaaccctgtctctactaaaaacacaaaaattagttgggtgtggtggtgtgcacctgtagtcccagctactcgggaggctgaggcaggagaatggcatgaacctgggaggcagaggttgcagtgagctgagttcgtgccactgcactccagcctgggtgacagagtaagactccgtctcaaaaaaaaaaacaaacaaaaaacaaacaacaacaacaacaaaaaaggtttttttgtgtgtgtttttgtttataaaccaaaatctacaatgaatccaaggtctttgaagttgatcactctgcaaataattttttctgtttattaatttccttctcgtaacatttttacatgggcatctactaattttaaggcaatattcatttattttaaaaattagtctattatttgttatgtgcttgcattttacagatattacctcatttgatctttgtatacacctcattagatactgacagctattcaacaaataaagaaaaagaggcatagaaaatttggataacttactaaagtcattgagacaacagacagccaaggcattggcacagtctttggacatgaaaatcatggagaaggaagaggctgattgttatccatgattaggcagtgcagatatagctcaatattccaaatgggatgttttggccttggagttaagttccaagagcattataaaataatcacctgtataggaagtcctgacttaactctattaacaacttcgtaagtataagaacaattatcgtactatttcattttgataaatttgtattctatttttagcattttataagacatacatctcttttgttttctgataatgataaatggagataaaagtaaagaatcattttccttctcttgattacatttgcactttcccattccaacttctcctactcctgactacacctgtcttcaatatacgcctagctttttcctttaaccaaatgtaatttgttcaaattgtcctttacaaactttaagaaagcctatttggtatatatgaggcaacgcaaggctttaaaatacttagcatttctatgatacagctcattttcaatgcactttaaaaatattagctaattaattaattagttcctgattacaaggtggcagaagttcaaggagaaaattgacacatttctctacctttataaagaaaacttgtttatata

SEQ ID NO: 2430 - DNA, 9401 bp, Homo sapiens
ggctgggaggcacagcgcccgtgtgctggaggcgagttggctccgggtgggggaggctggggttccaaaccagggcaggggaatggtggccctgcgtggctcgtggacctctctcagggacccctctcagcaggggccggaaaagcaggcccacacccagtggtcattgcaggaacttcacttgagctggtctgcttgtgagcctgtggtttggagaggagaagacgcacttccccatgagaaaaaggtggtcatccccatgggctccacagatgaggacaccggccctcagctctgccccctctcagaagccttcctcacctgggggttctgggtgaagggagctccccgccagagactcatgtgggatcgtgtgtggaccgtagagccacagagcgtcatctgtaagccaggtgaaatgcgcaacctgcagcccctccctcctcagacctatgagtcacgatctgcgttttagggaggcacatgaacttgtgagaagtgtgctacccctaccctctgaccactgcatgagcccctctttcaccatttagggcttgcagggtttgaagaattaagagagggtcttccaaatgcctcctttttagggggttaaacctttatgattagagggaaaattattgcaagaagcatagggatgcatcagaggtcaatagggcgcaagcatgaaataccactaacactatgttagataacatcaggggtcaccttgatgttggctgcggaggaaagggatgtccagcccttgaggacatgagatgtttgctgagagacacatttactctgatggcgttggctcaagcccaagaggacgctatggacataagtgtggtctgcccctgcctaaccctctccagaaataggccaccagccacctcctgaagagtgaaagttagggacagcagggaggagagggaaggggccggaggacaggggtccccaggtcacctaatgatgaaactcagttaaccttgaggcagactgggtgagcctgcggttattgcaggggcttcttagactaactctgccccgctaaactgccaaggtctggatttccttaataagatgaaaatctttttataacacaattaggagagaaaatgcttaccccacaaaggctgggttgaggtaacacttaagtgtgaatgggttaaagaataaccagccaatcaatcaccaagtctcaacaaggagtgaagacacggaactctcctggttttgctggggtgcactgaacaagtgtgggaaagactcagataaaactgatcagaaggctgggtgccgagcgtgcattttgaagtctctcctcttagccaggagtctgggggcctagcttacgtcacagtgagaaaggaagcatctcagcaagggttatatttcagtcaggcagctgcaaagaccacagctcaactttgcattcttcaataaagctttttgctttttttgtttttaaacccagattatttcatacaaaggaggttggctcttagggctttattaattggagcattatatttaaatgtcttatttttccatctgatcctgtcttactcttcgtggcttcccttgtagcaagcataaccctcctcacgtaattcctgggtgatgagtgaactctgcatagatgcccagaggtaaatggcctttggaagggccaagaagaactttggtgggataatttcctctcctaggatggattttattttccttattgtgttgtcactagaacggccacatgcatccaggtctctggagtaacttacttttgttttctttccatttttaaaaagcaaagtggacatttttctcaagcgttttgaagttcaaattaacatcatcagatcatctaaacgctctcagatgggcagaagattggggatgggtcgggggagtgggatcactaattaccacattcaaatgtgtggattcaaatgctcctatttctcctatagtttagatccaggctttaacttcagtttcctgtgtgacctttgagaagccatccctccaagtgcttcctttgaagggtattgctattgccctaatttctcagagaagtaaactgaggctgagagcagtccgggggtttgttggaggccacagaaccggttagaagaggcgtggattaggatgcaggtattgtgactcattctgcagacttcccttggggttttcaatcttgtcctttctggtcatgcccatgcctgggtttagacacatgctgagggctaggcaggagtgtgttggatgttgtggggtgagtgtgggaatggagggtagctcttgcagtgctcaggctagagctggtcctaacccttccatggaggggggaggggtgatagcaattcaggccagaccgtttcttggaagggcagggtgtgagtgctgggtcaggctagtgaggcatagttctacatgattgcattcagcttgcaatagctgatggcactgatgaatggagtctctgggccactcctgaggctggccagctcccctgccttcccctccgaattcagatgccctcttttgaggttgctgttctggtcaggatagctaagctctttccttcagtaggccgttgttttattattctcagattatctgggaggggtctttagtctcctctcctcagatagatttagcacatctcaccttgatggttcctgaagaaaggactctgactttgagaggatggaaggtcggggagtgagctgagatgagacgagctggcaggagcgctggcagcgaggaaggcagctgcagggaccctatccaggtgctgtgttgggtccaggccttgaaggcaaactcctcctactccccatgtgagctgacaggagtgtctcagggagggggctgctgaggttgtcttcgggccacatggctgctgggcatggcactggattcaggaccaagactcccgggctctaatccttgctccttcagttcacgttcttctcttctctgggtcttagttttctcatctgtagcaggagccaaccaattctaaggtcactcttagattctacaggactctcactggaagagaacccaggaggggcgtctgggaggcggctgctcagggtggccaggtacgaagccaccaggcagaggcacaggaggcatccctgaatcaccgaggagtcacctgccatgagcaatctgtggtgagagagaaggaggtgcaggccagtcaggggaaggaggtgacttccaaaacgccagggaagtttacaagcaggttttgtctaagtgattggccagtaggcgctagtagcaaacaaaccagcgcagggtcccaacttggtcaggagtggaatgcttttttttttttttcttaaagataataaatccaatcaggtcttttatcttgtttagaaatcataaatttaacatgtattggggttagcagaccagttcaggggctgtttgggggcattgagtcattaggctgggagtatttacgaggcagagtttaaaggacaccatttaacaattcttggcctggggctgtcttggttgcagctttgggcatcttttgggattctgtttggaagttttgcttgttgaaatatagcttagaatgcagagaattaagtgccttttgaaaacattttcatcccatcctaggcagttaaattcccaatactttggaatcatggctataattcagtttacaaacacaaatggagtacccactatgtctttttattttagtttattttatttttgagacagagtcttactctgttgcctaaattggagtgcagtggtgtgatctcggctcactgcaacctctgcctcccaggttcaagcgattctcctgtctcagcctcccgagtagctatgatttttggtgtgcgccaccacgcccagctaatttttgtattttttagtagagacaggatttcgacacgttggccaggctggtcttgaacacctgacctcagatgatccgcccgcctctgcctcccaaagtgctgggattacagctgtgagccaccgtgcctggcccccactatgtcttactacctgcaagacacagtaccaagtgtttcaaggaaaatgacaattgaacaatactaggtccacagcaggtgactcaacatttcccaaattgtattaagtttggggaatttttattttcagataagaaggcacatcaacacacatctacatgctgacctacctgtgtctttttgttgtgggacttgggtcttggttcctgaaaactttttcataattgataggtgaaaataacaaaaatgtggtagacatgtcttggaatgaacactattaaaaagaaaaataggactctggaatacaaactggtttagacagtcaataaatgaatgtctactcagtgggcacttggcaggggtaaagaacatgctctccacttgagcaactgtgaggtgtatttcagttattcctccaagccatgtagcattattgccattttccagataaagacattggagcttaaactagttaagtggctcgataaaggtcatctagctagtacatggtaaagtcaagtctttctgactcaaaaatccatgctcttattaattaattaatttaagaaatattaattgagcctttctcatcaaacatgctgcctccacatggggcactctgtgtgctctaaggggaagaatcagacaatcaccaaacacagcacaatataacacattttgtaattaagtgctaatttaagagctatatgaattcagggaagggagaatatgtcagctggagaggcttggcaccatgtcttgagaggatctcaagctgggtctcagagcacagaaaagatttgcaggaaccatgaatagagaagagcggcagaacttgtgtctgggggcagtgagatgcagaggtaaattggagcagatgctttaactttgcaaggtcacctgctttgaggttcaattataactacctggagtggcctttcaaccctcaaatagtgaagagggtggtttcattgtctaactcccacgttcatctgccttaatagtgactagctctaagtccagaaggagaactgggaggggtgagaatatgaaatattactcattgacagcaatttccacatgcttcctaaaacaataaccaacccaaattacctacatctacacagatgacacaggtgatacaataatgaaataattgatgaaataataatgagaggagtcctaaaagtagagattttaaaagccctgtgttcccaagagccatatgctactagctgaaaagcgctcctttctgtgcgtgatcaaaaccttttctgttcccttaaaaaataatacattggtaagcaggtgtttcattggttgaagaggtcattgctcggtgtcaggttggttttcagagaacagaaatgacagttctatgaaatcaacttgaacaaggtatttaactcagcttctcagaagttgccaataaactttatttaaagagattctcagaggaggctgttgtggtgcctctaactgactgcatcctatgcccactcttccctctcttttggccttctttttcagacttgtgtaaacccaagaaggtgggatagggaaagagattacaggatggtttagtgctctgcagttggacaggagaggttggaagttgtggggtggagtcccagaagaacctggtggctccaagtggtattgtgtggcttcttagccatcacatttaatctccccgggggtggctgttgttgcgatcctctgctttgccactggtggtgactagtgggaacgtttctcatagggttttggatggatgtccatgtttatctcttgaggcccattaatttggttgcttgggcactgcagtgatgggtctatgccgtgtgttggaaagagcactagattataaaagaagacttggtcctggacagttctgctgcatggctttaggtgagttccttaaggtttctccatctcaatttccttatttgccatctggatagttactctagataatctccaagctcccttccaagtctgtgatgagaggccaaagatgtaaattcagtctcctcatggagtagacagtgctgcgttgtgccagaatcacagacagcagccctgtcctatcctcaccgtgactcctctaggtgagacggtcagtggttcagaccaaatcctttgtcttttttttttttttttttttttgacagagtttcactcttgttgcccaagctggagtacaatggtacgatctcggctcactgcaacctctgcctcccgggttcaagcgattctcctgcctcagcctcctgagtagctgggattacaggcgcccaccaccatgcccaactaattttttgtatttttagtcgagatggggtttcaccatgttggccaggctggtctcgaactcctgacctcaggtgatccacccacctcggcttcccaaagtgctgggattacaggtgtgagtcactgcgccaggccgagtctttttgattaaaatagctcccagttgatgctgtcagcaaaattatgtagacaatctagggcggcagccatgctggtatgcctgagaacaggtggcttctgtcagttttaaaaccagcaaagcactgggcaaaccagccaggcggccaccccaagaaggacagttcctaccaatttagtgttaaggtggtgccagggcaagtgacagcatcactaagaaatataaaaagattctagaaaaccctgattttccttggccattacttgacttcccttaaagtctcttcgggtccctattaagtaaatactgaaatttaaatgatgaaatgctttctcccccagcccctatgcctgtgtaactaagtcacttcctatcccagaagctagtttggacctggtctagctggtcttgcaccagatgtccctgaagtcaccttctcatcccaggcttctccttctgccttcacctgtcctagggtgggagctgaaggttcagaggagtcaggtgggaccgtggctgggcctctgccttggttctcacacggtctcccaagcccttacctcatgcctgtgaaggagcaacttttcttccgaaaagatcttttccttccaaaatggatgctctgactgggctgctaagaaatgtgtgaccacaagaaaacaagagctttaagagatgagcatggatattccatgcctgggattcttagatatcctgatttaagtgagttattcttgaagggagggatctgagagtggtcgtagagtctaaaagagcctattttataaagcacagcctataacggcttagacccatttttccttttcttctaaacctgttttgagttggggagcaaagcaagtggttccctcaagtgtcttcccttttacctcattctccttctacccctagctttgcttatgaggtgtttcctatattctctgagggcacaaaacacttagaagccgtattataattcctaaaatctatttgaatcacacaattgatataaacatgtatttttgttgtaaaatttaaaattttgtccatctgatggatgagaatgacctggtcttggtttaatacccatttccctgagtccctgaatgaccgtgtggagcaggtcctcctttactcctggccccctggctaacctgtatctaactgatataaactagaaataaagtttattgtgttaggcctttgagattggggttgttacagcagttagcctctctgactgatgcagggcatttcaaataatggcagaatacagaaatctttttgacctctaaaaaccataccacgcaggcccagccctacctgaactgtaagggaagtggactttgatttcttaatatctagcctatggtgtgaaaatccaagtaactacagagaattaaaatagccttttctccctcttctgtttctgtctccctcccattgccatctttacccattgtctttttcaacattcttttcctctctccctcttccaattcacaaaggaaaatagaaatgttcaaaggttaaaataggccaatagttctttggctatgtcaatgcataacaaattggggtagagaattttaacaattaaaaaaaatttgttctgaatcttcctttggccttaggtaccatctagaggattacagttgtagtggtgtcttttctcctctttctgggtggctaaatatttgcacctcagctccctccttctctttgtgtatgtgtatagaaataatttcaatgccctagcttaagatctggcagtgaaaaatatccttatccacttggagaaggtcatccaattctggaaaagctgtctcaagaaaggaccatacacgttttataaaagcatgattattaagtttcaggttgattatcatgcaaatgcttccatttccccccttaccccactgaatctcctcctacaaccatgagtaaaatgacatctgggatgttgggaatttaaccagccagtcaggaaggccgaacaatgtttcctcagcccatggttcacaggggttctgagggcctttgtgcggaactcaaggagttgttcctttaaacaaggtgccggcttatctcacactttaaaacaccctttcctttcaaagttaagtgtttatctccttgggaatatgaattggtacaacctttcgggaaagcaatttggcaactggcatcgggagacttaaaggcgttttctaacttgacctggcagtccctcctctagtgctctagcctaagaaaataattggagatgcgatcacagatgcatgtacaaggatgcttatcacagcataatttatgacagtaaatcacctggaaacagcttaaaggctggaaaaataagggaagggcaaatccactcaacaatggaatattatgcagcctttaaaaatagtgttttcaaaaaaagtttaatgacatggaaaaatattcatgttaatgtgttaagtgggataaaaagcatacaaaaccaataaattctaactttattgaaaatagtttgtttaggcacacagccctagaagataagaaataagcaaatacaagagagaggagttttgttctaacctcagctctgacatgtgctaactgcctaccattgactaagtggtttaaactctctggatttttttccccagggttgtggtgaggatctgaaagaatatttgcaaagttcctggcacaaagaagttgctcaaaaattggtagtagttgttattatgattcttatccctattatactggtaggagtttgtcagtgacaaaagctgggtaagaatagttttggggggcagccttcctttacccttgtaacccaaaaagtatctgagacaggtctcaattaatttagaaagtttatttttttattttttttattatactttaagttttag

SEQ ID NO: 2431 - DNA, 2959 bp, Homo sapiens
agaagtcagttcctcgtgcttataggagaaggtctgtttccttgctagctgtcagctatgggctgtcttagctattaaaggcaactctctggtccttcggttggccccctatgtctcaaaaccagcataggtgcatcaactgtttctcgtgctcagaatctcttggacttccccttctataacatctttcctgccttttcttctaccacatgtgactccagcctgagaaaatgatctgcctttaagacttacgtgattaggttgggatcacccaggattttgaaaaagcaagctgacataaatcctataatcacaaggaaatgagttttaccaacaaccagagaaagcttggaagcagattctttctacgtagagcctccagatgagaaccagctaagtcatgcctggacttctgacccacagaaactgaggataataaatgttttaagccaccaagtttgcgataatttgttacaaagcatagaaagctaacacagatgacttgaattctaaattccatgtaaaattttataacttttctctttatgtattcagataaacaatattccttacacacatttgaaaacatatcaatataagacagctaaatattttttaaagttacaacgtaatacaaatagaagatatataagaaagcaaaatcaaattatgttttcctttcagaattataaaacccccacctagcaatgctaggctcctgacataaattactgaaaaatagtcagtaatgaattttaaagccaaaacagaaagtcttagtccctttctaccaaaaaggtatttaacacatcttaaaacaaaaatcgagtaacccggggaggataaaataaatttgtgtcacaccaaaggaagatgtaaaaattgtttggtttgcagaaaaatcattcaaaatcatttcaatccttggctcataaataatgcaaacttaatgagatattctatcctaacatgtatagatgaagttcttaattatttcaaaggggattgtgcctacatacctgaaatttaaactttccctgtagaaaacaataaaaacatacacttctttatagatatatttagaatgtgttatccccaactaatattttctaaactacacacatacttaaacactgaatttaagatataaactgagatccttaccaattttgaatggagtttaatcacatcaacccacataaaagtctcacatgaacacatatttttatgtgacatatttttcttcaaataaatattgcttctcagactttttagcaactgtggcaaaaacactcattgtgaatttatttttcttacagcttgtatatgttttctttatcttgaattgtctgcccaagtagatgagagatttgaaaaattctgtcgacagtggtaacagagtcagaggtcaaaagtttccaagcatgaactaaacctaaacagcaagaaaaatatcaaaatgtatgcaaaaatacacagaaaggttattgatcttctaaaatcataccagattttagaagaaataccagaaaatagccttaaggaaataaaccttgtgtttgtctaataaaacccatcaagaagtatgtaataattacatcaaccctcttgaaatttttttaaaaaggccaagtctatagaatgaatagtatcaggccaagaaaaaaaattcaggccctgtttccaaggacaataatagtggaacagacagatagtggccagtctagcctggggaatgcaaaccaaccaagtaaaaaatttgacaactcagttttttataaaattaaaccaatgctgtgtataaaagtatccagaatgaaatgaagaactgactcatattttgataattaatgctcaaaaatgtgaaattttctgttccattatttaggtattttaagaaaaatttactttaaatttttgctttatgtgactataatagctatatttcatgtattagcatttatacatacaaaggctgtagagttttaccagactttattcgagggtccagagtacttaaagagaacaatacaggaatagaaatagcataaactatatacttcaaataatttcacagggctgtgtaagcattttaaggaattgaggctttatcctaagcctaagggaaagccatccatataaccaaatttctgtttggaaaaatgtgctctggttgtagtacagagaattagttgtcagaacaaaggtgagatggtggtgatatagatgccaaagtaagaaaatatgaatgtgctatgctatttcactcttctgtccttcaccaacctattttctctgcttccttttctctttgttcatattttcagttcaagtttcaccccttctatgaaacatttcatgaagtatcagcccattctgtacaatcaaccactcctgcctctgtgcccaaacagtatatgcttttatcatggcccatgccattgaaatgcatttagctgtatatgtatattcgtccttgtacaaatcaataaataaattcttaatgaaatttattttctgtctccagcatctaaacaatgttttgccttgtgctaatcaaaaaagttctggttgacatttgaaatggttattttgataatctctttctgtaccttccctaaagattactcttaagacattctgaaaatatccattttggcaaagttgtatgagttattcaagattactgtaatttaagttgctaacaaaatggatcctatctatttgttcaccctttatttccctgtcctatatcaatttctgccatctagtaggtattaaatatattttataaatgtttaaaaattattcatattaaactaaaatatcagcttttcccttccgttttaaagtgttgtccactgctaatatgtgcaaaacatgattcacatctactcttagggatttcatttcttttgctggtcacaatatgaaagcctatactaggatatccatcaat

SEQ ID NO: 2432 - DNA, 3886 bp, Homo sapiens
attccatctggcccctgcaggttggctcagcactggggaatcagagtcccctccatgaccaaggcaccactccactgacaggtacttggctcactctgagtgttcagagattcctagacacctacttacccctaattcttctggtctattccctccaattccctccataaaaactgacccatcctttgcatcaacaatagtggcttgatgacgctcttcagtagaggattttgcatttcatatggggaaaaatgatgttattctaagtaatataacagaccaagagaagagctttcaaattcccttaatatcatcccatatagatatttatgtcttctttctatgggtctggtgaacatttctcaactgaatgtgattttcttacatacactccattggagaggcataccagtctagtttcagctcaaccactaactccttccattaatactgaagcaatgttgtctataaggctccacaaatttcaaagtactaataatttttagcccctttcatgcctcctttccagcctttctggaggtgaataaagtcagaaagtgcattcaaaaggctgtgaacacctccagcttatctaggtcttcttactggagctgacagccaatgagtgtaatgatacaaaaaaggtaacaatccatttctttttctcctgccatccccaactcagactctgttaatcagcttgcttggctggcctccaaccataggtccaggggctgagacaaggtccttttgagctcctatgtgggaggctctggaaagcttagcaacactttccaacaactttgccaggtaagtaggtaagtctccttgttctcatttccagagaagacaactgaaacccaaagaaagacttgcccaagccatgattggctagttgatggccaagacagcattagaacacaagtttgtcgattctgtcatgccatatttggtgaccatgactgctgcttttgctgctgggtggattaggctgaattgggtaggtagaaaaggaagtgagggagtgaaagagctttagttttgagatgactgccagaacttaaattgaaggagtatgttaccttcttaacattcaattaaaagaatagagcaagaaaagacactgattgttttcttgctgaaagacaaggctgaatccctctgtcttacctgggctgggacagggctttccggcctcatgggggcagtttaccatttctggtaaccttgtgatgtttgccacttttcatgacaatatttaatgtagaccagctacctgctcacagatcaactgccacagctggtaagggcagtaatttgacaccagcaacctgggatttttagcaacaggatctgattgttgccaagggaattctcccagaagtttcagacctgaccctgctcctggcagcttccttattgccctggtggcttgtgggttcagtgatcccaaatgttgcattacaaagctattgcctgtttttgccctctttgttgatgtgtcttccctttcccagagggatatacagagaagggaggcaaaataaccaatgaggaaagctgtataaggcatactgctgaactgtaaaaaatttattgtataaactttacaagtctcctccccaacaggagcctttgttatctcatttataacctaagtgagtgagactagatgatctttaagggcactttaatagctgccattcttgagtccctatgggacaagaggatcatgttaggcaaggctgagaccacaagaaatcaatgtcacacctgtccagatcctgctaaatcaattgccaatagctctttctttcattttggtcacacaaccactactttttgagcatttgttatgtattgaatactgaaccaaaggctttacatgcattatctcctgtcattctcacaataaccttatgaggtaggtattatacttacatacattttgtgggtgtagaaaacttgagctcagagaggtgaaatgatgtatccaaggttgcctaactagctaatggaagaactaggatttaagctcatgtttaacctcaaagcctatgtgcataaccacaacactgaaaacacagcttgggagaattgagaagagggagcaaggatgctgactctagggtctggtactttcctcaagtcagggaggcaggatgatgaccaaattttcccctctctgctgcatagaggaacccactgaagcttgggacccctagaaatgccatagctacaggactcaggcctgatgagcttccagctgagcactgggtgtcactcgggctttacctgcttatcttcaggatctctcttctggttaggaaccctatgcctattttgctcacttccctattctggtgctttggttggtcctttgagcaagatccccggggctaagggtgtgacttcatcattcctttctctctctttccctctagggtcacatctcccaggaagatctcacttccccacagaagctcttggcctggcctcctgcagtgccacgctccgtgtatttgacaagctgagttggacactccatgtggtagagtgtcagtttgtcaaataccccaagtgcggcacatgcttaccagctctaggccagggcagatgggatatgacgaatggactgccagctggatacaaggatgctcaccaagcaccaagttctcacaagttattttatgtgactttgcaggaactgaggcattatatctgaggacaccaggggaaaagtgtggcatctcagggaaatacagccctgggctgtgtctacacacaccatgagagtgctgatgggggcgcaatagtcttgaaaatgtataaagtgtccaggaatggaagtgctctttgattcattattattttcttccttcatattcccctcccagagtctcctatctaggacatcagcattctcacacaagcctaatggcttatctgagtaagcagggcttagaaattcactttcttgatactcagtcttgccttctaaacactccttgatcttgcctacctctccccttttccacatgtcttttcctgtaggaacactttctccatttattcctgcctatccaattcttccctatatttcctggaccagctaaagtccagtgtttccagagacttttgaaagtcaacttacactttttccttcttcattcacaaagctcttcttccctgggccctggtatgtatgcctttctctcctactgtctaatagcacctcgtaaattgtcaatgaacttttctaaggggtattcttgaattcccaactagattgtgagcttctggaagacaaggctatgtctttgattgttgtctcccctaccacagcccagtactttagttacagaaaataataaatatttactgattgattgactttcctcttgtccactagctttaggtttgggggccaaattctaccctggattttgaaaaattcaaactgtgaacaccacaatgttatagagcatatgaggtagtagccagcatgaaggatgttttcttcctgagaaacagtgtcaagggctggaggaagagggcaaaatagcagactcagagggcaaataaattttggtattacttggtcacacaaggttatacaggtgttttcttgtaggatttttcagagcctttaatagtctaatgttgcattgagaatctcaaagaggaaaccatagaatgaggcatttgccatacctatctgatcatgaattttcttttcccccacagccttctcctgtgtcaatgtccaatgaagcacgatttgggaaactgtcctagagaaactttataccttcccgctcttctggagatcttttcctcttttcattcatctactttccccaaccagccatctgcctaagaaagg

SEQ ID NO: 2433 - DNA, 965 bp, Homo sapiens
tttcagaggaagaggagggctagttgattaaattttattgggcctcctttcctaagtgggcagaattgctgtattgaaaggctgtgaggacctgccactatctttcaggtctgtgtcctcccacacaacgtttgtcttcatggacttggagtctgctctgcactttctctctctctgtctctctctgtctctttctctctctcttccaccctccctccctctccttccttcccagacatacctgagcctatggttcccatgattcatatttgcaaagaaaattctactgtagtctcaggcctaagacgaattctccatctcaaaatactgaaaatcctttattcagggagttgtgcagatttttaataaatcaatgcttaatgtctctcatttggctggtgatcttttgctggatgcagcatcagtttgaatgctggagggatcaggggtaaccagcatttagaattcctaagactcttcttgggaggctgaggcaagaggactccttgagcccgggattgcaagaccagcctgagtaacatggcaagaccccatctcagaaaagaaaaaaaaattcctaagactcattcctcttctgttcatgatttctttgggaaaaatttttcctatgttccaactgtggaagactggatacaccttgaatgcaaccttctttcatgtcttcaaggttacaaggatgaaaaaagcatgtgcctaagaaagcaaaacaacaccaagaaactgaagatgcaaacgatttgttttatgagtgtctgtgtagacgtgtgtgtgtgtatatatatatactaatatacatataataatcaacaaaaacgtaacatagggacgatattacaaacatacaattcctttttagtgtctgagcgctaaagaaaggtagatctttatgttaacatcttgattgacataactttgaggaagaattttgcctaactgcttacagg

SEQ ID NO: 2434 - DNA, 2414 bp, Homo sapiens
agctgagtttggatcccagctccactcctccctgtctgcgaggcctcaggcagtttcctcacatgtaacatgggcaggattatagtagttcccacgtagagccgggagtgaaaagcgatgatgaggtgattcgtagctcagctctggcacaataaagtgctgaataaatggggacagatatgggaagggagtgggatgaggtgggcctagattttccagtatggaaggacttttagtctgttccttcattttgtagatagaaggactgaggtccacaggtgacaggtccaaaagtcacgctgctcttgggtcacctggcacctgggctcccgctccttgtgggctccagcgcttgccctcccggaacactccttgcccagacgcaaccctcctgttctggagggatgggtgagtgaggcttggggtggggctgtggccaggtcgacggagctgctctgtccccaactcctaggaccccccgaccccggtcttagggattcatctgcggcatctcctgcagttccgagttatggccgctgggtgtcgccacacagcaaaaaacccacgggccgccgggaggacgggacctaatgggggctctgatgggacagcgccggccagaccctgatccccgacccttgaactcctgcccaggtccttggtcggctacagcctagagcctccctaagagaagccctaagggatgatttcaaacctttctaccacccctccttgccccctccacctgctaaaaggaaaacctggctacagcctacctgggggctgcttctcccagctgagcctctcctccccacgcagtgctccagccacgctgcactagtcagggctcccagcctgctggacacctgtctccgcctttgtgtttgtcgggctttccacgtagagggcccttccttatctctgcctggtgcaggcctgttacctcttgtgcatagggtatttcaaatccaccagcgaccctgctaggtaggcacagttatccctgcctgcaggtacagaaacaggctcaaagagaggaagccccgagtcacacacagcagaagcaggttttgaactcgggctcccacagtgagctttcttttgctacatctgagatccttcctaaaccgtgggctctctgaggccagggccatgtggatttcctgtttgtaacccttaggcccaaccctttgcctagcaggcagtgagtactcaaaaggaacctctttccctagctcttagatggcacctaccgtgtgccaggtactgggctaaatgcttcgtgcgtaccacaaccctgcaggtagttaccattattatactcattctccagaaggggaaactgaggcacaaggaacatgcactgtcttacggttatctagtggcagagacaggacccacaccatctggcttcagagtccaagctcttgctcgtagccacttatccaggcacacttagaggagggcccctctctcccttcaccctgtgagcacctcacctatggtggtctcaccctttgtgcttcgtgtgtggaactcccacgagcctctgtagtagaatgggagcactttgctggagggcagggctgtgtgcactcactcctgtgtccttgtgccctgtgatccctgaacagaatcgttagtccggagggtgggtgccaaacgtgcttcagcttgccttctcctttccctcagccttcattcatacctcactctccagcaggggtgctcaccggctcaggagagctgaaggcgggaaattggcaagctggtttttaactctgccattgttaaaaattaaattactgcaggtgctgaatccctgccagcagccctgagtcacgtcccttgcgaagatggggatttgggggcgtgaagaggataagtacctcatcaaaggtgacagatcagatttgaaccacactcttaactgctgcggtttattggccctacaataatagtgcccagttcacagggtggtttgggggattacacgacgtaatgtgtgttaaagggcttagcacagattcagctccagaggaacatagtaaatgttgatttaccgagaggcagaagagcgggatccacatccacccacgtttgaatctcaacttggctattttctgattgcgagatctctggagtcaagtcattttgcttatctaagcctcatgttcccccagtgaaaatggggataatcatagctactgaagagctgctcagaggatggagatagaggatgtaaagtatctgccgagaagtgggtactttatgggagtgagtgttcgggattatcttttattttatgtcacgcagacagcaactcttcccagccctgtggaggaggccggaggttggggccggagccctggaagcagggccttgctcgggcagcttctgaccctcccctcctg

SEQ ID NO: 2435 - DNA, 6289 bp, Homo sapiens
gtttggagcagatagatcagagggaaggcacaaagcgggaggggagctagccccgggagaagcagccgagcgccaggaggcctttgccgcctgcagcccctgcggtttcctcttttcctccgcttcctggctcagccctgcctgctgaggaggaccatgctgcggtgcaggcctgtgtccacctgagacagcacagggggctctcatgaggatggacacaaacaaggtttcagagaactatctgtcaggtgcaggtgcccagccaggtgctcggacagactacagctgctctaaaacaccccagcctgccacaaacacctggctgctttccttctggaaagttctcctgttgaaaggcacgtcctctggaaaagaaaaacctcatcagactggtctcccctacgagggacggcctacaagcctgccagggagacaactgaaaagccccgggaggcgggtgacttaacagcgagttggtctcgtcatgattcgtctgcgttggaggtgacaacacatgtttatttctgagaccggcacgttctcattttctctttagtttcggcccagcttgaggtcttttttctgagctggcatgtgaggtagcaacagtgtgggttggaaacagctaatgaattttgaaggcaacttatccactctaattgcttttcttcctctccatcctcctccatggttagaaaaataatgaaatgggaaaagaatagttagcatctgtacatattttgcccaatctttcattgtcttattattagcactgtattcagcagttgcacccgagaaccatgttgagggccagagtgcaggctttgcaaggagggaatggtggagaagccacagtccctgccctcaaggtcaaggtccaggtcaagttgggcaggaaaggaaatgtgacatgagagtgtctgcctaaaaaatgggaactccagggaggagcctggggagccaggaagtgctgcatgtatgagaggatgagctggaagtttaagccaggcccaggactttctacacatagaaagccatggaggctttaagcagggctggctgtggccagatcactgctttggaaagcccatgctggtggcagggtgcatatgagagtgcagagaccaggggaaggaggactagccaggaggctgtatcagcttcaggcaggtgtagatggggcataaacaaagggagtggtgtgaactggggagaggtgggagatgagaagttctgggcagacacagataggcagagcagggtccctgggcacttggagaagaggcaaggggagaagccctggagaagggggcctcacagcaaaaggggatgaggctgtttttttctggaagctttgctaagagtttagggtgaactgtggagttagaggaaactgttcctaagactgctctcacttctgacaccagttgcaagttcaggagagatattctccaacccaccttcaggtttagtaattttccagaaggattctcagaacacactggaggctattacactattggttatgatttattacagggaaaggatgaagattaaaatcagccaagggagaggaagtgcagggggcagactccaggaggggcccaaatgcggagctctgagtcctcctctccctgtggagtcatggacggtgttagtgccactggccatggtatgtggcaatcctcgtggagtattgccaggccaagccttgggggtccaggccttttactagggttccgtcacatgcagatgctgtggctgacctttagtctccagtcctaccagagtcagaactgataccatgtggcccaaggccccatcatcaatctcagtgttagcctgcctatgaccaaagccctcaggccaaccaagacacttctgtcaggcaggacatccaggggcccagacatcacccccaggagccgagggaaaggcccgagttctctctgagtagagttaaatcttcaccacacggcttgcagtaaggcacgagagaaggaacagaagggtgaagacccgggaaatgggtactggaaagtagaaaggacttaaatagaaacatcctcctgtgtacttggttcagtaatgattagatgctgaattacacacaccctcacagtcaaggatgttcctctggcatcaggcatttggctcttcactcatgtaggttgtctttggggtgtctgtggttgatttttcacatcccgttgtgtgctgggcatagaggtcacactgggaacagagaaacagccaggatattgtgcgaggaacatgtacaccattggtggccacaaccttgacctcttccctgcacttcagtccttacctgtgaaatggaggcatggcgctacccacagggtgttgtgaggatgaaatgcaacccctaatataggaattctttgcacatgtagcacaaaaccccccataaagaagcaagaacaccttgtgttaaaatccagcttctgaaagtaactttgctaggataactcttttgtggtacagtgaaatgccataccactttggaaaagtgccctatggtgttggggcaactgctcctgaaataatgcccttcttctgtggtcctaggtgaggctccaggttgggctctatgctgtgtaccttctggactggctcagcgtttttgacaagcaacagtttctcattcttcgcctggaagatcatgcatccaacgtcaagtacaccatgcacaaggtcttccagtttctgaacctagggcccttaagtgagaagcaggaggctttgatgaccaagagccccgcatccaatgcacggcgtcccgaggaccggaacctggggcccatgtggcccatcacacagaagattctgcgggatttctacaggcccttcaacgctaggctggcgcaggtcctcgcggatgaggcgtttgcgtggaagacgacgtgagagctgaattgttgctgcacgtgctgggcccgccaatgccgtcatcatcaggattttacaaatctctttgcggggaactgtttcactcatggtatggaaaaccccaggactctgccactctaggcacacatgaattataaccattttggaatttccttcgtgatgttcgagagctcagcaatggacccctcacagagctcctctatccgaggccattggagaccccagtttctcaagaattcagctctgctctgagcgtcctggagcttggggatgcagccagctggcctgcactgggtgtggagagaacacctagggaaggcagcctggccctgcccgcctccgccttctggagagcctctgggttctgagtcagcaagccagaggtcatgccacaggcctggctggaacttacacttcacgttccctttttttccccctagagatggggtctcgccgtgttgcacagactgtctgtattcaatggctatcttcacaggtgtgatcataccacattcacttctgaaacactcttgttgcgatcgctaacctcactgggacagagaaccgcagtctttcgagaatggaggctcttcattttttttttctcctttactccaaactcagccctccagtttcttcagatgtaaaccctgttaacgtcactgtttccaaaaggaaaaaaataagtcagtttttggcagcaccttcatctttctgacctcctcctattctgtccttgtggacttatgtttaacatagaaaatgaatgcgtttaaaacaaaaccactttctgcatttaaccagtcctggctctctctctgctgcctcttcatacgttttctcaagaacttcagtttataattggaagagaaatttttgctgttaatgccagaatgagcaacctcaaggaattgaacacttcttggaaaatctaggtaattcaagccctcatcaggtttacaagatcatcagagaaacagaggattttaatttttagttctggccggctacaggctccatttctctgccttcccattggaaatagtttatttccacattctccactgcgtgtggtcaaagttcctcacccagcaagggactatagatactcgtgtcccaattccaaaacacaatgcacaagctgaacttgggctgaacgtggcgtgttgagatttggaatgaggtttctaagagccgtgttcttcatggaattttccaggccacttggcagcttggtttaccgatggatgggctagagatcttgtcgtttcttggaagtcacagggaagattgaagagaacgcttgagcatccttggcaacagcccaggtgggacctggatgaagctttgcactcaagtattgtcaagggaagcttcctgtgaaccaaagttctcaggccaaggtctcgcccaccaaagccagaaagtgcaagcacccgtctacccagctctaacttgtatgtgtgagacagaccaggcttcgggggtaggaggatctgcagttgttcagccgtctttctgctggtgttgtctttctgccatcagagaagggacacacagcccgttcgaaggtgtgcagagggctctgagcgccaggatggccagggctgtttttgctactgaaggagcgtgtgtcctgaactcccacttgcagggacagtccccaccttctctatagccggcactgggagcagccgccagcagggaaatctggcctgagcacaaggatgctttagggagagatcacttcagtgtgtgtgtatatttatttgcagtacagtgcgcgcgtgtgtgtgtgtgtacgcgcacgtgtgggtgagtgcgtcttctgagtgggttctgttcagttgctaatgaggctcctccgctctggacacaacccttttatagattaatttctctgccaattaacttgtcattttcagtacatattttactattccacaccaaccataattacaacaagggatttttcttatgcactcctatgcatgtgaataacatgtggtgtaattctgcttcttacagaagtattactgaaggtattatttccaatattatttggtttattatgcggatcttttttatatatgcagtcccatcccttctgtgccactcaatgccatccagacatggtttttccctccaggggcctttctctccagagggcacttcggctgcctctgcttcctctcattcgaggcccggctcttgctgacagaataggttccgttctgggcggtggttctcgagcctgccattcaaaaccaaagcaaattggagcatttctcacaacatggtattgaagttcctttttgttctcaaaagttgtgaccgtgttaaattgtactcccttagtcctgtaaggtatgttaagtgaatcgcagttacgctgtacttttattaatatttaacataattaaagatggacccataagagtgacgcctgtggagcgcgtgctcttcctctgcagccaagctcttcctggtgcatgagtgaatcgcagtggtttagtgtcgcacctgctcgagttgtgcaggctctgtgtaaagaggagttacagctgtgctggctgctgagagacgaggtgtgattgtgcgagcaacaggcagaagaaaactcaagaccagagagaaaaggattcagatgttagcagggactccctgtgcgagtcctgttggggtgtgagtcagggtgggaggtctggcccagccacagtcaggcctagcgttgtcttcagaccttcaaatttgaaggttaagtgaccacaggcctcattccggtggcctgcctggcccctggcagctgtgagtttgagacccctggtgtctctggcacatgtccttattgctgagggcaagcccgcagaaggaggtgtggtgtgcactcaggtggggcagccaggacaaaagaccacaaacaacggaaactgattttctcagtctggaggccagagacccgagatcaaggtgctgcagggctggtttctctgggggtctctgtccttggcttgctgatggctgattctctctgtgtgttcatgtggccacacacacacacccctgctgcctcttcctctccttataaggacaccagtcggagtggatgaaggcgtgctctgacagcctcatcttaacctcatcatctctttaaacaactttatctgcaaatgcagtgacattctgaggtactcgagattgggacttcaacatacgaatttggggcacacttttcagcccatacagaggggacatctcaggcttagggctctgaaagctgggccatcctgagcacagcgtggaccatggtgggtcccccagttctgggcagaccttcctgggggagccttctccccag

SEQ ID NO: 2436 - DNA, 2639 bp, Homo sapiens
caccatctgaataatatgccatcggaacattcttttgcagtgctggcgtgggacggacaggaacattcattgccctggacaggctcttgcagcacattcgggatcatgagtttgttgacatcttagggctggtgtcagaaatgaggtcataccggatgtctatggtacagacagaggagcagtacatttttatccatcagtgtgtgcaactgatgtggatgaagaagaagcagcagttctgcatcagtgatgtcatatacgagaatgttagcaagtcctagttcagaatccggagcagtaagtggagaagagctctccacgagtgctcagtcttagaactattagagggggatgtgatggatgggacaaaagacagcagtagccatttgtattgactctgacttcacatgagtatttcttcccagctcctggcctcacatgggtggtcacagggagaaacaagtactgtagcagatctttgagtttcaatgcaccttggttggtgttggcaacaaacaggagcttctgcacatcatgatgactttacctccattccctctacccagaaccctaaattattctgttattggatctgtgcctgtaatatcaggatactaccatccaaatctatctagatatcttgtgcaaatattttattgattacaagggctgtatacggggttacaaaaagacatgagctggattggacactcctaaaaccaaaaacaacagtgacaatagagtctcaggatagcagagtctgaaaataccttggtctcccccattatgtgagcccttacttgagagcttcatgaagacacttgtaacatattcaacgtcctgtactccagttttgactacgagatcagattttggaggtgtaagtaaacttggctgaggtaacagtaatctgcccatttagttcagtaaacagactgtagagtgtctgactatactgggggaagaggagccaatgacagggtagggagatgacagtggtgcatgatgggagaatcatgaaagtctgggaagcatatggaccagtgggaaggataggattagcactgcacctctacatccatcaagagagacagagcgcacaatggagcaggaaggataaaaaataaagaaagacagagagaaacaaatttgctgggagagggaaagacattcagacccacagaaaggaggcagcacacagagaaagatgcacagatcaacccacatctgcatgggttgtgagactgagcatagtgagagcagtggtggagcaatagaagattgctgtgacaccaggctgcttactgtctttctttgtctcattcacaggagaggacatgatgtgcgcccatcctcccttgcttccagattgttttagtgggccctgatggtcatttttctaaacagaggccctgctttgtaatatgtggccaaggagataatttatctcacagaagcaccgggaagacttagccttaaagagcctacagtgtccttttggactctttcacttcgggacatttaataatggaccaaattcaacagaacaccaggaaggtcaagacgctctccaaagggcaggaagtacagcacttccgaagagtttagttggccctttgctggttgggctgagttttttatttttaagtgtttgtttttcagtgcaataatttttgtgtgtgtgtgattcttatcagaaagttgaattgttttctgcctacaccgttcatcagccccataacccaggaaggaacaggcattgttagcatcagattatacctcattattaaaaggaggcatggccacacatgaagaaatggtcattctacttcaaagaaattgagccagcactatctgtactccaacattaccggatctggattggggaggttggtcagggaagagaggggttctacccacagatcaactgtgtaatcttttactattcaagctataattcagcttcaaagtagagtagaaaaaaaattgtcttaactgttctagttcttgatggttttcttccttattaacagttggtgtttcttccttggcccttttggactaatgttactgtccaagttctttctcaagaaaccacatctggttcagaagagtgtcaagttggactctttgaactctgttgctgtctgagcaatcgtggtgcctagactttgcattccttgttctgttgacctgcatacatgtgagagctatttctttaagaactatataggctgtgaaaacgcactttctttcccccaaagagctgggaatttatgaagttatggcaatgaactgcagcatgctgggacaattatttgactacttttttttgtaatattgtcaaatgtctctatggattctgacagagatttctttttgttttgttattcttttggttgtcagtttcattttaacgagtgtaactagtaacattttattctttggattttgtataattacagtacatgattgtgtattgtgacatgaatgctgtcaaaatgacattgatggcattgtgaagcctgttactttgtgtcacttcctgataaataagaggtgatgacatggatatacaacagaaaacactttgagttgaaagtaaacacaagctggctgcttccctgtggcaactgtgg

SEQ ID NO: 2437 - DNA, 2364 bp, Homo sapiens
ggccctccctgaggctgcctgcgctttcagagcgggtatacaggcagagcattgcgcagctggagaaggtccgggctgagtgggagcaggagcaccggaccacctgtgaggcctttcagctgcaagagtttgaccggctgaccattctccgcaacgccctgtgggtgcacagcaaccagctctccatgcagtgtgtcaaggatgatgaggtgggggctgagggccttggtgtggggtaaggtagggcagcctctaggcagcaaagcacccaggtccatctgagccggtcaacaagcacctggtcctctgtgatccaagcctggccccaggggtctcaggcctcagcagctcagcctttgcccccagaaccccaagacaggagctcagtaccacacagggccatggcttctctgcctggaagatgatgactctgtggttcccctgacttcctccttatgcctcagagccacagagcacctgccccctctgccggggatgggaggggaggtggacacagctgtcagaggttggcagaagctggaggaccgtggctgctctgctctaggcctggtgcttgcaggagccgaggcgcagtccttcctctgctccccacatctccagggtgtcctggttccccttactgagcccaacctgctgggtgggtcctccccagcagagagggcccccagccagggtccctgagctctgtggatggatgcagcccagcacacggctctcccgggcagccctggcccccttgcctgctgtgtttcctgcctgacgctcctgtccggggctgtgggggttgattttcttgttgtttttgcccaagtgactcgagccccctgctgcctcctcgcctccttgaggtagaagggcgagctctggacccactctcctagccccaaggcctggctgtgctgcattctcgctgtgaccttgggcaagtcactctcctctgagtttcctcatctatccaatgggaaaagtggggtctaccttagaggacaggtgtgagttaagtcccttgcacagggccttgcacacagaaggtgttcaggaaacaggaagctgtcagccagggccgtgacccctcaggatcaaagaccccgagccgcgcacaatggcctgtgaggaggccggtgggtgggggccgctggtcagagttcaggcccacagaggggcagagtgggcatcgggctgcggcctctgctctttcctgccccagctctacgaggaagtgcggctgacgctggaaggctgcagcatagacgccgacatcgacagtttcatccaggccaagagcacgggcacagagccccccggtgaggtccggcttgcggacagcgcagcctctaggtgcattgagcccctgggaaggcccggccctgagcctcaagtgccaggaccgggctggggtagctcacagctcccttcagggcagagaagccctagcaggggttgtggggagttgggtcccaggcctgctgcctcctctcaggcaaagctaagggcatgatggcactcagaggaagaggtggggatggggattgaggtgaggagctcccacggcccccactccccgcctgtttggttccactggatcacgggtccagaatattaggtcttgatggtacctacggtggggtctctcatgggagcaagacaggcacctcctcaggcaccaggatgggccagggccagattgggaatgtagggccccagctgagtctggcagggccagaatggggtgttgggggccgccctggggctcacggcttgctgtctgcagctccggtgccctaccagaactattacgatcgggaggtcaccccgctgaccagcagccctggcatacagccgtcctgcggcatgataaagaggtgaggccccgacagacggagggagggcctaaggctgggccaggaagtgggtcgagcccctcctctgcacctggcccttcctcgttcactgagcacctactatgtgtctgtatctggtgcccagtttaggtgctgggcactctgtggagacaagataggctcagttcagcctatggaaccctcagcccaagggacccagacactagaataatcacaccccaattattcactaggggaggtgctccgagctctggggaggcccctatgctggcttccttgtccctggggcctcatgtgagcctggtgccctgtcaggctgcagtggcaacgctgtctggctggagcaggactggggcatctggagaattctccaggcttttccagggctccttccccggcctggctgcagtcaagtgccaaggtcctagtgctgggcctcaatgtgtgacctgggcaagtcattcacactctctaaggccag

SEQ ID NO: 2438 - DNA, 1622 bp, Homo sapiens
tgagaggaaaactccatttcccttaaggagtgcatgttactggggaggtatggtttgaaaaggttctcaaagtgattatgttgtattcacctctgtgactctgtgaagaggacatccctcttgagaatcattacttaacgccaaggagattcctcttctgttcaaagacccttccatgtgctcctgcagccttagacatgtgccattcatcactttagggaaagattattggagccaaaccggaagacaaagagcttcagtagtatggtgatattttatctgtggtaccagtggtgtttccttgatatgttggtgatggtggtgagaggaagagtcatgcctggaaagtctgcagaacaaaactgccaggtgacaatgagcaaaaggaaaaaaaggagcctcaattgaaagaggccttcaccaaggaaaagccagttgaggtgttcaagctccatccaaggtatggccacaggttaatccaactattgctatctaaagattaacctatttactttatgaagaagtatatgaagttcatgcatcccatagttcttccatataaatgatgacacaagaagtcacccagcacatgataagcagaattgcattgagaatttatacatccttagcttcttctgtgacgttgatctgtggtatagtagacatttagtcttactcgtgtttaatcctgataaaagagccctggaaccaaaacaaatttgaacctcacttggtaagttgagtttgctttgggcttgttccattcaatcctaataagtttaaccttaataaaatcttgaagtgtatcctgtacaagtctagcaaattgacagctaaacatgtgttcccaattcctctttcagtgtattctgattctcagcgctgcttttccttcttttctagatgcctccttaactctatgttattctcagctacccaattcttgtattaaattaattaattgtatttaatttagatcaattgtatagccaaagagaaaagctgaaatctcccagtcattatatttcttggccacaggagttgccatgttctctactaaatgtattattcatacatagcaggaataagtgaaaccataaagagcaaagtagcaatgaatagaaatttggaagatcagagaagattgcaataatccagaaccaccttcacaataactttcgtaagttttttaagagtaatcagaaatttttaaagataatttgttaaaatctggagaattatgtgactcaaagcgtgaaacaatctgtgcaaatttttttaatcacttaactggaggattctgggatagaatgcagaatgtgaaaaaattatctaaatgtattacaaatgtacaaaacaacctcagtcttaggggtgtagaaaaactgtgttgatctaaataactagaaatgagtggagtctgtaagaataaagtccaaagaaaccacacataatctacataagcatgtatgttagttgacaaagtggtgtctcatggagcacacagatcaacaattctaaaaccactacacatgtaaactggaattgaacaattaagtaaatgtatggcaaatattgggagtccaaaaactcaactgttgaagtgggaagttagatttaag

SEQ ID NO: 2439 - DNA, 20764 bp, Homo sapiens
cagacatctcggagccaagttccaaccaggacagaggctgcagcacccagggaggaacgccgtggtccctgggacggccaccaggccaggaggctgcagcaccaggcgtcaccggagggccagcgctggctaggctgtctctgtgcaacgtcttctgacccctcctctccaccttctctgtgtccagggaatctgtgctcacgtcttccaggacagtgcttcttctagaagctgacatggagctgaccacagctcttggaggcatggcctgaggcttagaaaatagacagagatcatctgagatttcagcagtggggccacgtggcagcgcccgaaggcctggagcaggagcgacccagggactcagagcagcatcttcttaggagacggaaggagagccgccggaggagcacggggcacctgcgatcgcgaagagcctcctgttctggatgggagcgaaggctccgagaggacctaaggttgctcagtgggccatggaaacggcagtgattggggtggtggtggtgctgttcgtggtgactgtggccatcacctgcgtcctctgctgcttcagctgtgactcaagggcccaggatcctcaggggggtcctggccgcagcttcacggtggccacgtttcgccaggaagcttctctcttcacggggcctgttcgccatgcccagccagtgccaagtgcccaggacttctggaccttcatgtgacgcccgagtccccaggatttgctgtgctgatgggtcagactcacccgctcctcagcaagccttccctggccttcccctcctcccagggccttctccctgtccttcccctccagtaacctgtgaacttcccgtctcctcccattccagccttctgtgccctccagcctcagggatccttgttattgggacagcccagctggggttgacccacaggatggggcttaggagagctctgaggagtgagtgaacagacagcgccggagtgcacggtgggccggctctgctgatctacaccaggaactgaaatatcactggaatttattgtaaacggtgtgcctatgatgctggttctgttgccacctgggcacgcagcaccctcaagtggacatttctagaaaccgcttcttacttgctcctaattgattacttttgcacattgcacagaacccaacctcgaggcctgctccctgccagttgcctgaaatcagccctgaaattctgaaaccaaagagctgcttcctgagaacaagttatttaccttagaattgaaaatgtatatccttttatgggcctttccaaatctgattagaaaaaccacaaaaggaaacagaagagaaaataagagccacagaaagtacaatatgttttattaacaggaaagccagaaataagatattttaaacatatttttaatgagactttattgctatattccaacaggtcactcctattcttagagaatgtgaatgacttgtgtcacttcggagtgacagaaaaatcaggaactgaaagataattccagacaagttaaaatgttatgttacattcaaagctcttgttttcatcacaaataaggggatattcagtttttattaacagaaaacccattctcccatggccatggaataaatgccatgctatatttaaggagtttggtttgaagggtgcaaaattgtgagcctcctggctcttatgtctgtatccagccctgaatagatggctctcccaggacctgtttgttgaggggggcaggactgagctttaggggggctctggcctctaagggtgtccagacaggctgcccttgccatgtggctgccatgggaagggctttcagagtggcttggagctggagaggtgcacgcggggagggggaagtggtggggagagtgaggctgacggagagggatggggaggagcatggtgggcgaggctcagcccaggtccaggagctcctgggaccatgtcctggacactcctgacaccagccctcgacgcagggccttcagagatgcacagagaagggaacggcacatgtggggaggccctggagacggagggaagagaacttttgagggctgtgttctctaaaagcgaacagtgagacaaagttcgggtgcaagatatttgtcagggatcaacacctacaaaggggagaaggaagaagcaggattgggcagaggaagaagtcaaaccgtgatgcaggtccttcatatccccacctttgctccgtctctgagtccctctcccctctcccagggtctgacctcagccagggcagctctctgcagctgaggcaggtcttgaagcccttcctattttattatttttattttattttattttattttattttattttaggagatgggatctcactctgccacctgggccagagtgcagtcgtgtgatcataggtcactgcagcctcaaattccagggctcagtcaatcctcccacctccgcctcctgagtggctgggactataggtgcatgccaccgtgcctagctaattaaaaaatccttttcttgtagagatgggatttcactatgtttccaaacctggtcttgaactctcctggcctcaagtgatcctcccaccttggcctcccaaaatgttgggattacaggtgtgagccattgcatttggctgaagtccttcctttgaaggggacctgggcagcacatctccacagaaactctgtagggtcctgttcttggaagagcctagactggtcagaggtgggtgaatatgtccagacacaaagaaaaacctgggcacaggagatctatgagaggagagacggccgtgcaggatctggaagggagaagagtgggcctcagtctccctctctcctcagccagagtcagctctgctccagctcaggcacccttcaccaggagccaggcccagggctctgctcttgtactgtgtggtcacagcactcactaggtcagtccgggagggtctgcaggctggaatcacagggccgtgaaaacaaagtgctggtgaagcgggcatggggagggagcctggcctccctctgcaggagacaggctgtctgccaagcccggcacgctcttcatttgttcacctgcccatctgcccatccatccacccacccatccatctactcctggagtagatgccgcctcacttacccatgcattcattcacttattcattcactcctccgttcagtaaacactgactgggcactgactgtgtacccagcccggccaagggaacgtgggggtcaactggacatttggatcccgtggactcctagataaggctgtatgtgtgtggtgtgttttatgtgggtatgatgagtatgtggtgtgtgtgtaagctgtatatgtgtagtgagtgtgtgtggtgtgtgtttttgtattctgtgatgtgtgtgtaagctgtatgtgtgtagtgagtgtgtgtgtttttgtttgctgtggtgtgtgtgtaagctgtatgtgtgtagtgagtgtgtgtgtttttgtttgctgtgatgtgtgtgtaagctgtatgtgtgtagtgagtgtgtgtgtttttgtttgctgtggtgtgtgtgtaagctgtatgtgtgtagtgagtgtgtgtgtttttgtttgctgtggtgtgtgtgtaagctgtatgtgtgtagtgtgtatttttttatgctgtggtgtgtgtgtaagctgtatgtgtgtagtgtgtgtgtttttgtatgctgtagtgtgtgtgtaagttgtatgtgtgtagtgagtgtgtgtgtttttgtttgctgtggtgtgtgtgtaagctgtatgtgtgtagtgtgtgtgtttttgtatgctgtggtgtgtgtgtaagctgtatgtgtgtagtgtgtgtgtttttgtatgctgtagtgtgtgtgtaagttgtatgtgtgtagtgtgtgtgtttttgtatgctgtggtgtgtgtgtaagctgtatgtgtgtagtgtgtgtgtttttgtatgctgtggtgtgtgtgtaagctgtatgtgtgtagtgtgtgtgtttttgtatgctgtagtgtgtgtgtaagttgtatgtgtgtagtgagtgtgtgtgtttttgtttgctgtggtgtgtgtgtaagttgtatgtgtgtagtgagtgtgtgtttttgtatgctgtagtgtgtgtgtaagctgtatgtgtgtagtgagtgtgtgtgtttttgtatgctgtagtgtgtgtgtaagctgtatgtgtgtagtgagtgtgtgtgtttttgtttgctgtggtgtgtgtgtaagttgtatgtgtgtggtgagtgtgtgtgtttttgtatgctgtggtgtgtgtgtaagttgtatgtgtgtagtgtgtgtttttgtattctgtgatgtgtgtgtaagctgtatgtgtgtagtgagtgtgtgtgtttttgtatgctgtggtgtgtgtgtaagttgtatgtgtgtagtgagtgtgtgtgtttttgtatgctgtagtgtgtgttggccccaggtacccctgccattctccgcagtgtagcctgctgtataagaagcaggaggggcccagcaacagggcagcggaagcctcttgctatgacggtggcctcttcctattgtccccaagggcaggaggtggctgtgcagggacaagactgaggctggcgccaacatgcagcaaagccgggagtgcttatctggtggtagtgagggaagcggctgtgcaaggtcaccctggaatctggggtggagccacactcaggcctcccagcttccaaaccgagcattctcaattctacttctcttgctggttccatttacttgccttttttttttttggagacggagtcttgctctgtcgtccaggctagagtgcagtggcatgatcttggctcactacaagctctgcccctggggttcatgccattctcctgcctcagctccacaggagcccgccaccatgccctgctaatttttttgtatttttagtagagacggggtttcaccgtgttagccgggatggtctccatctcctgacctcgtgatcgcctgcttcagcctcccaaagtgctgggattacaggcgtgagctaccgcgcccagcccatttactggacttttatgacacaccaggcacattgtgcttcctctgtgtcctctcatgagtgtatacagcaactccatcacctccattttacagatgagggaaccgagcccccatgctttgagccactttgggcaaataccaaatctgcagaacagtgctaagtagtcattttcctccataagtgatatctgcatccagccaattctcagggacacagttcatatcttcaggaggaagggagccaggggatctgatttgctccaggttcacctgagcaaaagccttgctggcacctacccatctgcaccttttttttttttttttttttttgaggcagagtctggatctgtcgcccaggctggaatgcaatggcacgatctcatctcactgcaacgtccgcctcctgggttcaagcaattctcatgcctcagcctcccgagtagctgggattaaaggtgcacacgaccacccctggctaatttttgtagtttttgcagagatggggtttcaccacgttggccaggctggtgtcaaactcctggcctgaagtgatccactggcctcggcctcccaaaatgctgggattacaggtgtgagccaccactcccggccccatctgcatctttgacttgaagaagaagcaggtctttgccctgtacagttttaattgacagtccaggaagcctccctcatagagtaaacttctgtggacggctggaattaagggttaacagacatcagtcctgacccagcctgcttaaggccttcctaaggctttgcacctgcagagatacaggccgtgcctctctgagcaatgagtcttgcttctccttcacttcctggggcttctctcagctccacatggggcaaagagcagggagaaccctgctcagttctgtctagcccgactgggacgtggaaaggctaatccgagccccacttctgccactcagttgctgggcctcagtttccctggctgtacggagaaggtaagaatcccatcccggcttgtctagaggacgtgttagagtgaagatcctgggaacccagctgtcaggaacggtcaagggaaagaggcccgccccgctctgcctgccctcctccccaccacctccaaccctcgccctgctctttctccgcattcctggacctgaaaccagggtggcgtttctcgctgggacaggctggattctggaatctaggaggccttgaaataacatgttttccggaaaagtaccttccttaaaggaaactgcttgttccagggagtagaaaaggatcattgtaccttgccaggtccccattcccctgaggacatgacatttgaaaaggcagactcagttggagacagagacctgcaccccctgccctgtgcctccatccagcatattcgtaatagtgaaaagttagaaaccacctcgacaccagcaggagggggctgggctggcaaattgcaacacagccacagaatcaaatgctaggcaggtgttaacgacaatgaggtaaatttaaactcattaacctgaaagggcatttatcatgtgttggtaaattaaaagggaattagaggactataaatgtagctgcacccttagacgcatagaagacgatgtggagagctgtatgccgaggtgttgataggccattgtctctgggtgggtgggactgtttgtgcattttattttttatttacttacttttttttttttttgagatagaactttgctctctttgcccaggctggagtgcagtggcacgatctcggctcactgcatcctctgcctcctgggttcaagtgattctcctgcctcagcctcccaagtagctgggactacaggcaggcgctaccacacttggctaattttgtatttttagtagagacagggtttaaccatgttggccaggctggtcttgaactcctgacctcaggtgatctgcccacctcggcctcccaaagtgctgagattacaggcgtgagccactgcgccttgcctatttgtgcattttaaatgttttccctttgtgtttatctgaatttctcataatgaatgatttgctcttgaataagaaagagcaagaacctaacaaaggaacaaaagttattttaaaaattataaaacaaaccaactccaatctaagagatacaaaaacacagtcaggcatagacacaaaaatgggggcagatgaatttctcagaacagatacaatgataaggacacacacacacatacacacagacacacacctctcttctgcctaattcacatggctgaggtaggcaaggctggggagttgcaagcggtaggggtttgccaagtttccaggaacaccggagtctgggtgttggggtggctgctggagcttctgggcaggttgggtgggctgaggagagtacagggagcagcctggggctcactagcctgagtgagaggcctggctgtacgacacccagcctgcacctcctgggacagggtaaggctcctaatcccagctccccagttcaggcaagactgaggagcctgccaaagcaactcttccccatcccagcagtggagggagacagcagggtccacagctggggaggagcttcctggcaaccacctacgacttccaggctgaggccttgtcagctgcctacggaccccacttaggaagccagggctgtggtggctcatacagggaccctctgtccttgtcctcctgagatacaggcacagccacagccctggtgtggggcctggcctgaggcaaggggtggatgcatgtcctccatcatccccactgtcactgtgcttgcgcagacctcaccatgtcatctccttatgggcctccctggcctcacctcacccctgcccacccggccgccagagagctctttcttggacacagacctaactccttagagggctattgggtgggtctctgttcccaccttcagagttcgctatctgtggtaggcataataatcatccctcaaagatgtccatgtcctaatccctagaagctgagaaaatgttatgttcaccaaggggaattaagattgcagatgaaatcacagttgctaatcggtagaccttaaataagattatcccagattatctgggcaggcccaatgcagtaagaaatgtcccttcactgtggaggaggagggcagaggagtcagggcaggtgatgtaagaaagacctgaagacagaagcaggccaccagccaaggagtgtgagagtctctagaaaccagaaaggaaaagacaaggaaaagcattctccccagttgcctccagatgggaacatagccctgccaacatctttttttttttttttttttgagactgagtctcgctctgtcgcccgggctggagtgcagtggtgcgatctcggctcactgcaagctccgcctcccaggttcacgccattctcctgcctcaacctccccgcccggctagttttttgtatttttagtagagatggggtttcactgtgttagccaggatagtctcgatctcctgaccttgtgatccgcccgtctcagcctcccaaagtgctgggattacaggcgtgagccaccgcgcccggcctgccctgccaacattttgattttagcctagtgagtcctattttggtctctgatctccagaactataagataatacatttgtgttgttttaagccactatatttatgctaagttgttatagcaacaaagtattcttagctcaaccattagtgctcacaaagacttagccttgaattagctcctctagttaaatctattcctggccgccaagagacagagaaaggtggcctctgagggggtcaggtcttacagctgaagaaggctgttgggtctggagtatgggtgggctgaccacttagagatagggaagggagtcagaaattacatttcctagtaagtaggatgagagtgataatgtgacaattgtcaggccctgcaccaggtgttgggcaatgtgcaaacccagtcatccttatccttaccctacagaaacacccacgcaagtgtgcaagcatgtacgtccaaggttgttcttacagtattgtttctattagcaaaacattataaaaatccaagtacccatcaattgggaaatacataaagattatgatacagccacaaaaaatggaataataggcagccattacaaaaatgtactgacttggaaactgccctctatacatagagaaaaaacagcaagttacagaatggtctcataaaacaaaaacaaaaacaaacaaaccaaaaaacacttttcctcctcaagaaaacaaaaataagaacaaaaaaacctcctaaattacacatatgcgtatgtgtttgtatgaacctaggaaaatgtcaggaaggatgtgatggcctctgggggacaggcttggaggaagaaggaagcttatgttttacttcatatccttctgtcctgttccaccttatttgaacaagcatgtgttgctttttattacaatgttaaaaggaaaaatccttagactaactaagttcaacagtttacttgaccaattaaaatgattcaaaacaaagagaaacaaaaaacaatttgggaatcaggcagccccccagaaccaaaacaggttcagagaactttcagagaactcaggccaacaccatgatcaggcaacatttgtagatagagagagaacagaagtgagatacagagacaacttaattggttacagcttaattggttgattagttctacctaaacgtcttaccttattcaactcagctgacctactgtagttcattaagttcagctgtgtgactcactgaacctcaaccatttgcaagaatatattcctaaagtaattagtttcattaagcgtgatggcttcatattggtttggtctgctaggctcagtaaaggacactaattcaaatcaatggcctcctattttaacacataataacttttttaatgttaagataacacaggttaagaaagcaaacttgactgtcctgttctgtgacaaacagctgttatttgcaaaaaggactccctgggttgagggagaccagagctccacttagcaaggccactcaggaaacagatggaccaacttgagttctttttctgtgtgagctcatctggggaatgagacactgtggatcttctgagtggaaaagtggagtcattcaagccctcctggcttctacagaggtgagagctgaagttctgaaaggggaactgacatattcctctacattttatggcacttccagactaaaatataactttctggcctccatttcagtgaactttgaacttcctcaaaactcacactccccttttcgtaatccataatttttatgtgagggataaaattttctgttttacagcctgatcctggctacttacagaatggctgcactttaaacccaaggtgttctttgcaccctgtagccccagcccataaaagagacaaacactggcagagagatggtcccaggagagcagccgggaggaggcactggagttcagggctccagtcccagctctgctcatctggctcctatgacgagggttgtatccagtgtgtggacgtcccctctcctcaggctggaaaccctctgaggtcagtgcagagcctcggaatagcgacattgacatctgtctggcacataatggccttcaaggtgtcctaagtttacaaagctctttcccaggcatctctcagttgtctcccataacaagccttggggcccagtaaagcaggctgtattaaccgcagtttacggatgagggaaccaagacttagagacacaaaagtgacaggccccactccaagtcactcaacaaattggtcacaaagttcagcacaggaccatattatcccctctccttcagccagagcctcatttttgcctcttttatatcttctgtttcccaggtagattttgcttgataaaaaggggtctgctgctttaaaaggtttgaaagctccagaataatgtttccaaattccccgcgaatacttctgttcagtattcaggaatgagaaattgaaatttctgggaattcatgagcattcctgaaattatacattaaatttttttttttttggagacaggatcttactctgtcacccaggctggagtacagtggtacgatcatagctcactgcagcctcgaactcctgagctcaagtgaccctccttcctcagcctcccgagtagctgagactataggtacatgcctatagagtgtgcccctaacatcttcatgttagccattagggtgctcctggctattttgttttcttcttttctagagacagagtcttactatgtgaccaggctggttttgaactcctggcctcaagctatcttcctgcttcagcctttcaaagtgttgggatgacaggtgtgagtcactgcgcctggctcatattttctataacattatattcacatacttttaaataataatgaatgaccagaataataaacagttaataattgtcagtgacaaattgatgctaaaagttccagactttttccttaaggtttattattattatgaaccaatatgttgtgacaagattatttcaataacataaaaattatctccacctgatataggcactggatatagaaaacattaaaaaggagggaacattattgcaaaataaatgccagataaaaatcacttaaaaatggaaaaataatagcacaaacatttaattttaaaagttatttttaaaatgaacttttaaaacacaaagctttaattgctctatctgatagttttgatctttgttttgtgacaaatattctagatgtaggaaacttttttgttttttcatttttcattgatgttggttgagtgtgcccctaacatcttcaggttagccattagggtacatgttgttttatagaagctcatttcctttttaaatgatgctttatttttatttttactttttggtctgcttactctggtcttgattttgccattgagatcaatattgctcttgctaattcagattttagagcaatttctgatttccttctggagtgttctataacagcaatcacgtcttctttttgcatctcttctgttaaagtatttacaaagaactgtagcctataatgaatattcaacacgtggaaatgccagcaatcattactgggaagtgttcaaataactaacattcagactcactaacaaggttcatagaatcacttgttggaattgccagtttcaagacttattttgctttcaaaatttgttatttttttccgacactgctcataggacttgtataagtatcctatgtgtacaaacttaccaatatttgttttatttgcaaaaatgacttaccattagaagcagaccaggtcacaaacacacacttataaccagtgtgtgctggtaaactgactctcctggagaaaaaaaaaaaaacccttatatgtagggtttgccaaattctgaggggaggcataaatgttcccacaatggtcaatgcccagctaccgaggggatgtcactgagagctgggaagagcagcatacaactggctcttcttgagccagcgctagcccaccaccacctctaccctggcaacagcagtcggaagactgattagatgatggccttttctctcctctactccccagttccattcagaacttaactttcctatgggtgcctcagtattttctactctcgcttttgatttggtgtcagtggattcctttgaactagtcacatctagttcaacatgttgattgctaagctttaattctcacacaaaaacactcttaccaggttcctagatgtcttaacttctttttctcaggaattggcatttggaaaaacagtatttccgagaaatgctgggaaggaattcctgcataaaaacacaaatctggccgggcacggtggctcgtgcctgtattcccagcactttgggaggctgaggcaggtggatcatgaggtcaagagatcaagaccatcctggccagcatggtgaaaccccatctgtactaaaaatataaaaattagctgggcgtggtggtgcgcgcctgtagtcccagctactcgggaggctgaggcaggagaatcacttgaacccgggagatggaggttgcagtgagccgagattgtgccactgcactccagcctgggcaacagagggagactccatctcaaacaaagcaaaacaaaacacaacacaaatccaggaaacccaagtaaaacctatttgcttgactgatcgtgatcctactggatacattctcctgggtcccaattttggccaccgctcattttcattgatctcattttaaggggtttgaggtatggagtccttaggatttggtgttaagtttggtgatttttcagagaggccgcaccagagctgcatcggtgatcatttgactttatgtctgaccctgtgcacaggggtctacttgtctcctaacctcagttttcctctttttccttattagaaaaacaacaataacatcaacacagtccctcttggaactaggaatggccagtagaagtggtgtgtgacttctgggaaatgtccttaaatagaggcggaatactcttctttgttttttctcctttatctggccagaatgtagatataatggctggagctacagaagtcagattggaccagagtggccttgggagtagaagccccatttgggggaacaataagataaaaggggcctgggttcctgatactgtgggagcccatatcagtcctatactgccttcttccaggcttttataccaaagcaaaacagtcttatttaaaccactattgatatgtggttttctatcactcataactgaaacaaattaaacagcacaccagtgcattgtattctgttacatagtttatgggaggccattgttttggactagcctcctacactggccctagcagagcagatcaaaccagagcagagtcacctgtgctaactgccaagtcatcaaaccggactttgaaatgaggcagttttccaaaaacgcaggagcttccagtcaccctgaatcagcacaataaaaagtgccctctgctttaaccctataaggaaagcaactttgaaatgaccaatctgctttttgttccctgtttctgctttcttcagccctcttttatccataaagccaaacttctctgcccacttcactggaatactcattctatttcgtagaatgaggtgttgcctgattctagaatcacaaataaaagccaatttgatcattacaaataatttgttgtaattttgcctttgggaagttcctagtgaaagcaaaagctactagcaagaatccttgaaaggtttgtaatggaggtgaaaatgaaagactgtagcattacccagtgactcagagagtgtgggggaggcagctgcatctagtgataatggatgatacatttggaatagaagaggctgtggtttcatgcatgcctgtcttcccatctgccaagaaggctgatgaataagcttttatactcctctaagttggtaaaagaagttttcagatttttaatactcaaaggtcttttcacaaatgactatgaccttttcttttcttttcgagacagggtttcactcccgtcgcccaggctggaatgcagtggtgaaatctcggctcactgcaacctctgcctcctgggctcaaatgatcctctcgcctcagcctcctgagtagctgggactacaggcatgcagcactgcgcccagctaagttttgtattttttctagagacggaattttgccgtgttgcctaggctgctctggaactcctgagctcaagtgatccacctgccttggcctcctgaagtgctgggattacaggtcggagccactgcgcctggcctctatgcctgtggtctttagtttgtaggaaccagaccactcaaaggctggaacgtaccttattgctctgccagtgaatggtttaggaactggctgaaggagctggggattcagtctaggaagaacttacaggagttgggattgggtttgagagctgctttcacacatctaagtaaaaaagatttagccttcctcacagagggctctaggccaaaaccagaacccaaaggtggaggctgccaactttaccctaaattaaagagaaacctcctacccatcagaactggatggaggtagctttttgatagcaactctccactgctgggaatatttaatcaaaggatgcagaaggagtcattaactgagcagcagttcccatataccagcctatgtattggtacctacctgtctataacattttccaggtctcagccaggcacggtggctcatgcttgtaatcccagcactttgggaggctgaggtggaaggatctcttgagcccgggagttaccagcccgggcgacacagggagaccctgtctctacaaataatttaaaaattagccaggcatgatggtgcacacgtgtgtggtcccagctacttggaaggctgaggaggagaatcaattgagcccaggaggtcgaggctgcagtgagctgtgattgtgctactgcactccagcctgggtaacaaagcaagaccctgtctcaaaaaaaaaaaaaaaaaaaaaaagagagagagagagaaaaaaaggcaatgtagtacattttaaaaataaaactaaatatttgcaatttgaagtacattctctttattccaagattatgttctttctatttcaggaggtgttataatgtctttttttagtagtaggtggtattagctattgttgtttaacaccctaattagacaacataaaatcttggcaatcctatataattccattaaaatttacactggctataagatctagaagtctggtaatatggatgagatgacacctggttgtctgaattgaccttccaaggattagtagttcattcgagtgtctactagatgccatttttgtgtatttacagcaactagataatttcatggttcaaatcagagaaaccagtaatgtgatccacgtgcttatggtaacttaaactttattgactattcatttttgacacatatagctactttttgatagacatgaattttctatttgcatttaaaaacaaaactaattttcaaagttctattctcaaaatggcaatgatgacctttctaaatgctctctttaaataatcctccaatattctcagaaatttagtgtacctacagcaaactatttctcttagtaaaagccttctgtgagcaacttaactgtctgatgtctttatccgtgtgagcagggactgggtcctgtcctttttcttttttttttttgtttgagatggagtctccctctgttgccaagctggagtgcagtggcatgattttggctcactgcaacctccacctccagggttcaagtgattctcctgcctcagcctcccaaagtagctgggactacaagtatgcgccaccacgcctggctaatttttgtatttttagtagagacagggtttcaccatgttggccaggatggtctcgatctcttgacctcatgatcctcctgcctcggcctcccaaagtgctgaattacaggtgtgagccaccacgcctggcctggtcctgtccatttttacagagcagagagcatctagcatgccaccacattaatgtaatgataataatttccatttgtctagagacttatgctttacaaggcccttatagtttacttccccttaatggtagttcaagtagcagagaatgaccttttcattgtccttctctgtgataagccaaagtgaatgtaatgtacattcttcatagtgaaggctttctacctcattcatttattcacaaaatatttattgagcatgattatgtgttaagcactgaactgtgctctgtgctgctgggcactgtgtgttaggtacaaacacggcagatggagccccttcccccatgaaatgaacattctaatggggcgttagtcaataaacaaataaataaatagattgtcagggggtaatgagtgttatggggaagaataaagcagtgggagctgggaagcaatgggaggatgtcaatcttagggacatgagaaggcaccctcatgcagagacttgggcaacgtgaaggatcgccactgtgtgaccaactggaggaagcacgttccaagtcttgtggcagaaaggagcttggctgtttgagaatcagcagtgatatcagtgtggctggagggaagggaaggtgggacgagtgggtgggagataatttccagaggtggacaggatgcagattatatgggagtttggatttgattctcaagtgtgatgggacactattggagggttttgagctggggagagacatgccatgaaatgtgaagtctggcctgcagggaagcaggtacaccaactgaatgagttcaatttggagatatatatatttgagatggagttttgctcttgttgcccaggctggagtgcaatggcacgatctcagctcaccgcaacctccgcctcctggattcaagcaattctcctgcctcagcctcccgagtagctgggattacaggtgtgtgccactacgctcggctaattttgtatttttttagtagagatggggtttcttcatgttggtcaggctggtctcgaactcccaacctcaggtgatccgcccacctcggcctcccaaagcgctgggattacaggtgtgagccaccgtgcccggcccaatttggatatattttaaaggactacctgatgcgttaaatgtagaagatgggggaatgtagaatgctccacagagttttgtcctgagcagccaggtgagtggcgatgcttttatttacttacatgagaagaattgggaaggaatacgttagaagaggagacttgagaaaccaagagtaaatgttttggattagtattaattaaattggaaaagtctatgacacatcgaagttcagatgtcagataggcaggtggttattcaagtctgaacttaagaaggatgggttagggctggcaaagttgctatgagatccatccttgtggatctctgctgcctggtcagcttagatacagtagaagccatttaacttattctaatggcacctagaaatttagcatgatctcctaatatcttcactacatttcatctggaatatttactacattctacatctactgaaactatcagacattagaccaatacatttcaaaatacagaaagtataatttgaaaagttaaagaatatgattttctattgaatttacttagcttatttagaagtcactttgtttctgaatgacagctgtatcaacatgacagcactttccttgaggatccacaggtaagagctttgtggtgcagatacctgttgagccagcagtctctttctagaattcaatcctaaggaaataatcaaagactggatcattttctcaacaaagatgttcatctcgtcattatttgtaaaacaaacattggaaacaaagtaaccaccaataaatagtagattcaataattatagcataggacaggcacagtggctcacgcctgtaatcccagcactttgggaggccgaggggggcggattgcctgagctcaggagttcgcaaccagcctgggcaacacggtgaaaccccatctctgctaaaatacaaaaaaattagccaggcatggcagagtgcgcctgtagtctcagctactcgggaggctgaggcaggagaattgctttaacccaggaagcagaggtttcagtgagccgagattgcaccactgtactccagcctgggcgacagagcaagactcatctcagaaaaaacaaacaaaaaaaattatggcatattgataaaatggaaaattattcacacattaaaatgatgtcaacaagttttttgtaacatagtaggtatagttatgatatgaaattaagtgaatcataagatataaatgtgcacatacaatatgatctcaattacataaaaatatgcatgtataaaaaatgaccagacagaaggaaatgacttcaaaatgtttagagctattaaccacaggggatggaattccttcttatatttttgtccaatcttcctatcatgggcatgtattatttagtattctgaaaaaaatccagcatttggattgaaggcaatgaaaaagaaacaggaaaatagaactagatttggcctgggatttgggactgtggtcctggtttgccttccctcccactttgagcagagggaatgccatgctttctctaagcccaagatttctcacctgcaaaatgtggacaagcatcctgccctgtctcccgcttggggctggtgaaaagattcagtggttatgccagccaaagggctgatcacagacacagttcaaagtttggaatgtgaagtgtccgccccaaagttccaggatgtcctgcttcctgaagagcacagttagtccaggaaagaaactgaaggggagcaaagttcacagcccctttgggcatcgtgtccagggtcccctaggaggtgggtcttccagcgtccacgacatgtgagcccagtcccgactccttcgtgccttagggttggtagttagatgggagagacctcagcgatcacctgataataatacttgttttatagttatatttagtgaaaattcacaagtgtcaggattgatgccttttactcattttgttcaccattttgttcatgaattccacccaatatctacctgtgtagttggagttattaaattcattgttatatggcagaatttccctttcgtaaggcctgacgcacaccaactcctgcttttgggatgagtgagattcacacgaagctgggataacaaaagtttgccttctgtaagacaactcaaagctcagagagagacagagatgctgggggcataataacgtaaatctaagtgatgtactacgaggcaatcactggagctgtgctaaaagtctgactgtctctgggtgcttgaggcttaggttgttttctttcatctcctcctttgtgttcacccatttgaaatcatctccattcaggagaaaacaagatggaacccagtgactggccaccatggacacatgcaagggagaaggagaagtccccagtaggaaaaggaatgtgtacaatgaaatgtaatgatgtataatacattggctgtttttgaattccaaccatggatttcccagctactggcagtgaaactgatcttttctgtgacacgcctgtccccctttgtcttctgccatgagtggaaacttcctgaggcctcaccagaagctgagcagatgctggtaccaaacttgtacagcctgtagaaccacaaggcaaataaatctctttttgaaaatagattacccagtctcagatattcctttatggcaatgcaaaatggactaacacacagccctaaacctaattaaacccctagaaaccattacatcctccaaagtaatcaattcccccaaaactaatcataccccttcccctaagcactcccaatcaccaagttaaccactagccatgatccaccaatcatccatgaaacaaatgtcattgtggcagagaccactaatctttcaatatccatttttcacttcctcatttcaccaataaaaccctctacattttagctgagcacatgacctcacagacagatatgatatctcctgcaatcctttgcatctgggtaaggccatatgactaacttctgggt

SEQ ID NO: 2440 - DNA, 528 bp, Homo sapiens
cttaggtcgagggaccaggccccacaagagtgtcacaggcagatcccagtgcctgcttggatttcccatttgccttccctcagaggacacgttgctatcagtgcctggctccagcgctgaacaagaaatccaaacagatcggcagaaaagcagcagaaaagaaaagatcttctaaggtaagggcagggaagttctgggagttctcattgttggggtgagactggacttaaagaaggaggacccccaacctctggctaggaactaaatgaaagatttttcaggcctatattaacaaaagaaactgaaagctactaaagacttcctggcttgagctctgagccagacacccacagaagcccagggagctgaagtccactgagcaaaataggttacgaaaagcagcttcctctactagttagcccctgcctgaaatttcaccatcactcatacttttggatgaatgtggtgtttcccaaacctcagtcatttcagaaccacatttataactttgccatatctgagttccac

SEQ ID NO: 2441 - DNA, 981 bp, Homo sapiens
agcttttccaactcagtccttttgggtaattatggtcattatgtagacatgactgattatggttatagtaatcgaaggggattatttccaagactcccacagatactaaaatctaggtcctacagttgaccattggtgatcagctcaaccttcagcttgtctcccctccctagagattaagaaatgtggctaaaagttccaactctctaatcatgccctagtttttctgaccaatccccatcctgaagctatttaggggccaccagtcatctcattagtgtacaaaagatactcttaccactctagaaatgcctcatattttaggagctgtatgatgggaaccagggcagaaattaaatatagatttttaaaaattataccacagtataaatagttttattggaacacagctatgctcattcatttacgtattatgtggatattttcatgctaccatagcagagctgaataattgtattggagaatgtgtggcccacaaagcttgactatctggccctatacagaagaagtttgctgatctctgacttagctgcctaggaatagccaggcaaccagctgctactttgagcacccggctaaaataagcagagacaactggaaggcttgatgtgaaaaagagctgttgaagtgtacacaagcaagctgactgccttatgactaatacttgacagaacccagcaagaggatatgagattgcagatggatgacctcaatcctgaacagaaaggcgtgcatgataatggagagaaaaaagccaatggggaaaaaaaacccaccactatttttttaatagcctaacacacacacaaaaaactggttttcctttttctgtaatgtgtctgtagagctggctattctgattaaagttgcccttgaaaaagcaattaacttaagagtcttactggaagttaaaaatcccaaggggcaggaaaaatgagtgtatgggaagcccagtcaaca

SEQ ID NO: 2442 - DNA, 3881 bp, Homo sapiens
gatttctgtggccatgtcatgaattgtatgcctccagaggacagttctgttttttccctctgtttggtatttggtggtcatttcatgataagcagaaagaaaactttgggatagtgctattctctgctgaaggacggatttacctgaatgatcttccaattttgagtctgggtagaatctagggtcctaagtcttaagtgtctgcaaattcattttaccaggcaagatagacttctttttgcttcttcatggtgaagatccttgcaataatctcagatcctcaggctggaagccggtgcattaccccatgatgtacttctttcactaacccatcaacttctatactaccagtgtaacactcttctcaaccggactgcctcatatggggatataggcttgccatctttgtgtttattttttaaaacaattgtttgagtttccatccaggttttcttcaaagggaagaaatttcccctaaattaccaagccagtttcctctcataaggcattggattaagagtggccagtagctgagttttgtgattctgaggataagtaataagtcaaaaagagctgttggctaatcctttagaaggatactaaaagaagagtaagatgatcgtaagcttcctagatccaggctgttaaaatgacctccatattaccaagacttgtcagtactgttaagggaaaaaagaggggaacccctatatataaaaccacaatcttgtttcatctataatacccctggtccccctccttcatctacactgccacccccacctacacccaccacttgatcattttatagcagatattttattacatttttgaaagcaaaggaaacataagacaggtgtactattttaagattatattaacatatttcatgtttctttaatgccccaacacacacacacatacacacacacacacacatacacacacaccaagagctgatcacttgaacaaatcattaaccaattgacttgcttcccatttctggtataagcttctgtaccagtgctttatattaattaccaaaaccctcctgcagacagagcatgatacatctttagtataggatgatgcaataaaatgtttatgctgtgaaatttggggacaaaatttttcatcatggcataatgtgcatgtatgggcacacatagctttgtttgtttattcttttttcagaagtccttccaattctaaaatgtattgtagtctgacagtgcctctaatattggtaattctttttaagtttataacttttcccgagtttgtttctgcactttaaggtttcttaactaggttatttctagttgagctgtaatttcagtgtatagttctccagagtgtttgtgctaagtgctgaagtttcattattttaaagctacctccctgaaagtatattacaaatgttctacaattgtaatatagtgattcacacacaaaaaaatccctattatcagcatacctaaactacacactaaatatttaagaaaaaaaaagtggaaacattagtagcttttatactggaatcttgccatttctttttcaatttagaatagaatttggttgtcttatcttggtactctgtgcttcatgacatatctgaaagcattcttttggcatggatctggaagatagttttagagccagacatcagtgtagtagttctcaagatactgaaaattcataacattcttatgggtataataaaaaatgtttacatattgaattctatgaattctataatataaagtaggagcacacttactatgtgaaatataactcctatgcaatataaaagtaaaattataagcatatttccataaacagtaaaagctattaaatctaagcatgattgacaatttcaaatgttccaatatcatttaggcataatacttcaaagatttcaagccctttttctgctagcattcagaaaagtagaggacaagaaaggatgaagaaaagcttacagtgaaaaaatcttaaaattgagagaattcaatctattaactttaatctataaaccttttttctccgaactgggtacattggcatcattatttgattttagcagcaaacatttgggtttagcttatggaaggcagatgtcctgtgggaacgtgacttgaagtcaccatataacttcccgctaaataaacatctgaactgtaacttgacagctaccaagtgaggtcaagtgtctgaaagtgctgtgtacaccacataagcacgttttccttatgtgaaggatgcatttctagcaatgtgtatcagactttcaagtactcaaaacatacttgctgccaaactttgccacccaccactaacctccatttgatccttagaaggtagaaacttattttacaatagaaaaagagattattttatttgtatgatgtccctaaaattatttcttggtattgatagacctaggtttatcttatttcaagtttgccttattttttaagaggtttattgagatataactcacatacatgcaatttacccatttaaagtgtacaatttaatggcttctagtatatttacagagttgtgcatccatcatcacaatcaattttaggacatttttatcaccccagaaataaagcctgcattcgttggccatcaccccccgattcccccaagccctcagccccaggcaaactctagtctactttctttctctatagatctacctattatgaacatgtcatgtaagtgatatcattcaatatatggtcctttgtgactggcttttttcactcagcacaatgttttcaagattcatccatggtgttgtatatatcagtacttcgttcctttttatagctgaataataatatgatacatacatattgcatatacatgtccatattccatatatgacatgtccatataatggaatattatccattcattagttagatatttgggtttttcctattttttggtttggtttggtttttgctattataaataaggctgctttgaacattcatggacatacattttcatttctcttgtgtatttacttaggaatagaattgctgggtcatatgataactcttcttagccttttgaagaattaccatgccattttccaaagtggctgcactattttacatccccagcagcagtgtatgagtgttctaatttctccactttcttaccaacacttcttattatctgtcttttagttattattcatctttttatcagggtgggtattaaatgctgtctcactgtggtttgatttgcacttctctgaaggctaataatgtcaagtatatttttatgtgcctattagtcattcatacatcttctttagagaaatgtctattcagatcctttgcccattttttaatgggggtggctttttgttattgaattgtaatcgttctttatatattaaacttacaccttgtaaaaacgctgggcactagactatacagggattactgtaccacttgtcataaatcatagctatggtcctccttgagaagaattccttactgtagttaacacctgctctaaataagcactctgaagtgcttcttacaaagggtaacgtgggccaggcacggtggctcacacctgtaatcccaccactttgggtggccgaggcgggtggatcatgaggtcaagagttcgagaccagcctggccaacatggtaaaaccaagtctctactaaagataccaaaaaatagccaggcgtggtggcatgagcctgtaatcccagctactcgagaggctgaggcaggagaattgcttgaacctgggaggtggaggttgcagtgagccaagattgggccattgcattctgttaagccattgcactccagcctgggcaacagggcaagactccgtc

SEQ ID NO: 2443 - DNA, 442 bp, Homo sapiens
ctggcatacgattactgtccagagctctggaagaatgctagccttgcacagatattttctttgcctggttaggctgtcaaacaccctgacctcgtcaatgttttaaagggtaggagttgttacagttctcagtcccctaagaggctgaccaagtgctgagaggggctcccagcttctctgcattctggaaaacccactgcagagccccgccctagtgtgcttccggagcttctaatgcacttctctattacttcaagaacactgtgtataataataaactctacagaaataaaccaaatcacaagaagctttcaggtctggaggctgacatttctcaagacagatgcaaaaacccaggcccagagagatgaagaaacctggctaaggtaacatgtaagttagtgtcaaaatcaggataaaacccagatcttctgactcttag

SEQ ID NO: 2444 - DNA, 1779 bp, Homo sapiens
aaagtgctgggattacaggcgtgagccaccgcacccagcctattcccctattcttaaacatgagggaaaaaaggttgccagacatctaaggaactctactaggatgaaaaagagactataaagaaatagaagggctgggcgcagtggctcacatctgtaatcccagcacattgggaggccgaggcggatcatacagtcaggagttcgagaccagcctggccaacatagtgaaaccccatctctactaaaaatacaaaaattagctgggcatggtggcgcgcgcctgtagtcccagttactcgggaagctgaggcaggagaatcactcgaacccgagaggcggaggttatggtgagctgagatcatgccactgcactccagcctgggcaacagagcaagactccgtctcaaaaaaaaaaaaaaaaaaaaaaagaaataggaggctccgtccagtaggtcattcctgaaatcccagcactttgggaggctgaggcagggaggattgcttgagctcacgcattcaagagcagcctgggtaacatattgagaccctgttggtacaaaaataatttttttaattagcgggccatggtggtagtcctagttactcaggaagctgaggcaggagtacttgagctcaggaggagcacctgagctcaggggttctagggtgcaggctgcagtaagccatgatcatgccactgcacaccagcctgggcaacaaagcaagaccctgtcttaagaaaaaaagaaaaatatgcagagctaaagcatatttagctttggggaaaaaaatgtatgtgtattcctgataaagttggctacataaaaaactaaaacatacagcaaaaacaagtaaataccagaatgccatatcactctttatacccattaagatggctacaataaaaaagatggaaaataagcgtgagaatgtagagaaactgctatcctcatacactgttgtagaaacgtaaaatggtacagctactctggaaagaagcatgacagttcctcaagaagttaagtgttgaattaccatatgacctagcaattctattcctaggtatatactaaaaagaactgaaaaatgtatgttcacacaaaaatttgtgaatgcatgttcaaaacagctgttgtggtctaaattcatgttgaaacttaatcatcgatatggtggtattaagagggtggggcctttgcagcatgagccactgtgcctggctccctaaaggggtaaattttatggtatgtgaattatatctcaatttaaaaaataaatgtaaagtcaataattagctgaaaacgtgcaacatgaaaaaccagtgtcaattcctcaatattcaaagaactattgcaagtcaccaggaaaaaaaaaaaaatacacagctcaataagaaaaatggggctgggcacagtggctcacatctataatcccagcactttgggaggtcgaggtgggaggactgcttgagcccaggaatttgagaccagcctgggcaatacagtgaaacaaacctctcccaccaatcagccaaaaaaaaaaaaaaaggacaaaggacatgaatatgcagttcataggtaaagaaaaacaataatgaataacaatgtgacaccagtttttaactatcagattggtaaagattaaaaactttgaaaataatcagtattgggagttagtaggaggaaaaactctcaaactactagtaggacattcaattggtatagttgctttggcaaggctaatttgacaatatctactccaactaaaaaagcagag

SEQ ID NO: 2445 - DNA, 1631 bp, Homo sapiens
tccacattccagctaccagggagcagacagagggactatccagctctctgtggcctcctcagaaagagatgagagactcaagaccccaggacatgaaatcacttacctggaatggcatggtcaataaaggcagattatggcagtggcaatgtattaagaggagtatcaatgggaattgaagatccaagcaagttaaatatgtgggtggagggatacaaaaacgttgaatgagattctaacattttaggctatttacaacagcacagtgagtcaggggagggtccagtggaaagcgactggagacacatccggcagacaggcagaaatgtcagtttcacctcaaagttgtggcagaagtagtctgagccaagaagcacaggcattcctggggtcagcagatcagggcagaaaggtaagctgggaacaaagtgacattgaccttgaacattaggcaagggcttatcttcgaggctgatgcttcccagtcagtgcttcccagccttcctcattaccatggcacatacagaaagcaaatatgtgtgcatctcactgggcagtgactgagtgggctacctcccaggcctgttcctgcagtgccccttggttcttcatgagactattcagggtgtttttctgggcaagtaactccaaaggcaagcatgagagcagctcgaagacttaagaacatgtcacaggactgggaggaatggaaggtgtcacatcagaataacaatagctcttgacaaatggatgcacagccattcccataaacaggaatttccctgcaggaaaacttcctcccatgggatcttcaatttgatgaaagcaattacaggacaaagaggctgatttcccctgcatctgctgaggtgaagccagtgctaaggtttcacttatactgaagaaattcttggtttcctccagaacagaacaccctgaaatatgaagctaatctcatcagagggacaggcaccttaccaagatgaaaattccttaagatttatttgcccagccttaaagcttagacaacttattaagagttacaatagttttgtcaaaaatgacagccttcagtgcttcacagaagccataaaaaaaacaaagtccaataccgatgtgttttcgttaactgaaaatatcagtgaccaacaaatacaaagtttcattagaaatcatcaagaaaaaccaggcttgggaagataaattccttgatgcccatgttttaaaaatgatcctgtctgtggattaaactgcaagtcatttgggccattgctcagccgaaaagacaaatgtttcagagtagaaggccactctcctctggcctcaatgaaaacgcatgtcaccttccggctacagacccaggtggccgcctaccaccttgcattctcaggagcaatgcccacctgtgcacaacacatgaaagaacatgttcacggaacacctactgtatggccaccactatgctaaaaatttttcagaaggtttctcattttgaactcagaataaagagttatttatacacattatgactgtttacccattataaaaatgtaggctcagaaaacttagtacttgctccagtacacagagccaagcagctaagctccaagaatttacactacacacacacc

SEQ ID NO: 2446 - DNA, 819 bp, Homo sapiens
cttgtacaagagcagatgtgcctctattaatagctactatgtaaagaggcctacaattagagactgtgacatttggcaaacatatttcatttctaatcctctcaatactgcaaaatatctgccgtcatctttttcttcggcaaggcaactgagctgcagacgcagagacgcagatctttgtgaagaccctcacgggcaagaccatcactcttgacgtcaagccaagtgacaccattgagaatgtcaaagccaaaattcaagacaaggaggtatcccacctgaccagcagcatctgatacttgctggcaaacagctggaggatggccgaactctctcagactgcaacatctggaaagagtccaccctgcacctggtgctgcgcctgtaaggtggcattattgagccttccctctgccagctctcccagaaatacaactgtgacaagatgatctgccgcaagtgctatgcttgcctgcacccccgtgctgtcaactgctgcaagaggtgtgaccacaccaacaacctgtaacccaagaaggtcaaggctcttccttcctcgaacggcagcctccctggagcctcaataaagtgtgtctctttcgttgactggagcagcaaaaacaaacaaacaaaaaaacaatactacaaaatatgttatagctccattttacagatgaggaagctgaagcccatagaaatactggttttgagttctggtgttttctgaacagtgtggccaaagctacaggggacaaaagagatgatcagaggaccagcagtcttggcctctgggagattgctggacatgcagaatcacgg

SEQ ID NO: 2447 - DNA, 1269 bp, Homo sapiens
cccggatttgccgccgcgcttgggaagccgccaccgccgccgctgctgcatggcactaggctcccggcggggcaggttccgcagccggcaccgctctggctaggcgcacggaggcgccttgcttagtctgacccttatttggccaggcgtaaaacttgtcctgcctaaaagcctactgagacctcctaactggtctaatccgcgggagacgccaaaggcggcggccgtttgtgcgcacaggatttttcttggagctgtagcagtctaggaagccagggtggaacttttgctaagctcccgttgtaagcccagagctgtaataactgctgagacacaaccagcagtatacaggctccagttggaaatcgagaactttccagggctgtcacccaggctggagtgcagtggtgccatcacagctcactgcagcctcgacctcctaggctaaagtgatcctcccaactcagcctcccgtagctgggactacaggaatgtgccacgcccagatggtaaactcctgcaaagcagattgtttggttcttcttccttcacggtgcctgacccatcgttctgcagatattagtcaccacttgtcttgagtggctacctggggttaagaaaaaagctctgccctgaatgccaatgggaaggacagctgttgcagctcctgagtgcaggccaaggaaggcattcaccttcatgaaaaccaggactactgtgcatgacaatgaactactggatagagactgatgcctttaagatagtcctactttcaatcttctatcatggagaatatccaatcaaatgagaagtggaacaagtcaaaacatgttccaggcaaaatgaaggaacaaggatgactggtggagagtaagcagtctgcatggtgtgatggctggctgaggtggtcttgtggatctgcgacactggaggaagtgctgtcctgggaggaaagtctggcaaagcaagcctggatcagtggaagggcttgagcagcaggctgagcagtatgggctttggactacagagaactccaggtgaggaaggaagaaacatggttagactacagtgatgccatttccttatgtaagcatttgacttcagaaattgaaactggccatgattattgagtaggcacggcagttcagctgaaggatgatcaatggacttcaactcagatgcagatcttgactgacagaagataattatcattcaagctaatggggaacttgaattggactcaatggtgttagaaagtgaagaaaggct

SEQ ID NO: 2448 - DNA, 8343 bp, Homo sapiens
gcctcggcctcccaaagtgctgctctttgtcttcttataaggacatcagtcctatgagattagggttctacccttgtgaccttatttaaccttaatgattttttttaagggctcttctccaaatacgttgggattgggcagcacaaaatgaatttggggaagggaagaacacgattccattcataacatgtatcttttggaatacccccaaaatattggcttttctacttcaggtcaagcatttcatgataattgttataaaatgtttactaattgtgataatcacagaaagttaatttttaattcacaagaccatctcagtattatcatattataagaattttatgctttgcccccaagaaaaacaatgcagaaagattgtaacacaatatatttagcatatttatgttgaaaggagaatgtgaatgggtctgctcccttctttaagtaagctcagtcccccttcttgggactatgcctttcataattcttgctacgttataaagaaggattacaagatgggctcacatatagggaaatttctccttataataatggtaacagtacaggaatagcagagtagctagtatcagactaaacctcttgtagacattaattacaaactcttgtaaacattaattacaaattacaagaaaaaaatacaaacacatacacaactatttgaaagcattataaaatgatcaaaagcaggtaggaactgaaaaggaattcaactcttgaaaggagaaacggcactcaataagatccatatttatatatattttcccctaaggccatagagcaattagaacacaaacagaaagccacatttttattggcttaagtatcagaggacagaatttgaggatgctgataattggaaactttgtaaataaatccacaaaggagggtgccatagagaggcaagacttaaaatcttgatatagactagttttaaacttttggataaccccaaactgcacatgtctagggcagagtccaaggaagacagggaacggcaatggaagtaaggttttaaaagctgggcaagtaatctagctgttgactacatcatagaaaatggattttgaagtttaactttagtccagttgaaggggcttagtaaatgcctcgagctttccattgaaataccagaacaatcataatttttgattctaataatagtctactttctatcattgaattatatatcctaagactaagagcaaagctaaacactaagattatgggtaaaaccttccctaacaaagtataaaatgcaagccttgacaagttcaaggtgatcagctagtaacttcactgactgggcacataaaaattaacacttctcagagagatatttaaaaatcctaagtctctataatgcatcattcacagtgtgcactcaaaaagtactagacatgccaagaaataaaagagtaaaacccctattcaaaagaaaaaagaatcaatagaaaaaggtctccaattggcctggatgttaaaattagcaggcaaggactttaaaagaaataatcataaagatgttcatgacttaaagaaaaggattatcaaaatgagtgaacagatgggcaaatctcagcagagaaacaaaattatataaaagaaccaaataacaattctatgactttattagtcatcagggaagtgcaaattacaaacaccatgaaataccatttcacacccttagaatagctacaatttaaaaggtagcaacaccaagtgttggcaaggatgtagagcaaccagaactttcatacacggctaggaagagtaaaaaagataaagccactttggaaacaagttttgtcactttcttataaagtaaaatatatacctatcctaggaaatcccaacttttccactcttagatatttattaaaaaacaaataaaaaaatatgtctacataaatattgcaaacaaatgttaacagaaacaactcaaatgttcattagcgggttattagataattaattatgatctgtttatacaatggaatactacccagcaatagaaaaagaatgtactattatacaacaacatgaataaatatgaaagacatcatgttgtttgaaagaagccagatgcaaaggagcacactgtatccttccttttataagaagttcaacaataaacaaaatatccctatactgacacaatcagaatattgattgcatatggggagcagagattgattggaagggacatagtgtaacctcctggaatgattaaaaaatgttctatatcttgtttaaattgatgcttacatggctgtattcatctattgaaactcaccaccatgtatgtatattttatctgaattttaaaaatggtatcagaaagcatctgcagactatatattcacttataaaatttaaattcctgaagaccattagagaatatgaacccactgcatttaattactctccatgaaaaatcattgctgtatatagttgtccatgtgatcaaacataaatactaaatatagaaagcaatgtgaatacaaaaaaagaaaaaggaacaagaaattttccagtcttacaaaatagtgcttacttgggaaagggaaactacagatattttctgttccttgttaaaattctttttgccttcagaaatttacattataagtgggagagaattcaaattgttccactcctttggaatgggttctgggtccagctaagcagagtaaattattataacatagcattttaaattgcatattcattgtatcctaaaatcttataagttaaaaaaatagtgacaaattgaaagttaactcacttatattctgatttttaaaaagttgtcactagaggtacatgatttttaaaaaagacaataaggagtgtgtgattctaaagcaactgttctcaaccctagctatacaatagaatcacctggccacattataaaatactatttaccaggacttgagccttattaattaaagcagaatctttatgaggaaagactttttttctattttatttactgttacatccccagagcttaaaacagtgcctggcacatagtaggctcaatgaatatttgatgaatgaatgaatgaatgaatgaatgaatgaatgataaacaagtttttgaaagccaaggaatcattttggtcttatacataatggcagaattcctttaggtgatgtagaatgaaggaatgccaagctgttattttattaaaatgtttgataatttgtgttaactttagctgaaaattaagtttttattgaaatttcctatggatcaggtttcatgctagagtaaggtttataaatgtgaaaagacgtgaacgtgcatttgggaaattcccagtctattatggattagtggcaaagagaaagtctagcatataagcattcacccattaatccattgattagcacttatttattaagtgcttattatgtgccatacacatatgtgctaggatacactgtggcaaacaagacaaatataatacctgtcctcaagcagcttactgtttagtaaaggagaaagataataaataaggaaacaaataataaaatttttgatgaatttgatgacctaaatgagtacaatggtgttatgtattaacagaattttggtcaggtggagagcactattttatattggatggtcagaaaatacctctctagggaggaaacatttgtgtggagacattcacgatgaaaagaagccaacaaagcaaagtgctaaggggagagagtttctagcagaagaaaaaatatgttcaaaatagttgaagtagaaaagaacttggcatgttcaaggacctgagagaatccaattgctggaacataaatagaaagtagaacaagttgaaagtggaataaaaggtggggttataaaatgcacagcctggtaggccatggtaaacagtttgaattttattaagtacaacatgaatctattaaatagttttaggcaaagaaatggcatgttgcaatttgtgtacttaaaagattatttctttttccatatgtagaatagactcaagtgtggacaaaagtggaggcttgtagactagttaggaagcctttgcagaagtccaggtgagagatgatagaggcaatacattgctgcaatcactgtggcaaaggggaaaagtgagcagctcagaatatatttggaaggaattgttaggacttggtgagggattgagtggatgaaagagaacgaagaatcaacatgaaccccagagttctggcttatacaaatggaaggattgaggaaatatctgcatagatgagaaaaaatatgtcaactccaccatttaaaatttggatagaaaaggaaccaactaggagtaaccagagagggaggaaaaaaaaaaccctagagcatgaggaatctcagaatctaaaaatctcccttaaaaactagagtatttcaagaaggaagaagtgatcaaatacgctcagtggtgctaagcagctaagataagggcagaaaagaatcccctgaatatggcaaaatgaagattatcggtaatcctaactgaagcaatttcagtagagtgagtgaaataaaattcagataggagtaggcttaaaagtgaatgggaagcaaggcagttgaagaagctgaagtagacaactctttcaagtttagttttgaagggaagcagaaaagtgaaatgagagctggaggaaactattactgaagaggagataccagagaatatttgtgcattgatgggaatgctctagtatagacaaaaagatcgatgattccgggaaagagggaccgtcaattaagaagtcaaagagaggagcatagtatattaggatgttctcaaaagaatgtgacaccgactcacaccagtcagaatggctactattccccccaccccaccccaccctgagacggagtcttgctctgtcgcccaggctggagtgcagtggcatgatctcggctcacggcaacctccgcctcctgggttcaagcgattctcttgcctcagcctcccaagtagcgggattatagatgcctgccaccacgccttgctaatttttgtatttttagtagagttgcaaataacagaggtatacataggtgaacttaacaacaaaaaataaataaacaataaacttaagggggctgttcaataaaagggtacaggtatactatagaatccaagagtgggaatacaatgacaacctgagaagaggctagaatattgccagtcctttgtcaataatttatccttttctttcccagtctgtttccttcttctccattccacatattataatgtggcaactacataactcataattatagtctttatagggggagaataattgactccattcaagtgttcgctcctgtttcaatcaactatggctgaagagtgaggagacatttggaataaatatggcttctgggggcccattcctatggatcagcagctggcttctggaggcccattcctgtgaatcgtcgatctcatagaagataatattgttagaaggcttacctcattgatgctgaacatcctaaaaagcttctgctgctttgagtcactgaaaaagaccaagaaacatgaatttaaaaaaaaatttcaaatgttataaaataaataatatgaactcattatacctacaatgaataatttaaattcttctttggtagtccaggtaaataacttctcaaatagatttttttaagcatctgtataagttcaagatgtacatcacttcatgtagaataacatctcctaaaaagaactgaaatgcctcagtatacaaccagctgacctggctatcaaacacttatttagcacatattacatgatggacactttgatgtagatacggaccttgggttgtgtcctcaaggatcatacagtgggttgaggaaataggatatgctatccataggaaagtaaataataatatgacagcttattttcaatgagaagtgaatagtacaaagaataggagttgccagatttcaaaaggaaagagctatcacacagaggcggaacaattagaaatttttcatgaaggaagtgttctttgtgctggacctttgagaaagtatagaatgtagattagcaaaaaggcatggaaaaggcatgataggtaggagaggcaagttaggcaaaggtccattagaattgctcaagatataatagaccaacttggcctgaaaaaggcctggaagtatcctcttttgtgctctgtgagaagtttgccaccatgtaaaaagtctaactaccctaaggcaaccatgctctgagaagcccaacctatccaggtggagaggtcctgtagagaattgaggccactggccctgagctcccagttgaaatagacaatatcaacatgtcagcagggtgaatgagaccatcttggaagtgggtcctccaagagtagttgagccatcctgcctaaatttcagcattttgagcaaataaatgatttataccattttaaatcactatatttttgagtgaatcactgacttttttctcaattaagcataggtttagaaactatgaaaaccctagaagaaaacctaggcaatgccattcaggacataggcacggacaaagatttcatgacgaagacgccaaaaacaactgcaacaaaagcaaaaattgacagatgggatctcattaaactaaagagcttccatacagcaaaagaagctaccatgagagtgaacagacaacctatagaaagggagaaaaattttgcaatctgttcatctgacaaaggtctaatatccagcatctacaaggaacttaaataaatttacaagaaaaaaacaaacccattagaaaatgggcaaaggacatgaaaagatacttctcaaaagacatacatgtggccaacaatcatacaaaaaaaacctcaacatcactgatgattagaaaaatgctaatcaaaaccacaacgagataccatctcatacctgtcagaatggctattaataaaaagttaaaaaacaacagatgctggtgaggttgttgagaaaaaggaatactgttatactgttggtgggaatgtaaattagttcaaccattgtgggagacagtgtggcatttcctcaaagacctagaggcagaaataccatttgactcagcaatcacgttactggatatatacccaaaggaatataaatcattctattataaagatacatgcatgcgcatgttcactgcagcattattcacaatagcaaagacatggaatcaacccaaatgcccatcaataacacactagataaagaaaatgtggtatatatacaccatggaatactattcagccataaaaaggaatgaaatcaagtcctttgcaggaacatgaatgaagctgaaggccatcatcttcagcaaactaacacaggaacagaaaataaaataccacatattctcacttacaactgggagctgaatgatgagaacatatggacacatataggggcacaacacacactggggcctgttggagggtgctggggggaggaggcagagcatcaggaagaatagctaatggattctgggcttaatacctaagtgatgagatgatctgtgcagcaaactaccatagtacatgtttacctatgtaacaaacctgtacgtcctgcacatgtacccctgaacattaaaaaagtgtgtttaaattgtgagataaggattcaagagggcctcttgcttcactattgttcactttcctagctttaagttttctcttctatttatcataagtatttatccttaaatgccatgtcaaatgatgactggttaattaattattattattttttagttcaaagggtcccttctaatgttatttatcttttaacaagggaagacaggaatattttcaagatccaagtatttaaaaaggtggaagtgagataggatcggggtttggaatgaagtagaaagaaaaggaaacatgtaaaaatgtaaaatcaccatgtaggagcccaacatatccaatataagctatactgctttgggttatctagctcataatttttctttgcctaatttctctacttagaaataccatgtcacttacggtgtgtttttaattgaggaaagttaattactaactattgttttgtaaaactcatatgccaatttattctaggctaaaatcaacttggcagataattatttttaaataacaaacaaaagacctttcctttctgatgcttttcccaaaacatgcaatataaaccaaagagtaaaacaaaataatgtgttacacttctcttcaactagtctaccatcacttctgtttaactggtttgatacattcatgaaaaatttcctttaaaag

SEQ ID NO: 2449 - DNA, 4267 bp, Homo sapiens
gaaaccctgtttctactaaaaatacaaaaaattagcccggcgtgctggcgggcgcctgtagtcccagctactcgggaagctgaggcaggagaattgcgtgaacctcgggaggcagaggttggagtgagccgagattgcgccactgtactccaacctggccaacagagcgagactccgtctcaaaaacaaaacaaaacaagaaaaagagtgtaaaagtattttgtaatctgttccacagaactatttctgatcctcttttctgataaaattcaatttcccagatcaataaccataaataatgtacccaaatttgtcttaatctcctctagcaacaacatcatatctggcacaactaaaatcgggtctcttacttggttgagtttgtggtagtctattatcttcctccaggatccatcagcttattgcaagggccagactcgtaaagtaaatagaaatataaaataatgcaggatgctgcattttgtatgtctttaagggtgatgctaattgctgccattcctcttcagattaaatacagtgattgatttactattcggtgaatagctacgggccttcccatggaacctagtcctttactgggtcttctgagcttatgttgtttgttcgctctatcatgagcctttctctgactctttcagagtgtcatggatattctggcatttctgtctcagcatgagcagcagataatgcctcatatcttgaatccagcctgttcccttttgtaaatcaagttttattgaaacacacacagccactctcatttatatatgtattatttatgagagcttttccactacaatggcagaattgatgagttgcaatcgagaccatgtggcctgcaaatcctaaaatatttattatttgtccctggtagcaaaagttcccttactgctcaagtagcccattgcttgttccatgcttctagaaaccattctagtagagtagtatttccagagtgttaaattctgtgttctgagagtcccaaattgataagttcttgcttatacaactttattttccagccattctgatcaaacaccctcagaaaccagtctcgtgggtagtctcccagctcttgccagtatatactggctaggttctctaactctttggaggcgcagtctctttctccattatcagtctctgcctgtccctgactgtgtcatgttgtaacttaactctagttatgggtctagcagattctaagacaggtatatgttgcctggcaaagaagaagcctttgcttcattttcaagaaaagagggagtgctagcttctagcagagaggccacttgtgcaaattcagagggtttgggggagtcgtgcctttcataatttttgagagtatcaacccagatctcccatcacctttgttaggatcccattatgtcccaagcagtgcttaaaccttggcatagctttacttggaagttcaaactcattggcactcagctactctgacaattaagccctggtcctcgtcctaagcttactcttccctctcattgcacatgataattgtctctttacaaacttccaaggtgctggctttcttattgacttttaatcattaagtaattgctctccactccattttattttgtcattacagttactaattctaccatattgctaaatgcttaatagaatgtattagctgattaattttctttcatcagtatacattgcaccaaggactcactgttttccatctaccaccagtgatgggactcttccagctaataacatacatttttttttctcccagaaaggtgggaaaatagaacacaaaggaaggatgctataataaacatcctggattcatctattcaactttatttgtaattaacactggtgtcacttaaaatttcactagtaggttaactatttctatcccactgtatcttttcccaagagagaccaggtttcttgactggaataaagtacttcaaaactctgtaacaattttattactcatattaacaacaggctaatataaatgccaaagggtaaagttgcaagtataacccaatctataagatcatcactagagccaccctgcattaaaaagcgcttcctttaaatttagaaagataataactaacattatttacactggatatttaaaattatattgatttttgtttcccttctgaatgaaagttaatatacagcttatacataaggatttctttgctttcacaacacaactgctgcaattttctttcctgtcttcttatataacagtgctaagaaacatgaaggttaaagagagtattcagtgacttcactgtggaaatatcattattaggtactgaaaaaaaataagaactgtggtttcactgcaaagtttttaatcatcaatatttaagcacacctaattctgatctaacagagccgaaaggaggaacatttttatttgctcgagctttcaaagatatcatggaaaaataaaatgtcaataatcgtatactaactgtggaataaccacataggatatcataactgggcaagtagcgactttcaacattttaaaacttgaactcaaaagaatgcagctatgtgaaaaaatgctgatgatggaaaaaatggtatgtacgttaacagaaagagaaaatgagttttttaaacataaggtgagcaagtgcagaaatagggtgattttaaatgtgggaagcagactgtgagtgattgctaattataaaaagaaagatgaaagaagcacctgcaagaaacaagtgaggcaattatagcaggtggagagatattaatggctaaagagtgaacagtatagggcagatagaattgggcatgaatatggttgtcagtcttgtcatgttccatccacatagaaactacaatagcagaagtaaagaggagggctgtgtacccactttaatgaagaatgtaattcattaaaatgtaaagacatcatgtttttttctcataatcataacattttctgtaggtagacatataagagagaagaaattacatgctcatttgctcctctccaaagtaagaaaagtattttattatatcgttcttaaatctcagtttctctaacataaaaccaactggatccaaacctgcatctggctttggaatttatttctttcaatgtgtggttacctccgagcccgagatattctcagtactatgggtaaacaaaacacaaaacatgtttgagttataagtctattttcttttgtaatcttagtgtaatagaatctcaaaagtaaaagtgtgaattcagcccaaaccagattcactagttaaacaataactgtgaaccactccttctactcctaaatagaatagaaattgttttttatctacaaattcttctctttcaaattcgctagaccatagaaacttaaaagcgtaaacaatatcattctgaaatattaaaacttaataacatgtaaatgaggataataattaaaaagagcaaataaaatctcaatttcaatagttaatacagtgacactcataccaggcattgaattaacttttttctgtgactagtatataaatatctaggggcgtggcccagtaaagttctagatcattaaaattccttaaaatattaaccaattaatcaggtaagtgctcatgaccaattagtatacatagtgtattagtcagggttctctagagggacagaactaataggatacatgtatacgtgaaagggaatttattaaggagaattgacttacatgatcacaaggtgaattctcatgatagaccatctgcaatttgaggagcaaggaagccagtagtggctcagcctgagttccaaaacctcaaaagtagggaagccaacactgcagccttcagtctatagccgaaggcccgaaagccattggtgaaagtccaagagtccaaaactgaaagaacttggagcctgatgttcaagggcaggaagcatccagcatgggagaaagatgaaggcctaaacactcagcaattcagctcattccaccttccacctgcttttcctagccagtctggcagccaatttgatggtgccctcccagattgagtgggtctgcttctggcagtccactgactcaaatgttaatctcctttagcaacacccatacagacacacccaggaacaatactctgcattattcaatccaatcaagttgacacttaaccatcacacatagtaatctgttatttaatatcgttatttccaaacaagaagactatactttataatccaaaaataaagaag

SEQ ID NO: 2450 - DNA, 4064 bp, Homo sapiens
gtacatttccctcctcttcccctttctctccctagaatatgagaagggcctagaatgaaggactcagaggtttgaatgttcctattcgcttagcctggttgcgtgcttacctgtaaacctttgtgccgccccttttatgacagggacagctctgtatccctgccacattgcttttttactgtgcaatctaggcagtggcattgtattatatttcatgcgtatattatcttgtgtcacctatgtaattgactttttaatcttttcatgaccatttcctggatgtttcaggtatctgtctggagaaaagaaaaacatattacttgacatgtcattaaagtttgttaaattccatggtgtgaataagctcaacccgcgctcttcatgaagtctcaatttctatctggtattttcatggtgttttgatataattaggaaccctgaatatagacgtctcattttaaaagagttctgaaaatgttctgtttcaaaaatgaactgaagttaggagaagcctccatatgtttatcctaagtatggtaaactatttaagaaacagttattatttcttactggattgtttgttaattcataaagttaggtcataaagttgttaattctgtattggattgtttgttaattcataaagtaaaaccatacagtgggaatttggaaaaattacctcttattttcttcacaaaataccaattattttgttttatgtaggctccttgaagttcgtggaaggctgtatgagcttctaactcattgtattcctcctgagataataatgaaggtaacccaatttcagatcttgaactttttacagctataaaatttggacgctgggtgtgtgatcatagggctttttgcagtatcaagatatcacctctttctctccagcgcattaattgcacgtatttactgaacctctatggtgtgccaggcactattagaggaatgctgaagaaaagaagggagggcctgcctaaagtgaagttatattctagtggtgtgaaaaggagaacaaataaagaagagaatttcagagtgttgtaagtgctgtaaaggaaataccaaggtgcagggatgataatggagggtggggctacaaagaaaaaagtgaagttccacccatccgttttcacaaaggtaaccacttttaacagacctcttttctattcacatagaaacaagtacgtgtatatatgtggtttcacaaaacttctcagttttccacactttagtatggatgttgtgtcatgaccatatgtatagatttacttcgttctgttaatggatgaatggttttctgttgtgtgactgtatcatagcttttccgaatatgacctccattggtggaactttaggttgtctacaaattattattgttattataaatagtgctgcagaaagcatccttacacttatatccttgcactttgtgcagttaaatatttggaatttagaatgtggttgatacccaccacatttttatgtcatggaaaaagtacccaaagtttttgcttttggatgaaggtcgttgattcacataaaaaattaaagatctcacacatataaagagagtatgtttaactttagtctttttgtgaatgggagaaataaggcatgcttagctgtttttattaatgatttttaaattactgattatttttgtttagggccttctctcagaactgttacataattgtgatggacaactgaaaggggaggtggcacaaatggcagcttactatgagcatcgtctacagctgggtagcaaagccatttatcacttggaagcgtttgtggccaaattcatggcactttataagaagttcatggaggatggattggaaggcatgatgttctgacttctgtcagttattcttgcaaagatttctcagtatcagtatttacatacagcttatattaaaagagctgtgggtaaattaactgaacttaatcatgtcgtatttgcgtttttttggtaataacttctctgtgaactattaatcatcctctgagttaaataattgctcctatactattgaagtatgtagttttgtacataacttagagactttagagtctaagaaaatgatcttaatttactttaagcattggttattcaagtattcattgttgatcctcctattctcttccgtctaatctctcacctgctaaaggagatttacacattagaaagcaaagattattttcatttatccagatgaccattttctgccacaggtaacatgattgtttgacacaccattatatttaattctagtttctctcaatgaataattgtatttttgtaggaaatgtaagatttcattctgaaacataattattggtatggacaaaattgcagataccatttctgttgaggctgcagatttccaacttttatttcagtggttcagattagtattaggtcggtactaagaaataagcatgttttcactaatttaagtacttgagactcttgaagaaaattcagaatgaagttctggagaaaggtatgttactgtagtaattactctttgaacaggttttgtgttttgtcattagctctgccctttttaattaaatattttggttcatggaccaaagggtttacttgacaaatttgtgtgacagactccgaacaattcctttactacgaagtataatttataaaataaaatatacccattttaagggtacagtttgatttttgaccagtgaaactatgatcccaatcaaggtatagatgccgtcaccccaaaaagttccctccatatccctttgcagtcagttcatccctaccctggcccagatgatcactgatcttgtcattatagatgagttttgccagttcaagaatttaatggaatcagatattgtaagcattcttgtgtaatacttcattctctctcattattgagattcatccatattgttgaatgtttcactagttaatgtttattgttcaatatttttgtatatacttttaaagcctattcacttgctgatggatctttggtttgtttccaggtttggttattatgaataaagttgctgtgaatacttacgtatgagaaactggatccagctgatcatgggtgccactctaataaattcacagctaccaaccaagaaatgggctgtcaacactgcccaacggacatatgtttctatgatcaagtctccacaatgcctttttcaaaacttaatttggagcaaataattttaccttcttgttagctaccgaaaccaaatccatatgcagcctatgttaccatatcctcatttgtatgcatcctgttgactatatctacatttatatgcaacctatattctcctaatacggtagagaagctgcccatcttccttgttaagcttcccatcttgttgggtttgttctatgttgattgtctttttcttttgatgattaatcatgtttttctacttctttgttgagtaattgtgaatagtatctagtggttatgaatgatctgggctttagagattacagaagaaagtatttgcagaattagggttcaagctctcttgttctctcttttaaaggattgcctctatcattttgtagcagcagtggctgccccctagtcttctggttctttaatccaataagacagtaaagttttcataagagttttagctgcccatgttagtgatgactgtggcctgccttcaggctaaatgccttaaaaatgaaaaactctagtgctctgcccaccttccaattgttgattaccttccagtttctgctgttcttctctctccagcagttgttttttctactaccgttttatcatttgttttctggttgttttgtggccttccttccctccttcttgcttgcctgcttacgtgattttctcagtggtgtgtttcaatatcttgctttttcttgtttgtgtatctgttgtaggattttttatttgaggttgctatcaggtttgcaaataatataactcattattttaaactgatgacaatttaacactaatttcaaaaactaacagagaaaactaataaaaattctacaatttaac

SEQ ID NO: 2451 - DNA, 4936 bp, Homo sapiens
ctgagatccaaaatcccctctgtgagttgtgttttcccagtgacctactgtgttagttaaggtaatgctagctgctataacagacacaccctgaactcccagggccttagcacaatgaaaatttatttcttgcatacttcacagtcccaagaggatgttcctggtcagtcagccttccagatggtcattcagggatccaggctccttccatcatgaggctctgccttcttatctgttgagagagtttatgaagaaaccagccaacatcctggaaatcctcaggccacctcaaatactgctgtttctgtacaaagcctctgatggattgatgtttcatcaactggtactgggacaaggacccaaccaccaccatgatgagagcactgttaaggtcagataagcacctgccctgggcataactgaaggcttcaaggcaccagccatctctaaggaagtgtctgctcacaagacaaacgatctttctactgttccagatggcatcctggatattggcaatgcggttttctcctgggacaaagtctctttcttcaaagcacaggttgaatctgttttggtcactgtattgagtgtccaggtgtttgagcaaagcattctgcacccatgtgaagtctttgctgctgaagcacaaataggcatcatatttgtacatatcaggttctgtgccctggggatggtccttgaacaccagtctctgggctgtcttataacagataaaacagaagccccggaactttgtgactgtgaggatggtcatgaggaacagagtcagagtgacagtgcatacaatgaaaagggagaactttagggactttaagacttcctcttcatcacaaccttccgtggaaagagagaagagggaaaccccagagaacgagtcagggtacacacaatatatgtctgcaggaggcccagctatagtgacattggtgtgattaagccaattgataaaagtgctaagttcacattcacaaatgaacttgttatgagttatatccaagacactaagtgatacaaatacatcaggattaggagctaggagctggttcctggatatgtccaggatctctaaattagcaggtaaatcattgtgagaaagaactgtcagcctgttggagttgaggcttagtccccttaatgcagtcagatggctaaatactcctggtggaagggaattaagatagttatgattcaaatacagaacttgaagatgagaaagtccctcaaaaacatcccaacagagctcagtttcccaggcaagttgcaacatattttctccaaggaaaagctgttctaagctgggattctctgaaggggtttgatctccactacaggaggagaagcgattttgatttaaaatgagaatctggagatgaggtacccgtaggagaaagtagagaatatctagattttctagcctgttttctgataagtggatgaggttcgctgtaaggttgatctttggcaaagtcactagtttattgccactcaagaagatatcgggtatgcttggaataaaatgaatggttgtaagagcattgtctcggagatccaaggtctgtaatttttccaggaatttgaatgtttggtcttgaattattgcaatgtgattcttttgcaaatcaatgtaggctaccttaggtagtccatagaaattcgaactgtaaagttcccccagaaggttatatgacaaattgagaacttggaggttgtcaagtccgtaaaatgcttcatctgcaatcttatttatcttgttgtaggcaaggttcagaaccttcaaatccttgagtgtctcaaagactcgtgagttcagggagaagacaaacccatgtgaaagatccaggtgtctcactgaacttctggccaggccagcaaatgtgttctggtcaggatctttgatgttatggaagccaaacccggcacccatgatgtggtgggcaagaatcaaagagaaggcctggcttttgctgatggcattgctaaagtttcctgtgatgtccactgtccagccatttccagaaacatctagtatctccagcaccatgtttctgaatgggttcatacattttccccagtccactgagactctgctatacaagctattagctgcgaggctaaaaaaggagagcgttttcccttgtaggggctcgagctcatgttcacatacaaggaatatttggttggaggaaaaatctatggactttaaggaattcaacttcccaaatgaaggatgaaggtaaaggctacgaatctgatttttggatagatccaagcgagttaaagcctttaaatttctgaaataaccatctttcaatacagcatcagagagaccacagaaatacagtctaagttcaaacagatggaacagtccctgaaaagcatctggatgcaagaagtatatcttactacttcccaggtccaagattctaaggttgggcaggtttctgaaggcctccttgtcaatagtcaagggggtatactggctcccgagctccagcagctgcagctgttccagaaaggggaaggatgaagcagtgactgtcctgatatagttgaagctcagcaggagcctctcagtggtgttgaggacctgggggacctgggtgaggttgcagaaacgataaaaggctattcggccatcaaaggagcaggaaggaattccaaacacaggaccggccatgagcaccactcctaggagaaggtccaggtggtctcccatgatcctatggagaagaagggagaatgaaaacacaggcatttaagctcgaggtattgcactggggtcttcagatcttgggggtattctctatgatgtgcctgctccctttgaccccttcattcctctgactccacagacgtggctgttggcagatacagacaaaactattcttactctatttctgttttttttgagacagggtcttgctctgttgcccaggctggagtgcagtggcatgatcacagctcactgccacctccgcctcccgggttcaagccatccttccatctcagcctcctgattagctggaactacaggcacgtgccactgtacccggctaatttttgtatttttagtagaaatggggtttcaccatgttgcccaggctggtctccaacttgtgggctcaagtgacctgcctgcctcaacctcccaaagtgttgggattacagatgtgagtcaccacacctggcctattcttgctctctatcaaacacttacgttgaattttctgtatactaggcactattctaggtacttaaaaaacatttcacttaatcttttcttttaaaaaaattttatttattattctaaattaaaataaaaatatagagatgggggtctcgctttgttgcccatgctggtcttcaactcctgagctcaagcgatcctcctaccttggcctcccaacatgctgggattacaggcatgagccactgcaccctgccttcacttaatccttataataactctatgtttcttcattcattcgtttgtttattcattcatgatttgctgaggggaggtggagaaaacagcaggaagagacacaatgttgcttcacttcagccgggtaccccgttcctagcccacagaaagctcggctgatgagtggaaaataaattcactgtttttctcccttaatttgtctaggctactggcccatctccatttatccgaccttactccacacacagtccatcccatcatgcagaaattgggcactttctggcaccccacaaagagccagatgtgatcggtttaataaaagtgtgataagtgcctagtgctcgcctggcagctgtgtgattgtgtgagtgtacgacaataaacagagactggcccacttgcttaagtcctgtcggggagctaaccatctgtctgggttgagtgtttttttcatgggtgcagcagaaatggtgctcaatgaacgtgtctggcttatgttccaagtattgtgctgggtgctatgaagagaaaacacacaaggaccccacctgcagagagcttggtgtctattatttgcacagcacctccatctttggtgcctactatgcattccatttgctttaaatgtaatgaaaggcctctgttggaaggtaaaggaagagttatatagctcagagggcaggagaatgagaggaaaaataaatgaaagaaataggaagaaggcaatggtttataaagagcatgaatcccatgagacaccatcactggcaaaagtgtcaacaccaggagagattaagcctggagcagtcacggtgctggaggtgggctagctctgacgaggttgtgctttgtgctggggctgatgtatggtggggtttccacagaaactgggaggctgtggcacacaagctacagcaaatcagaagtaggcatggatgcctggattgactcaaagtttcaaactcaggcatctaataatcgttaggaaaaacttggtgagaatgtttatcaccactctgaatttctcccccatctcagtaaatggcttcaccatatccatccagagtctcagggtgacaacacagcagagtcttttaaacatcattcttttaaacatccccccaatatccaatccctcagcaagtcctgttggtgccacctcccaagcctatccactgccctactgtaagccgccgccatctctttgcatgggccagactggagactcctcactggctctcttatttctggtcttgctttcattttccagccagcagccagcatgttctttcaaaaacataatctggtttatatcattcctctttgtacagggcccttcccttccttcctgctgtacttggaataaaatcctgtgagtacttacatgattcagctcttggctgtcttgtcaacattatcttgaatagtttttctcctcaataactcattaaaaaaatttgctgagcaccc

SEQ ID NO: 2452 - DNA, 1085 bp, Homo sapiens
caaatgggatcagccctagataccagaaatggcactttctcatttccccttgggacaaaagggagagaggcaataactggtgctgccagagttaaatttgtacgtggagtagcaggaaatcatttgctgaaaatgaaaacagagatgatggtgtagaggtcctgaagagagcaaagaaaatttgaaattgcggctatcagctatggaagagagtgctgaactggaaaacaaaagaagtattgacaattgaaaacctggaatcagattactttggcaagcttgaatctaaattatcagtcataagaaatttgaatgaccaagttctcttcattgaccaaggaaatcggcctctatttgaagatatgactgattctgactgtagagataatgcaccccggaccatatttattataagtatgtataaagatagccagcctagaggtatggctgtaactatctctgtgaagtgtgagaaaatttcaactctctcctgtgagaacaaaattatttcctttaaggaaatgaatcctcctgataacatcaaggatacaaaaagtgacatcatattctttcagagaagtgtcccaggacatgataataagatgcaatttgaatcttcatcatacgaaggatactttctagcttgtgaaaaagagagagacctttttaaactcattttgaaaaaagaggatgaattgggggatagatctataatgttcactgttcaaaacgaagactagctattaaaatttcatgccgggcgcagtggctcacgcctgtaatcccagccctttgggaggctgaggcgggcagatcaccagaggtcaggtgttcaagaccagcctgaccaacatggtgaaacctcatctctactaaaaatacaaaaaattagctgagtgtagtgacgcatgccctcaatcccagctactcaagaggctgaggcaggagaatcacttgcactccggaggtagaggttgtggtgagccgagattgcaccattgcgctctagcctgggcaacaacagcaaaactccatctcaaaaaataaaataaataaataaacaaataaaaaattcataatgtgaa

SEQ ID NO: 2453 - DNA, 21478 bp, Homo sapiens
ctcgctgactcttatgaggttggacaatgctgcagtcatccagggtgggaggatccacttccaaaacgtctcactcacatgactattggcagaaagcctcagttccttgaaaatgtggacttctctgcaggccttctggagtgtcctcctgacagcaactggcctttcccagagagagtgatccaacagagagagcaagtaggatatagctgcgcctttcatgacagcctcagaagccacaaatcaccgtgtctgctatgttttattcatcagaagtgagtcgctgagtccaaccatattcacagggaggcaaagtaagctctacctcttaaaggaaaggagtatccaagaatttgtggatatattttaaaacggccacagtgagttatcaaacttgtttttatctttgccaatatgataggtggaaatggtatctattgtgattttaatgtgcaatttccttattgtgagtttttttacagctttactgaggtataattggtatacaaaaactgcatatatttaatgtgtacaatttgatgagttagaacatatgcaaacatccatgatctcatcaccacaatcaaggtaatagacatccaacaccttacaagataaacaaaattgactaatctttagctagattaagaaaaagagggagacaactcaagttaatgaaatcagaaacaaaagaggagaccttgcgctgtcacagaaattaaaaggagagagtagtatggaaaatgatatcacaacaaattggataacctggaagaagcagataaatttctagatacatacaacctaccaagactgaatcatgaataaatagaaaatctgaacagatcaataatgagtaaggagattgaatcattaatttaaaatttcccaagaaagaaaagctcaggaccagatggcttcattcatgaattctaatttttttttttttagaaaaagaaaaccattcatatttcctttctgtaaactgtctgtccattacctttgttgatttttctgttggggttttgatgtttgtctgaggatatgaattgcaaatattttccctgtttgcctgttaacttcctctgtggtgggattttttttttcatgccaactttctaatgaaattaaattttcaaatgtttctactatttggagcatcttagaaagaactttagggccaggtgcggtggctcacacctgtaatcccagcattttgggaggccgaggtgggcagatcacctgaggtcaggagttcaagcccagcctgaccaacatggcgaaaccccatctctactgaaaatacaatattagccagatgtgatggtgcatgcctgtaatcccagctactggggagacagaggcaggagaatcgcttgatcctgggacgcagaggttgcagtgagccaagattgtgtcattgcactccagcctgggcaacaagagcaaaactccatctcaaaaaaaaaaagaaagaaagaccttcagctctctgagcatatggttaacaatctgctatgtgttcatatatatacacatacgtgtgtgtgtgtgtgtgtgtgtgtgtgtgtgttttggtgggggaacaaggtttgctttgtcacccagactgcagtgcagtggcatgatcatggctcactgcaatcctcccacttcagcctcctgagtagctgagactgaagcaatcctcccacatcagcctcctgagaagctaggactacagttgcataccaccacgctcagctaattttttaatttttgtggagacaggtctcactgtgttgcccagagtggcttcaaactctcgggctcaagtgatcctccttcttggcctcccaaagtcctgggattacaggcatgaactgctgtgcctggtctgttttcttctatatttttgtggtgtatttttttctatattcaaatatttgattcacctaaaatatattttggtataagctgtgaggtaaggaatcaaatcttttttttagttccagaagttgactgcagatccttgaataacattgtttagttaaccatttcttcacaacattgatgagaaaaataaattgctttccagccagagccactctctatgtggagtttgcactttctccccacatctgcatgggctttctccaggtactttagtttctacccacatcccaaagatatgcaccttaggtttattggcgtgtctaaattgtcccagtgtgagcaagagtgagtgcgtgggagtgtgccctgtgatgggatgacatcctacccaaagttggttcacctcttatgccctgagatgccaagatagactctggccaccatgaccctgaactgaaataagccggctggaaaaggaatgaatgaatacaaataattgtaaagtaaaaattcataaagtattcaataatcatgcaaatgcacaacaataaacgatgaggtacaaaagcactcagcaaacctaccacatttatgactgttttggaactgcataggggcaagagaggctcctcacaattatcactttgcaaacatttattccttcatttaacccaccaccactacacctgccattactcactgactcaccacaaattgactagtcatttactgatttttattaatctttctcaaatgtttgtatagctcatacttatttcaatgtttaagattagaactgttggggatatttatttagaagtttggcgatttttttttgtgccagaaatatgccataggaacttagttcttgtttctcctaattagcctatggtaaaattagtttcattatgtgtccagtttccagttacctatagacaagcagtccccaaattttcttggcaccagggaccagtttcatgaaagacaatttttccatgggccagggtggcaggggatggtttaaagatgaaactgttccacctcagattatcaggcattagattctcataaggagtgtgcaacctagatccctcacatgtgcagttcacaatagggttcatgctcctgtgagaatctaatgctgcagctgatctgacaggaggtggagcttaggccataatgctcacctgccactcatctcgggctgtgcggcctggttcctaacaggccacaaactgatagcaggggttggggacccctgctatagacaatgttaagtgaggagttactgtacctagtttcaccaatatcatttgttgaataattgctatgttctcctttgatcagctagtgtcctgttaggaaatgtggaagtactctagatatttccagcagagaataaattaatgcaaacaatttgtgacaaggaattggaagggctaaagaagcaacaggggaaagagatattagtctgtgatcatgacgctgctagtgctcctgggctggaaaccaacagtttattttcactgctgagctgctggctgcagggccattgcttttttggaacatttctgtagacattgagcaggaaccccagaacttacattctaaggatgctgctcaaactaccaccattcttactaatgctggtggagcccaagttacctgctgctgatgttcctcctgcggccagaagaggcaccagaagcagaaaaatggctccttctcacctcttgttcctcaatcccaaccagtgagtggccctcagttgcagaaccttaccataggcagctgacaagaaaatccagaaatgtggcgctctggcttccagccagcatatttgtggcagaggggagcatggaaggttgggaatgggggtaaatgccaacatataatcggctcaccctctgctttgaaaaatcacaaaataaattcctcaatgcttgaggatctattcctaatttttttccactagtttatttatctacttaacattcagtgtcacgttgttttgaatattatgtttttatatctagtagaaacagttccctcattttttttcataacttacctagctttcctggattgtttattttttccatataaattttaggaggccaaagccttatctgttaagaaatcagggccatataagttttagaattagcttgtctagttctaaaagaactgcagttgcattttattggcagtatgttatacatttagtttaccttaaggagaattaatatctttataatgatataattttctatcagtttagtatattatttgttcaagtgtccttttgtgaccctcattaatatttaaagttttcatcctataaatcttgtacatttcttaagtttatccttaagtatttcacgtattttgtatttgcccttgggggcctcttgttcttattgattataatttgcatatatgaaggctattgatttccatatactacctttatttagttaccttgccacattccctgattataacaacatttcaatttattgtctcttggattttttgaggcaaataaatctgctaataattataactttatgtgctatatcccaacttttgaaccatccatttctttctcttctctaattgtgctgaaaaactccactaggccatgataaattacactagtgacgctgtgttctttccttgttcctgattttaataggaatgcttctactcttttcctgataggcatgatactgggttttgcataacacagtaatatctgttaaattctattctattaaaactttttttaaaaatcaagaacagatgttgaattttctcaaaaaattgatggaaatctttctataatatttgaatccattaatgtgaaatatattaataaacatacaaatattgaaacacccttacattcatggaataaattcctttggtcgtgtaatattaatcttttaatatgctatctgtttgcacacattttattgagggttgtggcaatgatcgtcatgactgagaatagtccgtaggtttatgtgtgtgctctttgtcctcatccatttaaagttgatttttgctagcttcactcttagtgaccttgctaccaattttctcagggcttcttacagtggcctcctatatgctgattttaatgaaattgatcttctaaacataaacctgcaatatctttggggtggaagaaaaaaagatacgaaaagaataaacataaacctggacttgatgtttatttcttataattccctcatggttttatttaattgcagcaatccaccaacatctttttgattcctgacttccctttgtagattctatactgtgacttgaagaacagttggcaaatgggtcaaaagccagtagataggctggcccataatttctcccttaccttgtgagaaaatataaaaagaatgagaatcaggtcatgactctccaccccaggaaagaagaacaatcaagaaacacctgctagtggcatgccaggccagacacacccatcggggtctcctgcagtcaagaaggagggggccgtgcaagctgggaggtgagagaatctccaaggccatggctttggtttccagcagcatctctttcagacctcagatggacagaattcaactcatcacatttcttggttcttgacacgctctcctcgttagtccatcacatattgcacggattcattcatatcgctgcatgtaggctgctttgacctgctgtagaatatctcattgtgtggatgcacatgtggatcactgagtatgtcagagctggcaagatacgtcagaagagaaaggagaaactcttaactaaatagagttggaaataaaataattgtctgtatggaataagatcaaaggtcccacatgttaaagtcaaccccagatgaattaaagtcttacatgtcaaaaaaaattgaaacttttagaagaaaattaaggtggatatattttagaccttaaggtagagaaagatttcttaaagaagacacttacaggattgattacaaacaaaaagactggtacatttgaatgtattatgttaagaacttttccaccaaaagaaagcctcgatttcctcatttttaagatgaggataataatccctaccttatagaattctaataagatgaaatgaagcaacatatacaaaatacttagcacagatcctaacacctacaaaataataaatggtaacgattattattcttctcaaacaacaatcctattatttatcaaataatactgagtaatatgacaagacatatttaaaccacacaagccatatgcagacaagtgtttaatatcatagtgatagtttcaagagagagataataatttattctacatttatcagaggtctatagcccagtagtcaataaatacttatctatagtcaataagtactatcaagcatccatgccaggaaccatgctaggggctgattaatttacatcaatcaccatgacttttttcccacaaactaacacacacacaatcttcatagatttttctgtgatcacagcaaggaaaagacctacgcatgtttggatcatctgtgtacagtcctacagaagaactttgacactatcagagacagaaatctcagaatagtccaactctcacttatttgtgctaatgaaagagtaaagtaaaagagacaattaaaatgggaaatgtgttttgttttgttttggtgttttgttttacaagtatgcaaaaacctcaaatcaacctgacccaacaataaggaagcaagtcagaaaaaggcagtcttccagagctgtttgttcagcagctcagtaatgccatgaaggtttgcttcctttctctgctttgtgtttctggagagagtccgcatacatttcaatatggctgacagcagttctggaatgtataaagccttgcataaagaaaatgacagttcactatgaaaatctgattcggatgatgttgaaaatagatttagtgtctgctctgcctctctgttttctaggacttcaccacctcacagactttgtacactcatggttcacaacttcctcactgtgttttctttaacgagtagaagataaataagctttaagaaatagtaaattatatcaaaatagactttatcatataatttgcctaattatgtaccttcagtaagtgtttattgaactctggggtgtcaacaattttttattcagctctcataagtaatatttgcttagaaatctacccataaataggataacaactttcataaaacaagaatttatacctagctaacatgaaaaagctaaacatcccttgaagtacaattctcctgaaaatcatcccaatatggtttattgaggctgatggatttggacaccagctcttaagaaaaaagataaagaggaaagctactgcctgccacaacatattctttttcccaagagctggtaagtttcttccatatgtggaatccaataacgttcggaacattcttttctctttctggtaatgtgatatacccaacgtgggcctatgatacaaggaaggagagtagatcaggagtcaaaaaccacaggtcctagttctggttctatcatttctttgctgtgaaagtctggaccagtgacttcatagctctgagtttctgttgtgtcattcttcaagtcaggtcatcatttgccttccctacttcacaggtagtatacagtaatcttttcaaaagccctttagaggacataacacaaccttatgtttattttctgctagagcatgactcccttgagggcttggagcatgtcttaatcaaatttgtatattccaccattcctaccccagacctattattaggtgctcaataaatgttgattttaaatgacagctgtcatgaaataaatgaaaacagaagccaacagtgacggtttgagctgcctgctggctggcatgtgacacttaacatctaaagagtgatagtggcagctaaagtgcggaaggaatccactttatgaaactatctgagcagtgaagcactggaaatcacagagtctccttttggctattttacatttagatatgaaagcttgtcaggctgggctgagaatagacaatgagaaactaacacatttcaacaggttttgaatagtttcccagtgaagaattttcctggcctctctccaccctggtttttatccctcttcttgggagttatttttcgcaaatgtaccccatgattggcaaatttcagaagaataactggggttggctcagttcagctcctccccgtccttctcctgagtctgcttccaaaggcaatctgcaagggaggaataaagcaactcagggaagggaaaaagagatgtgaagaaggaaagaaattggaagacccaaaacaacatgatggttagtagagctaatgaaaatgaggaagctccaataatatctggttttttttctctgactttgtgaaaaccatttgttattatgatacgacaatgtaatcaatggtactcagtaaagtcagtaccccaaaattcggccaggtgtcatggctttttgtgtatggttgtcctgggaattaaaggagaaggaaggggctgtgcccctgtaggggagatgatgtgcagaaacggacggtatacacaggaggaaagacaatgagaaaagataaagaaagaattcactaaaagcagggacttggagctagagaagcaacaaaagacatccataattcttggagatattaggggaatactaggcttcccaagaaaaagattcaagccattctattgcactgtcagctggaaggtggtcccaaaaggctggggaaattggaggcactcaggaagctgctgtcttggttacaggcattcatgtatggatgaggctggagaaggtaaaagacagaggaagagagtagggaggcaggtacagaaaagagactcattattacctttctctattgcaggcttcagaaggtgaacccagagagcaggctgtttctgtccatgggaaagcaggatggtacagcccatatctgattcagaaaccaacagtcaaaccattctcccctgagactaaagcagagaatgaagccatttcccagaaatttgggtatttaaaaaatcaccctggcctgggttacagggtaattgtcccatatctatgtttcacctgcagattcatgggacagaattatttcccaaatctagctccatgctcctgccctgacttaagtcagggaatacttggtatgtagtagcatttattatttcacgttcaaaatatctcaaagccttgaaaactgtaacgtattaaacggaaatttggtaggcattgcttcgcacaatcccatgatgccagcttgctagcatggatatgcccagggcaccctaccagatgctggacacaaaagctcaacatggtagttcttccctgcaagggttcacagcccagtggaggagatcgtcaggtgagtaaatcatcctactgtacagccacgatgtgcagaggactcagaggagggagtgaaactgccactcccaggcccatgtctcagaccaacccttcccctccagccagttgtgtagactgcacctcttctctccctcctcagtgaatacaggctaaggaacgcaggcttctcttacccaggttccctgaactgctttttttagcccatctcatcttcttctggttttgttcaattttctgccagcttttttatccggctcacttatctccctttatccctcagaaccatctccagtaattccattgactggcaggacatttttccatcagagagtagagctgagctgctgcagtgccacggccacctcccagcaacaacccctccgaccccagcagacccactacctggctctttcggtcagtggggacttttcagatggtatctcttttattttagctttttaatttctggctgccaggctttcttttcttaactacgtttggagcagcattttgcacatcacagaagccatgccagttttaaggtgagttaggattctgcaggggaatcccattattttgattccctcatcaaagcagggctaagtttaaccccttgcaaatatgaaaatgaaaaggacagaggagtgtattgtcatggaaaaggcaccaaattagtcaccagggaactggacacaggtcccggccccacaactgactctgccatgggattttaggcaagacacctcacctttctgactccaaaatagtatgcctgttagtcttcctcatgatgaagttggaagaatcaaatatattgactgctataaacatacctcataaactgtaaagcactgttcagtcaacttaaagacccatgccaaacctagggacactgggcagcatgtccttctgaataagcacataagctccatgagagcaaggattgggtcacctcttgctcgctatttactcccagtgcttagcacctggaaggaaggaagggagggagggacagggggagaaaattatgcacccaaggggtctgaaatgttaggtccttccacatgtttgtgaagcccatcacctgctggtaggagtaaaaatatctcaaacacaataaatatctttcccgaattagcatctatgaattgaatcccatttgtgtgagaagtgaaaaggctgaagtttccacttttcaatcaacggtaaaagtcctgacctaatgcaatgtcgcagagactgttcgtttgcacaagccaatataataatagcaatagcttacatttttatagttctttacagtttatcaagcattttcaagtatctgacctcattctgatcttcaaaatctcatataagtaggtagggtaaattaaccctgttttacagatgacgaaactagggctcggaggagcgcagaaacgtacaccaaatcacgaggcctgtaagtggcagagctgggatttgggcaggttctcttggcaccttggcttcttcagctgctaatgaagacagtaatgatgatgctcccattgttaagctgacagctctggagccacccaaaccaatatgatttcctctttattttgctagaattatggttattctgaatccctggagagtagagtaggtcctctcctcataaaataaggacaaaaaattcttttcaggaaaggaaggctacacagttggtcaataatcacatttttaatgacttcattagtcatcaatcaattgaaacagcaacaatgatgcatcatttcctcctatcaaattagaaacaataaaattaatgttgataaggatgtagtaaaaccagtgtatatgttcaatgctggtggccttgtatactgctacaaacttttagaagctacttggccacatgcctcaagagccatgaaattgttcacactctctgaagcagtaatcttacatctgggaatctatcctaaggaaataatgaactagagaaagaaaaaaaaataccttcctagggcctggttgttgatttctcccttggatagcaatgagatatcatggtatctttttcataaatttcctatttgtttaagctcattccagctggttcctgttacctggcaccagaaccatcattacaaaagcccacatacagagagctaatataaatattaatatcttcccttcccttgcttcaaacttgacctcaattgacatttccagcttcacagcctggtatcccatccctccatacccccatcaatctcaaagctccggtcaagtcaaatgtctcacagttgaccagacgggccatgaatcagcatgttctgagctttagttaggatcagaatcacctggaaggctggttaaaacacacacccttgtgcacacacacacacacacacaaaacacacacacacacatacacacacaccacacctttcactggctttgagaaccactggtttaagcaacagtctacctctggcaaaatcatctagtccttcaagtcccagctcctccctgctttttgcagccatctccaatcacaccagactgaactaattacttgtcccctgtgtttctttggggcaagaaaagcacctattacactgtataatgagggttaattgtataatggatgccagctccctgcttatcaggagtatctggagggcaggcccctggcttcattgcctctgtgcccccagagctagcacaatgcttggcacagagtagccatatgtgcatgtacgactgaattattccttgctccctccctctataggaagttatggtttattcctgtttccacaggatccattagcatattgaatagctatttttaaaaaacaatgattagccatgatagcaaaagaagaaacatgaacagagcttattcgtttgccaggctagtaaatatcatcttgctttgctttctaaactccttaatgaaaacagtggctctcaggcaaataaataaaacattaggtagacaacacacagcacatcacaagcacagtccactaatttgcctattgctgaaggacattagccacctttgagataatctccataaacatactgccccatctccctctctcaaacatgaattgtatcaagctaaatttttaatgtttttcaatgtcttatatatatttcatttcaacaacattttttaatagtaagatatccatcttaatcaaatgaaagctgtttttctgtaattgtcctaaaagccaattcattttctggaaaaacatcttcttgaatcacaagtggccgggctaaacagtgttctcagaatattaatgtgaaacttaagctattaacatgtcatggttaacctttctaaaagctaattaaattaaaataataatatgtggaatgcttttacagaaaggtaaggctcttttacaaagcacctgttccaagtctcagagctaacaccttatgaagccatggtgggaaaaaggttttgcaggcagacaaagaaagcctggctttgcacctgctgtgattaacttttagttgttggtattagagttaattattgcagcatgctggagggcagtgacaatttacttgcctgatcatacctaataagatgtatttgcggatgccagcatctcctggacttaatcaacaaactatcaagacaatcaatgctgttaggccccatgtccttgtgatagttttttccaaataaaaaagataaaaatccaaggatgcagtgctaaggatataggcaggctgcttagaaagcctccgttagctagcgtcaggcttatctccctccctgagtggctagatctattatgcaggagggttagtgcaccctaaggcccgattcaattgggagcaaagttcaaggcaaccacaccaggtacaaggaaattaagctctgagaactccagcacttcttggtaactgagctctggaaggcttcaaatgggccctttctactttatcttctatgggaaaaggttgttatacccaaggcgctataccctcttcctgctacacaaggagggagtttctgttcctttatttgataatctatgcttgaatccatggaatacatttttaaaggaaagaaactagctatgacataagacaggttggcaaattccataaaacaacatgctttagtttcaactctgttcctttttaggccccaacaaattagcaaaactcctatgagaggactggggtcatgtgtgggcacacaaaataaggagggtgctaccacctagagggatctcatacaggtaatggagaggtgcaggtgacagcaatcagcagcctgggggcactgaaaatagaactaagactgtctttgactcataagtcatccatcctgaataatgaaagaagaccaacattcagcatgatcacctagatctctaacgtcttttattcatccattcattcactcaacacatgtatttgttgaattcctccttcatgccagggactgtgctgaacatgttcctgatttcactaaatgtgagctgtgcaatcttgagctctagcagtttgcacaaggtctagctggaaaaaactgctttatgacaatgttggggatctttgttgactcccagccttccaaaaatatcaataccccagatatgacaagtatcatttccattcacattccattggtgagaaccagtcatgtggtcacaccaactgccagggagactggaaaatgtagtcttcattctatgttcagctaaaattcaggggttctgttaccatgtgaaagaagggaaaaaccaatattaaatgtctctgcttttgtaatatattttgtaatataagacactacaaaagatgtagtgtcttaatcacactgatgagtcaagaattctgggcatctccatagaccagagagatggaggaatggccaggagccaagagccatgtaggtagatttctcaaatgggatccaagcccacttcagggccagggcttcagagttagagacaggtctctggcccttaaagaactgacaggtgatccatgttggcatcaccattcataaaaacttcacaaaagacagttctctgtcctgttttgaaataagtggaccttttaaagtatcagggaagaaaaacttttcttctatcctcttaggttcagtgatttgggggtctatgaataaaaccaacaaaagacagactggcaaaagaaaagacaatgtttattcatgtatgtacttgggagctcacaaagaaagtggctcaaagaagctgttagaacttggagcttatataccattttaacaaggagaaggggttagggtttcaagggacaacaaatggtgggaaatgactgagaaatatataaagaaaccaacggaaggcaagtgaagtggtaaattttatgcgtcaacttgactgggtcaaacggtacccagataattggttgcatgttatttctgggtgtgtctgtgagggtgtttccagatgagattagcatttgaatcagtggactcagtaaagcagactgcccttcccaacaggagtgggcaccatgcaatccggtgaaggtctggatcaaacaaaaaggcagaggaaaggagaatttactctctctacctggctacttgaactgaatattcatctcctgcccgcagactaggacttacaccatcagctcctctagttctcaggccttcaaatttaggctagagccatcagttctcctggtgttcaggcctttgggctgtatggcagagggacctgacagccacaattgaagcatggcctaagagtgaccctatggtctaagaagaatatgtgttcagagtctcaagctaaggaattcaggagtggccaatgtaaagactcactccttatgtataaaggacatctgaacccctggcctatcccttggaatacaagctgtataaggaattgaggccctttgttttgggttaaatggaggttgctaggtgaaggttgctggttggagggtgctaagtgaaaatgctatataaactgcatgctttttacaaatggtagtggttctcctgtcccgcctaccaccactggaccatccctgtatgtaaatcatgccaataaaccctatgtcttgttctctgtctctaggtctcttccttggcctctcagacatgttgccatttctatcagagccaataagagtctggcatgccgtggcctctgactagaactatactaccagctatcccaggctgtagcttgcagacagcagatcatgggacttctcagcctccacaatcacatcaatcaattccttatagtacaataaggcttattttaataaggtgtgtttatgcatccagtgtcaacttctcatctctggtgacaggagtcaccccttctgcctggtacttccttaaagcaggattcatgatagcagaattcttttggaaggttctgcttttaggcagatgagggagtgcagagaaaggctcttcctgaatctgttgattctcaaatgcctttcactcaaaataatatttatgtcatgtggcatattctgatcccttccttggtcacacccaaattttatggactcaaatactttgaaagaaaaaagaaaggacggaaaaaaggaaagaagaaaggaaaaacagaaggaagaaaggaaggcactggctatgataaaacatttttcaggtgatgtatgaattttagaaaaaaatacatttacatacccaaaactagggcattatttttaaccaaacaatgtaatgtatggaaaagacaagttaaattccacattcaattggtaggatttcatattcagtgtgagccattctctccctgtgctgtgcttgctccaaacatatttccacagacttggataatttaccttgatttttgcttagtattgtaaaacgtccccaaaatttgagaaagcataggaaaaaaacttgtagaagcaagtaaaaccagagaggaaagccatgacacaggaagagaagatattactgcccacaaagcagctgtttgtcaacaatcacattagtggtctgggatcatgaaggaatgttttaagcattttacaccctaatataagttttttagttacatataggcatttttctatgttttcagaaattggctaaggatttggggttgatgcataccattttgtaatttttcccatttcaaataataggaaacagctctggttagcatttttgtgcacaacatctgattttaggaggggatgactaatattaagtgggaggtgtctgtattttaggaactggataggaaattgtattctctttacttgctcaacatccatttaacaagcatttaccgagtactacagtgagccaggcattgtgctgagtgctgagcagacagcagtggaaagtcttcatccttggctaaaaggatctagtctagtaaatgagacagagtgagagttgtgaaagggggcatggcaggcactaatccagctacaggagcccaggagagactgaaactaactttgcaaaatcatggcagtaagagaaatctaacatagttgactccatcctgcttctaacctccaagctctccttggtcattcctgagcatagaccaaccaacttcaggagcaatttagtttatagtttaatcttaaagcaagaatgataatagcccttcccaaaactaaactgcctttgcaaaactaatgaaagtccttcattctgctaagatgtaagcatagttaaatgacaactagctattgttctggaggttacaacatttgtaacgtttcccattactcctgtagataacataactattgtagaacctacgattggctttttgagatgtctttttagagttctgcatttctgactactggctgactccacctggaccagcaacttgtgattcaaccggtcctgtgaccccctccacccagagggggctcagtgcataaggaccattttccacactcctatgatttcatccccaaccaatcaacattccccattccctagccccttgcccaccaaactatccttgaaaactatccttgaaaacctctagcctcagagccttcagggagactgatttaagtaataactctatctcccacctggttggcctcacgtcaattaaactctttctttactgctataccattgtttcgaggaactggttttgtctgtcagcaagccagaagaactcacagggcaattacaagatgaataagagttaccggggtgaaagtaggggaccaagtacactaggcagagggagcagcctgtgcaaaagcccagagacagagagcaaggcagctgaatctggcatcaccaagccccagtggatgagcagtgcagatcctcccacttacaacatccccactgggccccaagaaagaggctgaaatttccagttcctctccatatcctctacccacacactcctgacactcatcgtcttcataggctacttcaggcacaaaactgtgaatgagctctaaaatgtggtttcctcatctataaaatgggataataaagttttatcttatagagttattgtaggtattgaataggttgatatacataaagcgcttttcaccaatgtctagcacattttcagtgttatatattagctattcattgttagctagaggccctgaaaatgtgtcgcagtgaagccagaggtccctgaggtcaggctggggatatcaagtcccaggttttctgcccacccacctcctcttccaaataaggcaaatgcacttttttttttttttttggcccaccattgtgcagtaaaactgcatcctacatagatttaacttaagcaaattcaagaatgcccagctggctggatgagactgggagaaaaataacttcaatactgccagtcctactccattctctgagagcaaatgccccaggtgaacctggaggagagggagaacaggcactcccctccagccacagttttccccacctttccccggtctaagcagcttgacgtatactttgttaaaggattttcaagcctaattgtgactacctgcaattttcaccccacaagccgactttaaaacctaactcttgctaaaaagaagacactccagcacctctgtccgcttagcatcaagtaaattccaatcaaattagaaatcttgaaggctttctgagagctggtctttactttaaacagtttaaatcacccctaagcttagcctgaggagtaggattaaagcctccctgatgtggaaaaaaacaaaagaaggaactgtgatttactgcctaagccaccacccttagcttcccccaccacactctccaggtaaaatctgcttccgttctgcctactaccgtaggctaaaaagagatcaccggtcctgagactctagtcacatggatgcgcagcaggacaggcacagagctccgcagcttgaaacatagatgcttgtagctcacaagcccacaagtccaccagcccgccacatctcttgaagctcaggcaggtacgttcgccccgctggctttaatttcaaaatccagcacaatcactgaaaaactagagcgatttgctctttcagctatgcacaattttcatcagcagtctccagtggctacaatctcaggcaggcttttaccaccttttctcgtcctctctataccaacacatattctggagaaatggtttttctaatggcctgtggaggtctgcctgtgttttgaggctttgtctgggcaccaagtccagcagatacaattctctttcctgagtcaagcatttataaagagctgtgatctcagatttcagcttgcttctgtcttccttcttactcctgaaatctgatcatcccttttgtctttctaccacaattatatattgaaagaaaaacatgaagatgcaagagtatgcagggacatgtgtaagtgattctctgcaagtgttaaacacagggtgtaattacagctggaaggcagtgccttgtgggagaaaagacaaaaaaagaggtggggggggatattctttataaaatgttcttgtctttatttttaagcttgatgctcacatctcactttctaacacacacggacaaagaatatactcatgtacaagcaaaaatactcatatatgcacatgtgcacaaacacacacagacaatgtagtattttagagacccttggtcttttattcttttcagcaaatgaacaattagcctcaatagtcaaataaacatcagaagatgagggtttttcccccttcctctgctgttacaaaatatagcaacaaagtggggcaaagtagcatgaaacctgaagcagctcacacagaaggactcaagagaataggatcttccaaatggaagtttcagttagcttcagtgttctcagaattgcatctcctaaattttgattccaaaagggaaattccctatggcccagcaggcccatacaatcaattttccacattatttgtgtaaatatctgtcctgttgcatattctggaagaagtgacagtttcaaaatgagacttgccaacacacccccttgtcccaaacaataagaatcagcagaacatccctatcagccctctcaatttattcttcatcagaagccagtggaaaaggaattcagcaaagtgagatccccaactgcacaaagcactaacctaatcacacccaaaggaaaatgagagaagagtttgacctagagagtcttaaattagtgggcacactcagagactcaggggaattttagctaggcaagccaccaataatttagagagaggtggctctaatgaagggtccaggctgcagggcatggtagacaatctttcaaggcaaaggctctgggccacgtgacctgtccatggcacagtgggtgtgtcaagcacagtgaagtgtacagaaggtgtctgacttatgctgctttgatgtacaatttttcagctttacaatggtggaaaagcagtatgtgttcagtagaaactgtactttgagtacctataaaaccattctgcttttcactttcaggagatattcaataaactacatgagatattcaacactttattataaaattagctttgtgttagatgattttgcccaactgtaggctaatgtaagtgttcccagcatgtataaagtaggcaaggctaagttatgatatttggtaggttaggtgtattgattgcacttcgacttacaatattttcaactcatgatgggtttatcagatgtaaccccttcataagctgatatggtttggctgtgtacacccaaatctcatcttgaattcccacgtgttgtgggagggacccagtgggagatggttgaatcatgggagcagtttcccccatactgttctcatggtagtgaatgagtctcacgagagctgatggtttgataaggggaaatctgttttgtttggctctcattctctctctttgcctgctgccatccatgtaagatgtgacttgttcctccttgccttctgccatgattgtgaggcttcctcagccatatggaactgtaagtccaattaaatgtctttcttttgtaaattgcccagttttgggtatgtctttatcagcagcgtgaaaaaggactaacacatataagccaagaaacacctgtacatgtgtttcttgctttagaaagcaggaaggcaattaggctttattttacatgaatctacaatgttggtgaaacctgctcttccaacatcctgcgggctcctggaatggactctgattaggcataaaatgaggcatagccacacacaatgactttatctggaatactgctcacctccatgtccctcctaccctgcaagaatgggaagtagactcattagcatcatttaaaaatggtctcctggctgggtgcagtgtctcatgcctgtaaccccagcactttgggaggccgaggcaggtggatcacgagatcaggagatcgagaccatcctggctaacacagtgaaaccctgtctctactaaaaatacaagaaattagccaggcatggtggcgggcacctgtggtcccagctactcaggaggctgaggcaggagaatggcgtgaacccgggaggcggagattgcagtgagccgagattgcgccactgcattccagcctgggcgacagaacgagactccgtctcaaaagtaaaaataaaaataaaaatggtc

SEQ ID NO: 2454 - DNA, 2321 bp, Homo sapiens
catgtgtaagagagtgttggaatgggaaggaaaagtgtggagtccgtgtggatttctcttattttatctgtggcttgaatgtacatttctgagagagggagtcagatggtgaaagggagagatgttcttgctgagtttgtttatgttgtgcttcagaggatgtaagacaagcagcaaatcagcagagacaagttaatgttcaccaccacaaaagtgaaattaaataaactgattgggcagtcccttgaagatggagtctcattctgtcactcaagctggagtgcagtggcgtgatctcagctcattgcaacctctgtctcccgggttcaagcaattctcctgtctcagcttcctgagtagctgggactacagctggcactgcctcccaagcccgccgccatggccgcctacaaactggtgctgatccagcatggagagtgcatggaacctggagatccacttcagcagctggtacgactccgacctgagcccggcaggccaccaggaggtgaagcgcaggcgggcaggcgctgctagatgttggctatgagtttgacatctgcttcacctcagtgcagaagagagcgacccggaccctctggacagtgctagatgccattgatcagatgtggcccacctgtaatgaggacttggcgcctcaatgagcggcactatgggggtctgaccgatctcggtaaagcagaaactgctgcaaagcatggtgaggcccaggtgaagatctggaggtgctcctatgatgtcccaccaccctgctggagcctgaccatcctttctacagcaacatcagtaaggatcgtaggtatgcagacctcacagatgatcagctatcctcctgtgagagtctgaaggacactattgccagcgctctgcccttttggaataaagaaatagttccccagatcaaggaagggaaatgggtactgattgcagcccatggcaacagcctccggggcattgtcaagcatctggaaggtctctctgaagaggctatcatggagctgaacctgctgactggtattcccattgtctgtaaattggacaagagctcgaagcccatcaggtgcatggagttcctgggggatgaagggaccctgtgtaaagccatggaagctgtggctgcccagggcaaggccaagaagtgaaggccggcgggcggactactgtccccaggagcaccctccttgcctggtgtgtccctctgctcatccctcctgcacacgccacactgaccacatctgtaggcatcttgagctgtagctgcagatgaggaccagtggctcccattttcgttttagccatttttgtctcctgcacccactcccttcattcattctagtcagaatagcacttctagggcatgggttctcagtccaagctgtggaaaagctccccttgtccaagagagtttaaaggtagtgacttgggtttttgcgaccgctttgtttactaagaacttgtgggggaggaaccatgctaagccatgaccaatgaggagaagcaagagagcctgtctgtccccaagagccagtcctctgctcttctgtagtcaggccactgcctgggagctctagtcattccagtggaagatgaatgtaactcgcatggtgatgtgacagctgtttcctccctgaccccagaggagatggctctagaaggttgggatcaatcctgaatttagcttaggtgttacatttacttttataaaaaaaaaaaagtatagtatatataaataatacaaaaccataatccttctcggatctcttgtggcagttgaaatagtcccacatgtggtcatcagaaagtaagccattcctcatactaatatgggataagctccttgacctcagaggagtaggagtgcttcctgctgtgtgttttagaatccctctgctgccttgtttcatggcagtaaaatgcctcttggtcctgtccaagtgtgtctttcactgactgatttctgaatcatgttctagttgctcggccacatgggtccagtgctcatttgagcatcactgtactaaatcctttctccaggaatgagtataataaaggagttatgtgcaattaaaaaaattggcctggtgtggtagtatgtgcctgtagtcccagctacccgtggaggggagcattggtggcactgaggtgggaggattgcttgagcccaggaggtcaaggctgcagtaagccatgatggcaccactgcactccagcctggacaacaaagtgagactctgccaaaaaaaaaagaaaagaaattgtagtaacctaagtgaatagcctatggcctttgataattccac

SEQ ID NO: 2455 - DNA, 784 bp, Homo sapiens
atattgactgagcttcgagaaaaaaggatggctataagagtggggatttcacatcaacctgaaaagggcggaggcagccgagattacaggcgactgaaatacaaaggaaacccactggagcctgaagaatgtctaataactatcaaatctttgttctgccagtccacataaaacgaataggacgagcactggatctaagtgacagagaaagtgcagaaagggttccaactgtaacggtgttaggtgtctcctctcacaaaggccatgaggagctactgtgtcaaaccagaactagaagcatgaagtaagaaaagtccgtcacgagagaccagctctccattcacgcgtgcgcgcaggtcaactgatcttcagtagtattatttttctaatatcgccttttgatcgtcttgacagggtttaggtagttataagccacaaaaatccctagagctacttgaaagaagtgagcaaaggagaaattgctgaatggcaccctgatttccatcagaaggaaagcagtcaggggcaggtataagtgcaagactcccaagcctgtggagtacaccccacacagaatctccacctgatccaccagctccactgaagccatctgcttataccctgctccccagtagaaaaaatactgcctaagggcaagactgtaacttcctcccttcttggagcatcaccctctagaatacctcatacgtagaagaccccagggcttactctctttgtaaggttagtagtcaaaagtgagatcattatccaaactgtttctaat

SEQ ID NO: 2456 - DNA, 4966 bp, Homo sapiens
ggaagttggagcacagagaaagtgacttgctgaaggacacgctacaaagtgagatcgctaaattctacgcaatccaagtccccttgggtaactgaaggccctgactggctcctctccactaggcaccaacactgctcttctcaggctatttacatgctttatcttgaggcttgagttttgaccattggaagcactattggccatgagaatagaagacgagaggtttacacagttactcaaggaagctggcaacttcaacagctccttattcatttccatggcttccagctgattttcctgtgttcggctctgggaaacaaggaaccctctctgcttggtggacatcaccctgcacaccacccctgccgcccaccactcgcgtcctctccagttcctgcctcccctctctgcctgctgcagatttggctgcttctttatcctatgaccagttttcatcggctctgaggattagcagggaccagagcccaagccccgggagtgctcagaaatcagtgtttactgcagagaacacagaagccagcaagcagcagggaagggaggcgaaccaatgcagcagcccaccgggaccgaggaggacacacgcagagcaagtcacaggaagcgcagctgaaaacaaatggacgcttatcccaaatgcacaggacacttaccaagaactgatggtccgtcaaagtaaagctcaacagctttggctggcaggacagtcaaacttttggacgacagaaagtaacagtgggaaatgggacaacatctgccagcaacgcgagaggccaagaccatggctgctacaggaggggtcagcgtcacagtacacgcatggcggcggttgcacatgcatgcctggggaatgtgagtgttcagacatgccaggagtccagcctcaccaggaaacaggcacacggggacagaggcgcaaacactgaaaactctcgctgaatccactcggctgagcggtggtcacgagagcacggccctgcgctccccacaaaactgcacctgggccccagggcgagacaggcgtggaaggtgcaggggtgtgtgtgggggcaggggctcctggctcagagccgtatccaggaaccccccttcaggctggagccctgccctgagccccctgtggagagactgtggagagccccctgtggagagggtgactgtgggagagcagcatcaggcctagtctcggctgtgaagtaccccccacctccacgcaggatcccggggattctgtcaaggtgggggccgcctgctcagcccaggctccctgaacgtgtggctagctgagtttgcggaagaaaccaggagagtgccaacaccaggcttgcaagcaagaggctccctgactgcctgatcctggagcgcaccccatcctccctgtgttccctgggcctcagctgttccccagtgaccttggagacaccctgccccaccctggctccacaggagccctgcccatcaccgcctcagctctgagtctcccctggggacacaaccttcctcctggtgcagaggcgcaggatgctgcccctaaggcccatcttcctctgcagcatgttttgatgtcagctcattcacaggaaagaaacaatcacatctcagtgcccagaatggggaccaataggagaggtcactgggaataaagcccacacgcaccccagggtccatgggctccccagaaatgcaggtggcctccgccagagccaacaagcctaagttgctgatcagcccctccctgcttccctgtgtggaagaggaaacagaggcccagactagtagggctctgccgtggtggccggctgcgtccccagacctctggtcccagggctggctgggagtgcccctccctgtgctcacttcctgctctcctgggaaatggctcagggatggggcgtgtggggacagatgctggcatagctcacaaaatgcttgcacaagggacactccatggcaggtccctgcaggagagcaaagtcacaacattcagagattccctgcactctgaggcccgcagagcctggccgaccaagcgaggctgggaggatgttgcctgctggtcagggcagccctctgatcagggcggccgagtgaggctgggaggatggtgcccgctggtcagggcagctgagcgtggctgggaggatggtgcctgctggtcagggcagccctctggtcagggtggccaagcgaggcagggagggaggtacccaccggtcagggcagccgaacaaagctggaaagatggtgcctgctggtcagggcggctgaatgaggctgggaggatggtgtctgctggtcagggcagctcaggaggtgctgcccaggaggtgctgtccaggcagagcctagggctggtgtgggtgtgccatgctcctgagaagtttctgggttgtggctttaatgttctcctgcagtgagaacgctgacacttggccaaagggtcctcacctctcccctagtacacttctgagatgccaggaaggttctgaacatcagattgattcctgggactcccctccagggtggccttactggagtcaggagcccctgccccactaggatggctctgcagtggcctgaggacagtgagcactgactggtcactggtgcaaagttgcccactgtgatggttttgaccgttgatgggaaccaagtgaaagccctgcagctatttctaggcatttcagagggtgcttccctgcatgtactctgctgcagaccatcctccctgggccaggagcccgctacacagtaggagattctttttcttctcttttgagcacttttattctctttttcttaatctctgctcctcctttgaactgagaaatgtgcaaatcttttttgttagttttgaggttgcttcttatgcatatttcatctggaactttcccctttgggggtgatctgttctatcagcctgcccgctgctagagaggccgaggtggtccggccagccgtgcgctgctgctggtgtctctgtgggcatgacctggtgagatatcattctgcatctgggggtccatcctatcagccctgtgttctagattccccagtgactgacatttagccagtctcctctgtcactctccagtgacatgtacacactgttggcacgaactgcagatgtcacgttctgtggctgagagcctcagtgtgcatctgtagtaggaggatgtcagtgaggactgtcctgtcgctgctgagctggcaccgactgtgcctggtctacactccaggtctgccaaacgacccagcaaggtccttcacaactcttctgatccaggatcacacatcacttgtgctttgatgcctgcttctgaacaattttacctcctgagatgtccatttttgggagtgtgagccctcctctcctggtgacagctggctgaggccgtccagcctcaggacacacagggaacggctgcataaggagatctggggcagggggcccaccaggatgttctgccctgtggggggcaacaccggctgtggtctgccggcggcatccagggacagtctgtctaggtgaggctgaggccgcccccactcgctccctcacccccatgctgacagcagtgagctgaccacagactgggggagccccacagggagactggcctccccagcacatgccccgcagtgccagacgcggtcatcacagaggcaggtacacgacaccacggacgtgccacgtacccgccatcgggaccaaggaccactgagaaaccatgaaggccatgcagcgactgtggtggcaggaccgtcaggaggccataggtgccacggctcccctctggtggttcacctgcccacctgtagctggggtggcccctccagtgcgctccccagagcagaacaccccccaggcaacacgtctgatgaaggccaacagcgtcagtcctctggtgtttggtgacatcaaagctgtgccgaaaggccttccctcactgctaacacttgaagggcttctgtccggtgtggaccctctgatggcgaatgtggtctgtcttatgcttaaagatccacctccattaactgcactcttagggtttcttcctctgaaaaggaatgaacacgggaaccccctcaaaggcatttttaaatgaagcgtggaaggcatcaaagatgtgctcttcttcaggactcaggcttctccatcattctctgttccttggaagcgtgagggctaaggagctgctgacttctctctcttggccccacttcaagaaaggcttgcttcccacacacctctccacgctcccagtgcgggactgacactctgcaccgggaggccaagggccaccatcgtcttgctggtaccgtaaaaaccctatcctctttgttgggccttaggagtaaatgggctctgaggtagagagatcagtgagaagctagttttgttctaaaggagcagagtgtatgcgtgtgtgtgtgtgtgtgtgtgtgtgtgtgtgtgtggagcagggcgggggggtggtgtggcatgcaccctgttgacagcataagattgctgttgttgctaatatagctattcgttagtatgatatcctacgtctctaactgataatggaaaagatggaaagccaagaagccaatccacaatccaggaaggaaaatgtgtctacagtcataagggtctcctattatgagacccagagtggaatttgtaggatgggtcgattcattgtatttctatttcttcctttgtccacatattcaatatatggatatccttctgcctttattttaagtacccagtgtgaaaatcctttgttaagttaagccatgtgagtaggctatagagaactggaatagttgcaaaaatactgaatttagcccatagaagtcattcagcagtgtaaggtaccaggaacgcagtgaactattatggaattgttacagcctaggatgaaatgtctttagagcctcacctatcagtgtgatt

SEQ ID NO: 2457 - DNA, 3652 bp, Homo sapiens
accatgattagcacttgaaaatttagaggtgcatgttgtttcagttctcctccgcaagaccccacgagttgtctgaacacccttttcaaacccagattccttccaccataccatcctggctccaggagttgggagaaaggaggcaggagccaggaacctgggttctcatcctggtttcgccagcctccaggtctgctctgtgaagtgggctcataatgcctgccttgcccactcacatctcgctgggttcttgggaacctagagagcactacacaagcaaagagtacctggggccatggttctctctgtggccactgccttccagcccatctccgtgcacgtctccatctgccttcccctctctgtcccactgtttctctcagtccccaccttgcctgccccctggatcccaggtttgggagaggggcaggagtgacaggcctcacccccacaggcctggctgtgatgcactcacagggcagcgattacctggacatcggcaacaacccgagagtgggcaccaagcggtacatggcacccgaggtgctggacgagcagatccgcacggactgctttgagtcctacaagtggactgacatctgggcctttggcctggtgctgtgggagattgcccgccggaccatcgtgaatggcatcgtggaggactatagaccacccttctatgatgtggtgcccaatgaccccagctttgaggacatgaagaaggtggtgtgtgtggatcagcagacccccaccatccctaaccggctggctgcagacccggcctagctcagatgatgcgggagtgctggtacccaaacccctctgcccgactcaccgcgctgcggatcaagaagacactacaaaaaattagcaacagtccagagaagcctaaagtgattcaatagcccaggagcacctgattcctttctgcctgcagggggctgggggggtggggggcagtggatggtgccctatctgggtagaggtagtgtgagtgtggtgtgtgctggggatgggcagctgcgcctgcctgctcggcccccagcccacccagccaaaaatacagctgggctgaaacctgatcccctgctgtctggcctgctcaaagcggcaggctccctgacgcctggctctctccccacccctatggccagcatggtgcaccccctaccactcccgggacaggatgcaaaagaggctccagagtcagagtgccaagccagggaatcccagtcccagactcagagcccgggcctgcactttgccccctgcccttgatcaaccccactgccccaccagagctgccagggtggcacagggccctgtccagcccctggcacacacttccctgccaggcctcagcctctagcataagctccagagagccagggcccatcagtttctctctgtggatttgtatctcagctccatgatgccttgggctttctgtctcctcaacaagagtgcagcttgctgaatgtcagctgcctgagagagctggggcctgacttactagggcattaaatcctaagaggtcctactgaggtgtggcaggatcacaggccagtggaaaaagggcaggtcagatgggcaaggcccaggactttcagattaactgagaggatatcgaggccaagcatggcagggggaaggtcagtgggtgtcaagagacccaggtctgaccccggatgtttgctccatgtgacaaaagcaggcctgtctcaggaccttttcttttcttttttccttctttttttttttgacacggagtttcgctcttgttgtccaggctagagtgcaatggcatgatcccagctcaccgcaacgtctacctcccaggttcaaatcattctcttgcctcagactcccgagtagctgggattacaggcacatgccaccatgcctggctaattttgtatatttagtagaaacagggtttcaccatgctggccatgctggtctcgaactcctgacctcaggtgttccacctacctcagcctcccaaagtgctggggttacaggtgtgagccatcgcgcctggccaggacctttgtttcttatctacatattggaagatttggtcctgatgtcctttgaggcttctttagctctagttctctgacacttcagcctatatcacagctaacttcttcagtctcatctattccttatgctccagcccctggcaatttgcctcaagatgggggtttgaaaataactttacctgactcaaggagtgtctggagcacctcctagtctaagtctgcaagctccagttcttgcctaaaaccatgccagtggccacccttgggctcagacagctctgggccttttgaccacaagccagcccctcgccctctctgtggcatagtcttctctgccccaggactgcagggcggcttcctccaaggcttccaaggctcaaaagaaatttggctccatccaagaaggctccagctcccctactggcccctggctcaggcccacacccctggccaggcccagagagtgtgtctcaggagaattcaatggctctagagagacacacagaaagtttggcatttggaaatttcaaggatgtatgtatgctcacgtatggagcaggttgtcctggtccctgggtgcagggaagtgggctgcagggaagtggattggaggggagcttgaggaatataaggagcgggggtggagactcaggctatggacaaggacagccccaaggttgggaagacctggccttagtcgtcctcagcctaggggcagggcagtgaagaaagctctccccgctcctgctgtaatgacccagagtagcctccccaggccggcatcttatgtgtgtcttccaccatcctcatggtggcacttttctaggcctgtctcccagcattgtgcaaggctcggaagagaaccaggaagtgaaactgggtgaaaacagaaagctcaatggatgggctaggttcccagatcattagggcagagtttgcacgtcctctggtcactggaatccacccagcccacgaatcatctccctcttgaaggattttatttctactgggttttggaacaaactcctgctgagaccccacagccagaaactgaaagcagcagctccccaaagcctggaaaatccctaagagaaggcctggggcaggaagtggagtgacaggggacaggtagagagaagggggcccaatggccagggagtgaaggaggtggcgttgctgagagcagtctgcacatgcttctgtctgagtgcaggaaggtgttccagggtcgaaattacacttctcgtacctggagacgctgtttgtgggagcactgggctcatgcctggcacacaataggtctgcaataaaccatggttaaatcctgagctccggagtcttcccaggccgatgcctctgcagtggcccgtcgcagaggtccagataaaaccagagggatccggggagaagagggtcccaggatacacgcccagctttgcccttagacaggtcacagtttcctcacgcccctgctcagacccccgcgggggcccaaatctcagttcctaccccagattgggagcagcctagtcgccgcacctgccacgtcgccctctgctggccgagggctgcccagcggccgcctcccatccccacacagggac

SEQ ID NO: 2458 - DNA, 12956 bp, Homo sapiens
attaattatatgtaacacaatacatattcattataacatatataacattatataatatatatcacatagaacattgttatagattatacattaatattataatatataatgctatatatttataattatatatatttaataaatattattttatttagtaaaactttatataaatttttaaatttttaatttttaatttttttgagatggggtctcactctgtcatccaggctagagtgcagttgtgtggtgccagctcactgcaacctccacctcccaggctcaagcaattcttctgcctcagcctcccaagtagctgggattacaggcacctgccactatgcccggctaacttttgtatttttaatagaaacaaggtttcaccatgttggccaggctggtctcaaactcctggcctcaagtgatccaaccacctttgcctcccaaagtgataggattacaggcttgagccactgcacccagcccatttattttattaaaataaaataaataaaataatatgtttaattaaaatatatatttgtataaaaatatatctattttaatatatgtatatttatatatgaatgaactacacatacaaatcttatatttttataaatgtttaaatattcatttatataaatataaatatatttcatactttagatataattacatatattaatatatatgcatataaatataaatatataaatttatgtaaatttaaatatacaaatataaaacatatgcatatttttatacaaatatgtatttttaaatatatatatttgtctaatataaatatatctgtattagggttctctagaagggcagaactaataggatagatgtatgtatgaaggggaatttattaaggatcacaggatcagaagttgaagtcccacaagaggccatcttcaagctgaagagcaaagaagccagttgagtcccaagacttcaaaagtagggaagctaacagtgcagccttcagtctgtggctgaaggccagagagcccctggcaaatcactggtgtaagtccaagagtccaaaagctgaagaacttggagtctgatgtttgagagcaggaagcatccagcatcagaggaagatgatggccggaagactcagtaagtctactttattctagtctccctgtcagttgattagatggtgcccacccacaataagggtgggtctgcctctcccactccactgactcaaatgttaatctactttggctacactcacagacacacacaggaacaatacttcgcatccttcaatccagttaactcttaatattaaccatcacaatatatatttctatttacatatatgtatatttgtaaatatacatattatattaacatgtcacatttaatcctttacatatgtgacatgtatgtgtaatcctttacatatatgtgtatgttgattgcttatgctttatgcttataataaaaaatgtttacatcattcacctagagtgagaatatgattaattattcctgattcacagtaaaaacatttattagggtttttttaattcccaaaaatgttcttgacttaaatattatgggtattgatttttgtcctttaaaagtttctggaacatgtaaattgaatttctattctctgtctcccattatgattaagttctctcagaattttaatctcttttttcctgtactgtactgtaaatctttttcaaatttgtattttataataatgataccgtgacccaataaatgacttcattttttctgcctccattggaaatttttatttttaatttgtgtttttaaattatttattatctatttctgaataaactcatattctgtgtcaatcctttattttgtggtaacattccattcctgcttttaggaactaggtcttttaagaattctaaactgtcgtggtaaaatttacaaatctttgttattcttttttgaaaggtatatttttcctttgagtttttactatgagattgtcttttcttaattttgcaaactttttacatgccagagattgatttttattgctaataaatcttaaacaaagagagttatattcaggtataccttttgttaactgaaacaagttatggagactgctcttgtagtgttattgcccatggaatttctgattgaattctcttaaacatatctatatctggaaagcctgtctgcacatagttctgttggcataacctgcaacatttagcaacgattaatacagattaagtttcttatgctctaatctcaagatggttctgtgataatttgaaaaactgctaaagaaaacaatgcattttatagaaaatgcatttctcctgtcaaagcctccatttctatcaaagcatctcttgtgaaatctatacatccttgtaatatctcgggcctgagaaattgtaaccaaactgtttgcatcattttatgtctgcaaggaaacagaatgctctacggctaatctttcccttggtctatgtctcatgagtgatttcaaacatgtgcaatcatataagccaaaatatagctcatgttctgtcaatgggttgttgaccagtctaagtttccaatgttgttctattctttctatgtcttgataacttcttagcatgaaaagattaaatctgaaagctaaggaactattttcaactgaaattctaggtttaaatctaaatatctctattatacttgatgtataataaaattaattatttttaatgttatgcatttggcaccaatatttatattgtcccaaaacaataaagtctatttcagtgaaactctgcctttgtttaatagatcttcatctatattataatttaaaaggtgatttgttttttcttggcacaacaatttcaccaatttttgtcacaccaggaatagtaaactgcatgtatccgcatcaaaatagaaaaatgttgtttgtgctttttttttttttaactatgacacattactgtttaatttttttagtcctctaccccaaattttaacagttaattagcatatcatgttacttgtgaagaagaaaacactctttagagtggcaagtggctgggtctcaagtcagcagaaatgtgtaccatatctgctgaagatcaaaggtaacagattaaaaaaatgtaagtgatagcagtttaggattttgtttctgttttttttttaactaatcaaaaaatgcacttataaaatataatttttaaaaagtgttgtctaaatttagtattcaatcatttagcacaccgtcattattattataactattatattaactcttctgtattcacattggtcaaataatataatgccagccaagtaaagtttatgtttttaaatcatacaagtatgtttgaaactatattcacaatctctgacattttcagtttcctattaatatgctttaaccaaagtgcattataaagaaattataaaaaaactgacatcaaggtcaaatttagttatttggtaatataaacttataggcacaatgtgcagctcccttgtcttaaaatatacctatgcctgcaaggttcctgccagtaactttctacagttgaggaaactgccctgatttgcattgacattcaatagcttcccccaggcaaatacctgcaatcatctgttgaagcctgtctataggcacagaacagccttagaacagtagctctgtaaaagcagttattcccttgactgttacaggaaggacattagagaacacagaagattattaacttttattataaagttcttttcattctaaagacttttgcaaatttatcattgatttttaatataaattagaagacaagttagtctatatttgctaaattctaggttggaacttacaatcattggtatatatgatttgctcagttctagtaaaccaaactccatttattaagcccacagcatgcactgagcactttgcttagtccaatggatctatacaacacaaacttttatatgtaaaatttaagaagaatgaattcggactcagaaaaaaactgcaatagaatcctgtctctggcttttagctctattctgtttgtccaaattacagagcatccttatgtattcgattctttacctataaagttatgctgtccaactttttgagtggttgtcgtgattcaatgttataatctattttaaagtctcagcacagttgccctgtcatcactctagagaaggcactgaatgaatgcaagccattactactatttactatcaaaaatctctttagtatcaactgtgaagacagttacatagctcttcgttttcttcctacctgagagattcttaaaatattacttaaaaaataacccagagaagtatatcttaagacatccttagaaaagttaaaataaattacaggtttggtctgatattcagcaagtatttaagaatatgttcatgtatgattcatttgtatagacagtatcttcagtgttactgaaatattcatgacaaactatgtttaaaagcagaattaattaaacaagaccagaagctactcaaatttaagtcgctgagattaagttttccttttaaagccaaccctatagtcccatagatagttttttggaataaacataaaaattgacccttgtgttcttaaagcttgaaacttacatttgttttatctgagtttcttccttaggaaaggctcctccggcctctcaaaacaaaagaatcaaataactgaaactcacgagatcatcacatccagacaatgagatgctggacccctcattcatcacgattgcttccttgcccctccctggctcctgttttcatttcttctctgctatataaactcctagttttagtcagtcatggaggtggatttgagcctgagctcccatctccttggctgcagcacctgattaaaaccttcttccttagcaatacttgttatctcagtgactggcttcctgtgtggtgagcagcaggacctagaccaaacccctagtgtttcagtaacactttactggagaaaaatactattaaaaggaaaaacaaaactataattctcattaatgatataaaccagaaaaaaaaagggaacgataacattgtagccactcagtgggttctcctttgcccctgcctagatggagccaatttatcaaggcaatggaattgtaatagagaaagagtttaattcatgcagtactggctgtacaggagactggagttttattattactcaaatcagtctccctgaaaacttggggattgggtttttaagtatttggtgggtagggggttggaaagtgcagagtgctgattggttgggttggaaatgaaatcatagggagttgaagctgttctcttgcactgagtgagttcctggttgggggccacaagaccaggtgagccagtttactgatctgtgtaataccgactgatccatgagtacagggtctgcaaaatagcccaagcactaatcttaggttttacaatagtgaatagattttacattagtgaataggttttacaatagcaaattggggaggttcagagcctttcagcctccagctgcataactcctaaaccatattttcaaatcttgtggcaaatttgttacccctgtaaaagcaattctggtccccaggcaagaaaggggtttgttttaggagagggctgttatcatctttgtttcaacgctaaactacaaactaagttcctcccggagtttctttttttttttattaattttattattattatattttaagttttagggtacctgtgcacaacatgcaggtttgttacatatgtatacatgtgccatgttggtgtgctgcacccattaactggtcatttagcattaggtatatctcctaatgctatccctccccactcccgccaccccacaacagtccccagagtgtgatgttccccttcctgtgtccatgtgttctcactgttcaattcccacctatgagtgagaacatgcggtgtttggatttttgtccttgagatagtttgctgagaatgatggtttccagtttcatccatgtccctacaaagaacatgaactcatcattttttatggctgcatagtattccatggtgtatatgtgccacattttcttaatccagtctatcgttgttggacatttgggttggttccaagtctttgctattgtgaatagtgccactataaacatacgtgtgcatgtgtctttatagcagcatgatttataatcctttgggtatatacccagtaatgggatggctgggtcaaatggtatttctagttctagatccctgaggaatcgccacactgtcttccacaatggttgaactagtttacagtcccaccaacagtgtaaaagtgttcctatttctccacatcctctccagcacctgttgtttcctgactttttaatgatcgccattctaactggtgtgagatggtatctcattgtggttttgatttgcatttctctgatggccagtgatgatgagcattttgtcatgtgtgttttggctgcacaaatgtcttcttttgagaagtgtctgttcatatccttcgcccactttttgatggggttgtttgtctttttcttgtaaatttgtttgagttcattgtagattctggatattagccctttgtcagatgagtagattgcaaaatttttctcccattctgtaggtgaactcccattcacaattgcttcaaagagaataaaatacctaggaatccaacttacaagggacgtgaaggacctcttcaaggagaactacaaaccactgctcaaggaaataaaagaggatacaaacaaatggaagaacattccatgctcatgggtaggaagaatcaatatcgtgaaaaatggccatactgcccaaggtaatttatagattcaatgccatccccatcaagctaccaatgactttcttcacagaattggaaaaaactactttaaagttcatatggaaccaaaaaagagcccgcatggccaagtcaatcctaagccaaaagaacaaagctggaggcatcacgctacctgacttcaaactatactacaaggctacagcaaccaaaacagcatggtactggtaccaaaacagagatatagaccaatggaacagaacagagccctcagaaataatgccgcatatctacaactatctgatctttgacaaacctgacaaaaacaagaaatggggaaaggattccctatttaataaatggtgttgggaaaactagttagccatacgtagaaagctgaaactggatcccttccttacaccttatacaaaaattaattcaagatggattaaagacttaaacgttagacctaaaaccataaaaaccctagaagaaaacctaggcattaccactcaggacataggcatgggcaaggacttcatgtctaaaacaccaaaagcaatggcaacaaaagccaaaattgacaaacgggatctaattaaactaaagaacttctgcacagcaaaagaaactaccatcagcgtgaacaggcaacctcctggagtttttttagcagtatcccaggaatgatcaaggattgtttgggggttagaagcaagatggagttggctaggtcagattcctttcactgcaataattttttcagttataattttgacaaagatggtttcaacataggaattacaattattaacagtcatgaaattggcagaatgttgacaccaaaaaccagtttacatcatcgatgaagaactaagaggcaaaagtgttactcattggctaaataagttattagtcctggatggctactagaaagagactcaaaaatattgtatgttagaaattaactgaaatactagattaggaccagtaaaacttataaaacaaaaaggacactacatgatgtttatatgttaatttctttaaatttagttttaagtgttatttcttcccaaatttaaaacctacacacatatagattttttagttagaattatattaaataacaattatttattggaaatgtacagaataattactttaacatgcataaaaattactttttaaataccccttgtgtataatgaaagtaatgagcctaatctactgcaacattagaaaattcctacctgtcaaaagatttctattaagaaagaagagtttcacaataatttaaccagctttgaggagacataatttacaaaaccatgtttattagttgcatgagtaaaatttaatatttttataatataataggaaacaactatgtgagattttggaaaataaataatgaataattaatatttattttattctcagaactgagtggaaataagacatataggagaccaacaaaagggatcaagatgtcagatttgataagcaattgataaagagatttagaagtgtggctttagacctgtggctcaaatagtggtttgaaagcagaatcaaggattaatcaaagtgacttcatcatctccgtatcagagaccgtttataatactgtccaaagtgctgaatgcttgttatatggaggcagataatttgatggagctacatctaacttgacgtagagaccacagtgtgtcaccagagattctggcctcctgagctggatgcagaaactgagagaacttggagttgactcccatggggagtgggtaagtattttctgtcatggtaataatgtaatcaagatatttttgataccagaattgtgcctagctttggacagtggaccatgggtggaggaggcgagtgtcgcttctgggcaggaacaataaaaatatcctgcacaatgtttcttactgtctcttcctctcctgagacaatcctggaactctcatgttcagattgtgaaggcataagacagatagagataagattcttgaattcccacatataaggagctgtcctagagaggttactaacttgctgtggggttttcttgaatggaggatgaacctctattatgttacaccctaaaatttggggaattattttttggttttgtagctataatatttatttattgaatatatctatatatctcctatataatgccataatgcaattaaaattaaacgtacacatacaaaaatctatagctcaatggaaaacacctgaaattgggtgatttacttttctttgtaaagtgagaaattaggaaagttattcttatatgtaaatcttgctacatgagaaaaagatgtaagggaaagatctataaacatacctgggaagaatgatatataaaatgatatattagctttacatatatatgcatgtgtatttacatatatatgcaatatatatgtgtatatattttagatgttatttaaaaatatttgtgtaaaatgtttttttgcccaaatgattcattaattttaagcacaaaatatattatgtttctataattagttgcccatgtaatttatcatccaaacaatgacatttttgaatgtgaaataggacacaattaataattatgtcagaacaacgaacgtaaactaggactcttctgggcaaactaggacatatggtcaccccacctagaagttttaatttcaaagctctggaaattcttgccatttccctctcactttctcctcatgaaatacaaaacaaacgaaacatgttccttcctcaccttaaaatacatttgatgaaaatatggacgtccatttcactattggagcttaggactcattgctaaaccagatagctcatcaatttgtttaaacatcctaagagcaagcaggtcatagtgggaagactgccactagtaactagaaatggaggtggatgagcaagagtgtgtgaggatttccacaaagtaaaacaagactaataaatagtaactgaacgcacccaagatgaatcttcacttactttacatgcaaagagctggtcatgtctgaatacatagttcctaaagctaaattatcattaaccttgagagagatttcatggtgcatgctttattgttctcattttatttctaatttcaaactgagatcttctgccaagcaactttcctttctccttcaataattacctgaaatccaaacttctatatgaagttgtccatgattaagtcatttaaagaaattaaacagtcttgagcaataatcagtcagagcagttatccattttagatgagtcatctgaataataatcattaaaaaaatcctcttcaatagcagttttagcctgatttttttctataattgccttcatccctcagcacaattactaaatgtccacacacttcttttacagttttactacccaaatcatttgctcttgctcatcagctttgcaaattaatattttgttaaatgcaccagggtagcttatttgaaaagaatgctaaagtaatttttttataaatgactaataaatatacctgaaatgacatttagtaagtttaaggtttcttatagtagggtaagcttgtgtttcttggtaaattgcacactttccaggatattgaaatttattaagaccaatagcagcagcattaataatgatgataataactacccattgattttgccccaaatatggggtagatgctaggtattttatcaactcttaaaataagactgtaagctatttttatccctattttaaacttcagaccttatgaacaaatccagcatctcatggatgattatgcttttacatatttgctttcaaattttctaacttattgaaacaataaactctatgaaggcagagaagatgtctatgtctattctacttgctttgccctgtccctatcacattcaaggacaatgaaggtatcacacttcagaaaactatgaaaaaataaaaatatatataaaggaacagagctaactccaaaaatagttgtgtttgtgttaatttggtaataattattgtgtgcttcagttctttatacaatttcttgctcatatttcctcatctacaaaagcatggaattattactcaaattttcctttcattcctatatgaaaaaattacatataaaatatagcataaatttagaaatgaagttgacagttttatggcagaagcaaaaactgattgccagccattaattaacactctaatttcctgttaatagatttccaattttgttctataacatttaacccattgcagaggatgtcttcactgaatataagccagtcttggcaaatgggtttcctttgccagatctctcctttcccagtctctcgtgtcactgggggaggttctgggatatgtctctggtcagttatgtgttttgttatgtgaaaaatattcttgatacaatagtagcctccacatatacgagaaggcatgctatacaaaaggctgtggaacagaaaggctcacaaaccaaattaaagtgccccaaatcacagagattataaaaatcagagtaaaacacagtgagaagaaaggggaaataggtgggataagctaacacagaataggatgtaagcaagatagaaggaccatgttacctgaatcttgagtgcatggggtgttcacacatcttgtctttttccctgccacatcaatttttcctgttgattatgtagttatgatgaccagagctgagatttctagcaactgtgccattagacaaaaggtgttctgtgccaggaacatttgatccactggagagacacagggacacagaccaaagtataagcttggcaaacatcttgatgaacagctatgggatgtatttgtgtttctttggcagagaaaacatgggaccagaatgtgtgttatctatgtgtggccaaataagaccccgtgaatattaagtgcccaaatattttgagactcatatattgaatcacgtgtatatttggtatatcataaatatttagtacacaggtgcttcataaagattaaatatctcttggtcctttcatccatgtatatctgtgtttgacacacacctatcctacttattaactacttatcttataagtaacacatcctatgaattctgccgaagtctaacaaactctttgcttactggttacttatctataatgaaacgactttaaatagttttgcctatgtcttaaaactacaaacttaattcatcgaagagaattggatatgctcaaaaggaaatgtgcatttcaaatataaagaaaaaatgtttgaaggcatatggagaatttttttttaactcatagaaaccagacctcctgttttctgcctgctcacttccttccagcttggaatgttggtataaaaacatggctgtggagctttaagagccatcctgcttctatgatgataaaaagtaaataggaacaagttgctgcaagttgtaaaaaaaaaaaaaaaaaagtatgtgtccttgacaacatttttgaggcactgactaaaaggtagaattgtttactttagatattttgtgacataagcaaaactgccctaattatccatatcactattagattttcttttgttttcactcaaatatacttaaatgattttaagacctattaccaactctcaaagttctatatcaggggaagatataactcacagagtgttttgagctaaaaaatgaaaggtgtgagaaagacgcaaaggtattctttaagacatgtcttatcaattcattaccatacataagtgttcagaaagttctagcttattctgtccaaaaaaagtatcaaacaccctcagaggaaaataaaaaactgtctgttcttttgtttaatatataggtgtgtgtgtttgtgtacatgtatgctcatggcaatctaaaactattcctattatgatttttgtcatatagtatgcataatatgatatgcatatattatttttaatcatattatattttactatatcataatgtttatgtccaacaaacagatgatgtaaactttgtgctctattacttggagatatatatatatatatatttatacacacacatatacatgcagtaacaatatcc

SEQ ID NO: 2459 - DNA, 585 bp, Homo sapiens
tctagtctctagtgccagggatagtgacctcagcctcaaaatgagcaacttgagaaaggggcgcattgtgtagacgtggaccgtgggtttgcgctggtccactcataccagtatattttaccttatactaaaagcctctctgtgggctgccatacatagagttcatgtagtggcctggcctgtataactgttgatagtatgatgtgggtaatggttcagtagaaattctctgagaaaatggggaaagggatcagctttaggtttcttacttgcaatttaatttgacctaaaaatacatacgttctgaaaattagaacttaaaaatggcattctctaaagacgtttgtgcccagaaatcagcattggtttgcctaccaaattagttaagcttcttcttttcctggcatttaaagccttgagcaatctagctgcattccacctttccaacatttatccccacagcctccctacccataacctgtatttcctcaaacgcacgtttcacttatatgccctgattccttgtctttgcttggagtatctcctttgaaattcatatcaaatgccactttgccctattcttcc

SEQ ID NO: 2460 - DNA, 881 bp, Homo sapiens
agcctggacttctttttgtggagactggattccaagattgaaagtagaagctacatgttttctccaagcagggctttcagacttcacttctgcaacattttattgatgaaagcaagtcacaagaccagactgattcaaggggtggagaaatagaccctacttcttgatggagggaggagtagagttacattgcaaagggatctggacaaaaaaaggagtgatttattaggaatcatgtttaacaatttaccacaatccccagcgcaactgcctgttagctggatccagaaatgtctacgactactgcaatgccacttggccttaggggtgatgtgacccagtgtaaagagatggtggtcttaaccaatcacagttaagatagtttagttttggaaggtataaaaaatatgtaacaacatgaatgcacttttagggtcagacaagagacttggaaagagcctgcaaaatggaggagccctgaggcctaagtctcatgagtgtcaatgcttacctgtatctagacactggcatcccccttttgataaggccaagattgattgttttccttttctacctaccctatatctaatccatgtacaaacactgttgacacacaaaagaaccctaaattcaacaatctgtgaagaatttttgcactaacatgttagttcaaaaactcaacattgcttgctaagactattgcaataaactcctctatgatcccctaatttgattcttgctcctcttattttttacacagtcatcagagtaaatcttttcaaaggtaaattggattttatgacttttctgcttctaattagtttcatctatacattaaaatatatttccaaactattctacactggtctgtcactggccac

SEQ ID NO: 2461 - DNA, 42992 bp, Homo sapiens
cagcatagtcacaatcaggcttttttggggttatcaatttcctggtgaaataattatagtaacagcttaacagtcttttcttatcctttcttttagaagaagtaagcatgttttactaaagtcatgtacacagctgtgatttgaatggcaatatttatcttacatctgtgaaggctgattttcctgacctttgcttcagcataattgagttaaacactcaggggactgtgttactatatttaagacaatatgcataacgggtgttatttagctaagtggtgcctgcccagtaggtgctcaggatccagggagagaggcagactcaacatgcaaacaactcttctatgagggtaagtgtaattgagggccctaggagaactttagtagtggagggtttcttgtgtttctccctttggactgcctaactcaagcagtgttcttgacccatataagctatgtagtgtttcccctctcttatctactgtactaatttctgtgtctctcttggaaattactgccctgatctcgaaacttaacttcacccattgcttggtgagtggtgtggaaaacttctctcgggtctatgtcttatccctgaaaaatcttgccacagctgctcaggaagagtgtacaaactcatttccccaacatgaaagtcacaaaaattttgaaaaagttttccctaaaattgctgtgagaaggtcttgctgattatttttgttctcaattatatattctttggggggaaagcctgtagcttgctcactcatgggacagatctttcgtgggttacatgaagagcagatctgtgaatgttgtcatcccctgcttgttcctgctttcttgtggttaccatctttgtctttaacctttagtttttggctgagtgaaaaatttccagactcctgaaatcaccacaatcagatacaggagacatagtagagctcacttgtagaaagtgtcttttttctggtacagagaagaatggtttagagacacccttctctagtatatgccataaaatagcctatctaaaccttggaatattattgtgttaaagtacatgtagcatgtgtagcatgtttaaatgtccttttatgaagaatttaaagcaaaaaggaaagaaagaaagaaatttacatgcaatgactaggattaaaattattgctgtaattgattaacaaaatttactgtatattctggaagtcagtactcaaaacaaaattatagaaagtaataaatatgttaagtaccaaagagatatattgtagtcctggccatatgttaaattctttcccatgtgaaacattacataggggacaagggtcattcacaattttattacaaatataaaaacagtttacacgtggcaatttctggataaaagtttatggcagcaagaataacacattcaaagtgctcttagaacaaaagtaaaattatcagaaccatgaaatcccacagtttttgctaaattcgtttctcaagaaagactatttgaaaacaaaataaagaatgcatttgtataatcttctttcaccatcaaacacacatacttctaaaatacaaaaactttcaaattatcatctgtgatcattggataattcacctgtcttaaagtttctaaatcaataaatttagtgaatcattgttattctgaagagtaaggaaactgagtaattatcctcaatcattgtgcatttgctactgttacaatgattcctttagtgcttttaaactttacatcaaaacccaattgctcacagtggatacctgcccatttgcacaccatatactgacttattttcttttcctgtcttaagttcccattctcccaccagtgattcttgggttcgtctcccaaataaactactcactcaaatcctactcatagggtctgcttttgggacaaacaaccctaacaatatttaaagaaagtttaaatattatttgtcaaaatatgttctgtgcaaggaaggatatgtggaataatcttattgagaacaattatttttcacaataaaattcaaaaggaatttgaggtatcaactaattgagatttattttctatgtatatcaagctgtcatatattatgtcttggttttgatattttacttttgaagctggcttctgtgtattttctctctctagttatctcagctgtggtaaaagtagtctgcattgctatcaccattgcttagagcaaggtggctggataaagtgatgtgactatcaaagggtaggataaaaatttcatcttaaatattccttctcataatcacataatcctttaaaccaaggatagcctgaaagaaaaaataatgatcctaatttgaagaagtctcaagaatccaaactttaacattagaatgtatgagatttagaaaagaaggcatcatcaactatgagaataccaaaaggaaaacatggtcccataactaccacatatcagtcagcaaacagaatttctcccaagcaaacacagttggaattgcccatggggcaggtcagcaaagagtggggctctttgtttttttttttttttcctgtgggttccgctatgtcagtaatggaaattgtgagtcatctctgtgtccattgggaaagcatgtcatctcttgtgcctggcaagcagctcatcgcatgagagagcctaccaggctcaaccatgaattacataatctgccttcaaaggaatcagaggattaaccaggtgttcctaagatattacataacttgtgtatcttggagagatacacagatagtttcaacagctgccttgataaggagcataatttctcaggagagtaaaaatatatgttcttttttctctaaaattgaaatatatatattttttcactaaatgctaaatgtggttttgatttggttggttagaaattaacttgttttggtatttttcctatttaaaccatcaaaattgtttttaaataattttaattcttttgctggcaggtgaaatggaataacagggattgggcttacccctttactgaacaacaaagaaaagtgaaattataagagaaatattatttatgatattgagtattgggcaataaacaggggtaattttgatgagacagaaaacaaatgaggtgagaccctgtgattgcctgttgggaagattttcagagaaaataaaattgagggtctggggagaccaaagcagttagagttagaccaaagtcagttaatattagcagatagaaaaaaagcagcatgaagagagatttctagagaaatgaggagactcgtcgtcaagtatgcagctaaatactgatcagtgcatgcctgtgagaaaactacctagaaaaactatctgaaaagattggcataacaatgcccagaagtcatacctattccaggaccaggaatactgcctattagcaccagccagactggaagacttcaagacttataaggcattggatagaatagaatagatagaacagttttccttcagtagataaagcaagttttaagttgttttaacttaagcaaaagcacaaaggaagaaactgtttctaagtaacttgcctgcatataagaataatgctcaagaatatttatagtaatataacaatatccattattcagcaaggtggaattcacaatgtctggtattcaacaaaaattaacaaacatacaaagaagcaagaaagcatgactgataattacaagaaaaattaattaaaaccaacccagacttaacacatatgttagaattagtagacagggacattgaaacaatcatcattttatatttcatatgttaaaaaaagttagtagtattaaaaatgcacccctccaaacttctaaagatgaaaactgcaatgtatgagatggaaaagaaactgcataggattagtggtagagtacatatttcagaatgaagaatagtgaacttgatgctatagcaatagaaactattcagaaagttacatagagagaaaagaaaattaaaacaaatagagcataaatgagctgcagcacaactttgagaggcccacttatatatgtaattgtagtccccaaaggagatagggctaaaaattatttgaagaagcaatggctgaacattttctgaatatgataacaaattcaagaaactcaacaaataccaagcataagaaatatggaaacaatatgccaagaaacatgacaatcaaattgctaacatctagtgataaagagaacattttaaagcagccacatggagaatatttcacagatgagaacaaagataagtttggcagcatatttctcatcagaagagatatgttttaagtattgtattaatatacttaataaaaagtgccataagagcttacatacacttaagtaccttaaggtgcttaattagaaaatcttaactgaaaattttagaccagtaaaaatatcttgcaaaaatataagtgaaataatgacttttttgaaattacaaaagctaaaatcatttattattagcagacctgtactgtaaataagcctttcagacagaagaaaagtgacatcagatggaaataaagttctccacaaagaaatgaagagcacaagaaatgatataacaccagaaaatacaaaacatgtatcttattatttaaatatctttgaaaaaaattgaccataaacaaaaaaaatgtaatgtggagtttataatcaatgtgcaattgaaatgtaagacagtgatagcacaatgattggaaagagaaattggaaatatattactttaaatgtcttatactttatgtaaagtgatataatcattttaaggcacattgtaattattttaaaatatatactacaagccactcaactaatagaacaaaaatttgtaattaatagctcctcaatgcagataaaatgaaatcatagaaactattcaattaatccaaaagaaggaaggaaaaagaagaaaaaaatcaagaaaaacaaatggtaaataaagaaaacagttaaagttgttagactaaaacataataaaatcactaatcacactaaatttaaataattcatgtatctttataaaaaggcaaaaaattggcagattgaatttaaaaaatcaagacaacaaatgtgctacatacaaaaactcatttcatatacaaaaacacaaatatgtaaaagtaatgctgaaggaaagaatactgcattaacataatatatcaaaaaaactatattaatgttagagttgatttcaaagcaaataatattaaaagggataagtacagtaattataaaactataatgaggtcaatttatcaaaaaatagtagcttgtaaacattcatgcacccaataatagtttcaaaatacatgaattaaaaatctcacagaattattaaaagaaaagtaaaagttcaccattgtagtaggatttttaactttcttctataaataagttatagaaaattagaaaatcagtaagaatataaaacatttgaacaacactaccaagtagcttgatgtagtagacatttatagaatactccatccagcattattataatgaccattattttcgaaggcacaccaaatatttaccaaaaattattgtgggctacaagtcagaccttaagaattttaaaataattccagttaaagtgttttctctgaccataatacaattaaattagaaagaataacaaaaattcttgggtaattcccaagtacttggaaactaaataatataattctaaataacatataggccaaagcaaaatgaaaggaaacactgaataaaaatgaaaatatatcaaaatttatgagatgccaattaaatattatttagaggaaaatttatacactaaacctttatattagaaaaaaattgactcaataacttcaacttccactctaaaactggaagaaagaaaaaattaaacccaaagtaattacacaaaaggaaacaacaagaatcagagtggatagcaatgaaatagaaaagagtgagatgatagctacatcagtgaagcaaaaatctgattatttgagaagatccataaaattgatatacttccagcatgactgatcagaaaaagaaagttaaaaattaacaataccagaactaagaaaactgacaacattacaaaagttacagacattagaatactgttaaataaatattatagagaactttttccaataatttgacaccttattaggctggtgcaaaataattgcatttttgacattacttttaatgaattaaatagatgaacagatttcttaaaacttacaagttatcaaagcacacacccaagaagaaacagaaattctgaatatctttgtaaatgtttaagacctggaatgtgtagttaagaattaaaaacaaaaacaaacaaacaaacaaaaactcaagtcctaaatggcctcactgatgaattctaccaaacatttaagagagaagtgttaataattttattcagatattcttggaaaattgaagaagtggaaatgttttccaaaagcatttccctgataacaaaccagaaaaaaacataagaaaagaaaacttaagaccaacattccttgtgaacataaatgcaaaaattataaatgaaattttggcaagtcaaatctaattagatataaaacattatgatatcatagccaagtatagtttttcccaaggatgctaggttaaatgtttaaaaaattttcaacataaattactaaattaacaaaacaaaaaagaaaaccatatgattatctcaataaattaagaaaaagattttgataaagaccaatatttattactaataaaagtgttcagccaagtagaaatagaaaggatcttcctcagcctggtaaagcacatctattaaaaagtggcagttaaaacagtacttaatctggaattatcagacttaagacaaaaatattcactctcactacttctattaaatatggtattacatattccagacaacttaatagttaaaataattttaaagtattcagaatggaaataaataaaacactatttacagatgccatcattgctatgtagaaaatccaatgacatttacacaaaagatactagaattcatacagtacatgcattcattaaggctacagaatacaaggtaaatgtacagaagcaaatcgggctttatgtactagtaatgacaatttggaaattaaatttaaaatacctccaataatagcatcgttataaaatatatacagataaatttgataaaataaataaaagtcatatactgaaaattacagcattacctagagaatgagagaggacctaaataatagagagataagccatcttcatgggtcacaagatgatattattaaattatcaattctataagtcaaaccctggaataaatttttggtgaaaattataaattgattataaaattcgtatggaaactcaatgaacctagaaaacttagaacctgtgaaaacaattttgagaaaaaaaaagaacgaagttgaggattaacaatttggggctcttatactgatttaggggcattataaaactacagtaatcaaaacaatgtatatttgaatcatgatagaaaaatagatcaataaatcagaatggagagttcaaaaatagaatattatatatgtggacgatttatttttcatcaatgtgaaataagcaattcagtggagaaagaaagtcttccatcaaacagtactggaacattcagatagccataggaaatgatgtgaactttgtttcatatctcacaacatatataaaaaagactcaaaattcatcatagatctaaatgtaaaatctaaaattataaaatttctagaagaaaacataggatgagctttgcaaccttgggttaggcaacgattttttaaatatgaaatcaaaagcacgatcatttaaacaacttgataaaatgaacttcatcaaaattaaaaacatctcctctgtgggagatatcattaaggaaatggaaagagaagttaccaactgggagaaatcatttgcaaatgatgtacctaatagtggactggtattcagaatatacaaagaactcttaaaacacaacaataagaaattaaacaaaccaataaaaaacaggcaacagactttagcaaataattcataaaaatacaaaaagtgatctataggtacaagaaaagatgcactcagcatcattaatcattagaaagatgaaaattaaaatcacaattagcactacatgccaactagaatagctaaaatttgttaaaagatataccatactaggtctttgtgaggatatggaagactggaatggtcatacactgttagtggaatgttaaatgaaacaaccactttaaaaagcagatgacttttttaaaaagttgatacactgactatattatctaactatttcattcctattttaaaaaaaaacgaatgtttatgtcctcagatgttacacaaatgtttttatatatatataatattattattcataatagccaaaaactggaaacaatggccatcaacatgtggatggataaactaactatggtgtattcatataatgggatgggatgcttctcagcaacaaaaaaatgaattgctgacccatgctttactcagataagcctcaatataattatgttgaataaaagaatttcgacaaaaaaaaccccacatactgagtggtctccatttatataaaattttaggaaatgcaaatttacatgtggtgacagcagatcagtggctgaatggggatagaggaacacgggaaacatcacaaactttttagagcaatggatatattcattgtcttgataaaaagtggcagcacatcagaaacttcctttttgtctctctgggtaatgagtactatttgcataatttgcttcactctgtttcattggttccccaaaatggatgttgctaaagaaagaaatattgttacatttgctaatggctggaccctacccacttatattttgagtttcttcatgacacaattgtcaactaaactttgtagtagatattggtcacaggatttgaggtttgtctcttttcatgaaggaaaaaaggaagattcaaaaagctatgctgtcactgcttctatttttttcaaattatcttagcaatattttgtagttttcagtgtaaaggacttgtacatctctaatagatgtgcatattctaatgaaaagtattctaaatacttttccattagttatttgatttataaatgctcttttgatatcactttaggatgtcattttctaatattcctttataaacatagaaaataaacacatttgattttcatatgttaattatgcatccagagttgtatttatcaactagtaatttatctagttttctatgtgcacaagtctagcatcatcgtgggactgcagtatttcttcttttaaatccttaaagcttttacttattttgtgtgactcattacaatgactatgccctctagcacaatggtgaataaattaatgtagtaggcactctttttgtgttcctaatggtaccacaacaatgatgtttgctgtaggtagaatgtaccctttcaatactaattttctgaggatttatcatcttgaaaaaattttgtattgtatgttggtttttattgtttatcactaaatggacacacttgtttattgtgtttatgtgctgaattaagactgatattaaacagcttttatgtcctgaaataaatgcaaaatatatattgctggatttgatttccagttcatgatgtgtttagagtttttgtgactaggttcatgtgaaagattattctgtaatattattttattaataatcttgtaccattttgatttcaagataatgattgtctcatcaaataaatatggtgggtagtgttttttatatcctataattattttttggttggggggatagagtctgaccttgtctcccaggctggagtgcagggttatgatctcggctcactgcaatctccacctcccaggttcaagcaattctgcctctgcctgtaatgtagctaggattacaggtgtgcaccaggatgcttgactgatttttttgtattttcagtagagacagggtttgctttcaccatgttggccaggctgatcttgaactccaaacctcaagtgatcttcctgccttggcctcccaaagtgctgggattacaggcgtgagcaactgtacccttttgtatgatttttttttaacacgcacatttatcaattaagtgggcacagtttgtggtccaccaaaacaattacaacagtaacataaaaaatcacactgaacacagatcactataacagataaaatagtaataaaaaattttttaatattgcaagaattatcaaaatgtgacaaaaagactattgacatcatttttccacatcatgttttgtctgaaaattttaatataagtttggttttattccttatgtatttggtaaagtagtataggcttacttgttgggtattttgaatgataaatttaatttctttaatagatttaagatgattcatatttctttttgtgtccattttacaaatctgttttttcttgaaatgcatacatttcgtctgaaatttttgattgatgtgcacaaatacattggtatttgatggataacttgattgatgtattagtccgttttcatgctgctgataaagacatacccgagactgggaagaaatagatgtttaatggacatacagttccacatggctacggaggcctcacaatcatggtggaaggcaaggaggagcaagtcacatcttatatggatggcagcagacaaagagagaacttgtgcagggaaatttctctttttaaaaccatcagatcttatgtgatttattcactatcatgagaaagtcccatcccatgattcaattacctcccactgggtccctcccacgacacatgggaattgtgggagttacaattcaagatgagatttgggtggggacatagtcaatccgtatcaattggcattgtttaatttcctcttaacttttaaatatctataacaatgacccttttaaaaatttatgtcgttggtttttgtacctccttcctatcctctctcttctttctctcttcctccttttctttctttctctgctctctgtctctttgtctctctctgtcttgcaaggggtttatcaatagtatcaatctggggttttcaggtttttctcctttgtatttcttctttctatttcactattttataccttctataattttagggcttaatgtgctgctatttttgtttcttcttaagattgatactattaatactctttcattattatgaaattaccctttttatcttttggagtatattttttctttcagtgtgccctcaccatagctgtaccagagtatcttttaaccttattttgctttttaaacttccactatctatttttatatttaaaatatgtctcctttaagtagaaatgggtttctgtatgtagcccaacaatctttttctgacaactaaagtatttaaatatatatagcaattacttatattttggggtttatgtaatcttgccatttattttctgtttcgtctgttctttgctccatattacattatttagtttttaaataacattattattatttgttttttagacaggttctcactctgtcactcaagctggagttcagtggtgtgatcactgctcactgcagcctcaacctcctggactcaagcaatcctcctgcttcagcctcccaagtaactaaaactacagaagtgtttcaccacactcagctaattttttaattcttttgcagcaatggggtcccactatgttgcccagtatggtcttcaacctctgggctcaggcaattctccacctaggcctgtcaaagtgttgggattacaggtgtgagcccctctgcctggccttttagtcttttattgtttttaatgtttaccatatatattataatatgcatccttcactgattagaatatacttttattactttcacacttcctgatcaatgaaagtgcctgaaaagttccactctgatttcttgcactatcaataatatggatattaattttacatataatttgaacatgtattattattgttgttattattatgttctaacatttaatatttggttttgatatgctctgatgtttctccttccttgtgctttgtatccttcctttattattatgctttgttcagggattattttctttctgcctagataattatctttggcattttatttagaaaaagtattatgacctcagcttctctgaacttcttgtttcaccccccaaaaagaaaaacaaataaaaaaaggcctttatttagccttcatttttgaaggagatcattttctaaatatagattcaggcattttctttcagcgctgtaagtgttctctgtctcccattgttttatttcaaaagtcagctcttaatcatattattactcatttgaaactaatgtgtcttttatttgcatgcttttaagattgtcatttggctttagtttttagcagttttatataataggtgttattattttgtttttagctgggctgtgattcatagagcttcttgaatggctccaaagacttgatgcttttcattagttttgggaaattcttagccaacatttcttctcatacttctatttttttcctctgtcatttctcctttttggaatccagttacaaatacatgaacctttttttcaattatgttccacatagctcttattttatatttcatttaatttacttgcttgcttcaaactgtatattttgtatgtgtataagtatgtgaatctattggtaaatactttatttcttctactgtggttaatcattaatctactattaaagtcatctatatcttaatttcagtattttgtaagatccctgatttctatttgatttttaaattaaattccaattctctgatgaaaatattccatctttgtatttatttttggaacatattaagtttagtcctgatacctcagatattttgattttctgctgctctacttttaagtttttctcttacatttctcagtcatttggttctattctctggcatatctgataaattttgactgaatcccaaatgtatatgaaaaattgctggcattctcaatgatatctttcttcttgggggctactaaaatacatgcagattaccttgtttcagcagaggatattctgtttctagtttgcttctcactctatagttgttgccttttcagggatccaactaaaggcctgagatttttgtaagtccatctttttcctcttttttttttttttttttgtagaaatggggtttcactatgttgctatgttgcccaggctggttttaaactcctgggctccagcaatcctcccgctttggcctcccaaagtgctaggatctcaggcatgagccactgcaccctaagtcccttgttttgtaatgatcctacattctaattttcatcttccccgcaccaaaatactgccaaactatctgcctaaacttttagtatctcagcagttgatttctgcttgaattcttagacatatgttcttcaaatgcaaattttagcattcagctagtgcctcaaggggaaattttccacagaatgttatgcccatttctctaaagttcccttttactttggagatcttgatccttcaaactcttactgatttgcttgccatgcctgccaataattgttttcttagcctactcagatagtcctaaactccagagactctctttttgatatctatgcactgtttttatttttttacttattagacatttttccctatttcacagctgtaccctcttccacaatttgtttagacaaaaataatatttttttcaagataagactatcaaatggagtttatgtaaggtaacattaaaagtggaccaacgatcttattttctttttactcattaatttatcttatccatgaacaaatacatttaggctatagattggctctatcaattattttctttaacttttgtagtagattttctttctcttttctagtttcatgcttagagagccttagtgcataaaggtctctaaaaggaattaagaccttctggaaatatgattaaaaggtcttccttttgttttacaccatgtatcattcccaatataacataatgttcgctctgcttagaccttgtgctttacatttctcagaatgagataatccacagcctaaatgcatatagctataaagtattatgtgaattgtcaaaggaggtatgcattttttcatgatattctgaattaatcaccaaatacgtttataaaaggctatgggaattacagttaccctaatgcttctgaattgcaaatattccttatttctgttttgattactgttgtctttaattgagtatgactattttatgtgtacggtttagtaacatagctgtttgggctctctttgtctcttttgcaatgaacattgcaaagcagctgttacaagcatatatttagagccaaagggtactctggcttacatatgggaggggtgagggaaggataattgaatcacaaaatgcttgtgttaaaatatgctctgagaaacaatggaaacaggaaaacaatgccagaatggtgtccacagtgaagagaacaaagcctgactctaaacagaggttgctaaacaaatcagtccctatgcaattagatggaaaagcacttagcaacaatataaaaatgacagactagctgaaaatcagcacaatagaagatgactcagactctctaaagtttacatactttagaacattactttcaattccacatagagttagttcacttgcgacttcatgatatggaaatgaaagtgatgataaaaaagaaataatttctgcattacaaacataaagtcaatactaatttgacttttattaaagaaactcaaatccttcataattaattcctactgaaattttgcccaaaatcatacagactttatagtttagctttttttgtaggtataaaattgacatattaagatttctgaacttttgcccagcatttctagttctcttattctttttaaaacttcatattttagatagcaggcctccctggcatctgaaacagcatgattaagtatgaatatacatgtctttacctccctataaaagactattctgtatgacctgtacatttctcttggtgtaacactattgcttcaattttataggctcacacctatgagttttcagtctgccaaaccctcctggtgtgtgtgtgtgtgtgtgtgcgcgcgtgtgtgtgtgtactgtcatactctaaggagaatgtgtcttaacaactggagggtttgtttaatctgacctctttgaagatttgaatatgaaagtttgggatcaaagtttaaagtggagcaaattactctgcataaaattggaagttaatgaattgggggtaagagtcagtgagagagattgagagaagccattaaggctggatgctacataagagaacttgtatgtgagctctgggttacactaaagaaaaatacagaagtatatcaaggaaatagaagtaacataaaatcacagattgcaatcttcatatcagccaagtaaaattcaattaaaaaatgatgaaacctaaaatttaggccatgtttaaacactaaaagtcataatttacaataaagacataaagatttaataattatgtatatgtaagttatttgtctctttatctctatttattatctatctatctatctatctatctatcatctatcatcgatctatgccaagtagcaaaatacccacttttataaagtggaaactacagaggataaagaagacatagacagggacaaagaaatgcaagggagtgcaataatcactgaaagtcaattttttcagatacgtggtaggacttttcaatatagaaattaaagttctctgttattttttacattttctttgtttgggttaaaggagactttcattcattgctctatgtacaagtcacatcaagaggaaaagaaaataaagttatagggggaaaaatcaccttttcagtactctctaaactcttaaaatgtactgtctgctatggtttgaatgttttccccaatgcaacagtgttgggaggtggagcctcatgggaggtgtttaggtcatgaggtctctgatcttatagatgaatttatgcccctataaaaagggcttgctggagtggatttgctctctcttgctcttctgccacgtgaggacacaaagttcctctcttccagagaattcagggttaaaggcaccactttggaagtggagaccaggccctcaccagacaccaaaatctgctggtgctttgttcttagacttcccagctccagaactgttagaaataaatttctggcccggtgtggtggctcatgcctgtaatcccagcactttgggaggctgaggcgggtggatcacgaggtcaggagttcgagatcaggctggccaacatggtgaaaccccgtctctactaaatacaaaaaaaattagctgggcgtggtggtgcacccctgtaatcctagctactcaggaggctgaggcaggataattgcttgaacccagaaggcggaggttgcagtgagctgagatcgcgccactacactccagcctgggggagggagtaagactctgtctcaggaaaaaaaaaaaaagaaagaaattcctattcggtataatttaccagtctgtgatagtctgttatagctgcgagaatagactaaaacagtgtctttccataatctagtacttattgtttcttgcctgtctttccctcctaacaacatgtacttcctgccatatccctagcacttacaacagcatctggcatacaatatttgctgaataaacatctgttgagagactgaacaactgaaggaatgaatcctgtctggcactcaagttttagtctccatccaaaataaatatgttttttgatttattatttcttcaattcttgtttattttccataagtttttttctttctcaaaacttcttttaaaaaaacttcttttttaaaaaaaaaattggaaaaaagaaccattcgtgctgcatcttctctctcttacttcccaggaggaagagaagaatgatcatcaatggcaaaaagcagttgcagcaaagcaaaaccaagagccagctttaagctcaggagagagcgctacatctcctcctcttggtttctggtgctctccaggttcagagacacttttctagtaataaactgaaaaaagatcactgaaagtatcatctttctgagacttctttaatcagatattttgtctggtcattctattcccaaattatcttccatttctcataatttaaaactttgttttattttttactctatattataatacccagattatatttcatcttctaaagctctaattaccttttttattcttgtacaatttaaattcataaagtataatttgtttggtttatttatgtgcttgactctacctagttgctgtgtatgtgtagtttatctcctacatattctatgacagttttattaaaagtttcttcatattatttcattagctgtgcatctgtgggataacatatcctggtaattttattttgttaattttctttaaaacataaaatattatgcattacacactgatttatttaaaagaaaaagattaagatcagtttgacaattttaggaagatcattttggcaatctagaatttttgtttattattagtttttttaaaatttagtaataatttattacaaagcactttgctactaccggggtgacactacaacagtaaataaaaagtttgacttctactagaggatgtacatcatacattacatggaaatcagttcccactatgtctggtccatgcagggtgagcctcaacaagaattagcaattgcagaatttataattgcagaatttataatgttcagcaataacaaattaaaaggtgttgtgtttgagggcaaagacttaagcatttagatttagtaaagctgaattcccaaattaggaaaaaaaatctgattttaagagtttggactcctgaagagatttgtcccacttccggtcacactgatttgctcactttattttgtgacttactggcttagcttgttttcttctatattgctttccttataacaacaatagagagaaaatgggatacattccatatttgttattgtcagaaccccagtggtttagatgtgattgatgaataagatacacgaagttacaacaaagcattgaataatgtgtagttaaaatccagcaggctttataaacaggcacatgtaaatcatttcagcaattttccctcttgtttatgccaattagttcccacataaatgtctacatgtttgaagctattttaaattgattcagcatttttctctcaaaattgcagatatcaaatatctagcatttaaatgctgctttagcctgagactagaagtgagctgcaatgcaactgtaaacacattttgaatgagtggttttgattttatctaccttcatagtttattagttttataatgacatgaagacacagaatacttatcaaaataaggattattttttctgttaaccaaaatgtaaacaattaggtgagttaagttctgggtgcactagctgtgcttctgctttactagtgtctttaaaaagacagaatactgataattttgtacctgtgctactattacagcctgctaaagaagaatagtggacatgatgttctgaaatcactttctggtcattaggttactgagattatatcactcagtgagagccttttcttaacaaggagaaagaactatgtccagagtttatagtgtcttccaaccatgcactgagacaattttcaatgactaattatagcttgagggagcaggaaaaggctaccagaaaaaaaaaaaaaatccatcagaggagttaatttgtagaaagaaggaggagtgcagtttcaaagcaattttgtaaattccaagtgtaactacttgcattcttcaaaacaatttccatcctactgactttaatgataggtcattggtatagaagagataaaacgttcatttcataactgcagtgcctatgtttgtataaggtgtgcccaggaaaaagtcaactagtttttttagaaatttattggaggaatatttgaaatattaaaggctatagtctatatagtcaattcatattataactaaagtctcactccctagttaggcttcagtgttctcacattggcaatcttttattgattattctgaaactttgaaaaaaaaaaaacaactagatagcccccactctaatttttaaatactttcttgaaattataaaattttgctgcatgtttcttgtagtaaaatacattttatagatttgtttaacttacagattttagtggcaccaaaaatttaaaaatataaagtagacttaatcttgccaaatgatgactgaggaatggaatgaaaacaagtgtatacctaaatcctttggctacatttaagttacttttagtaataaagatgtaatgaaaatgaagcaacagccaggcacagtggctcatgcctgcaataccagaactttgggaggctgaggcgggtggatcacctgaggtcaggagttcgagaccatcttgaccaacatggagataccccatctctactaaaaacacaaaattagccatgtatggtgacgcatgcctgtaatcccggctactcaggaggctgaggcagaagaatcgcttgaacctgggaggcggaggttgcggtgagctgagatcatgccattgcactccagcctgggcaacaagagcgaaactccatctcaaaacaaatacataaataagaaaatgaagcaacatatatatcattccaaagctgaagccaaaatcttatcctgaaattagataattattgtcagcaaaattagccataatgatctcatctaataacttacctgatttacatgcaaagccagaataatatcaagaattcagtcacctatcacacagagcacttcatgtgttttacttgaatagcttggtctttctctttcagccatgagtgccagagtgatattttatgcttgtatgaaagaaatacttcaaaaataagaaaaaaactataggataatatgaacacttatggaatagaaagaaggatgacatcacaacaaaataaagcaaaataaatggaggaacacatttggggcagtgaaaaattagaattttctgtggttgaggaagcaggagctgtagagtaaagttgggttgcccagtgagattaaaaaataaaagggctcaaaaaactggtgaagacttgaagaagaaccatccagggattttaagagtgaataaagagataaaatcaatatttaaaaacagttggtgtgataaacagatggaaaggttagaattaaacctggaaaattaaatggctcttaaagaattcaaagtaaatagtggtggggcttctatccagagtgatggcataactaattggaaataagctagagaaaaaaaactttaaaagaaaaaaaaggtaaatatttgatgtctactgcctcagaaacgactgtgatatccatggcactgaagcctggagggagtatgataccatgataaccacaggaaaatgtaggggttaggaggaatggcttaggctgaagtcatgttaaggacaatgagcagttgttaagtcagagatgtgggattcatttatagagaatatacacaagagcagaaaggtaaaaaggtggatattctatactgcattcaattgtttattgattatcaatctattaaccaggcatagtctgaaatactgatacatgtttttttttcaaaacacatattgcaaaagttagttttctattccaagatctctcagttcttttctctaataataacacatttatgtagccaataccgattttttaaaaggacaaacattcaaattttaacctagtccaatttttctaattcatgtgtgaagattttatgaagctctgagttaaaattttcaaaaactagattatttatataaaaattgaaaaactgcctaatggttatcattttacctgtaactcaatcaaagtgttaaccaaatttggactgtggtgaagaattgccagtgaacagtgggtgggatgagaaaggtagctaatttgttttcaaatcacttagattaaaattaatattgctttgccagcataggcctaaacatatgagaattcatttaggaattcagcaattgcaaataagtataatttgctgaacagttctatttacccctgaattctaataagacccattatcataatttatcatttaggaaagcatagtgaagttaaaaaaaaaaaacctttctgactagtcagtgactttacagaaagaagtgttagaatgattatatgtgggagaaggtatccttgcatcagtgcatggttccctttaagggagtaatcattaattatttatataagacaagaagttactctaatagcttgtcaaagtgttgctggtcagaatcatagtgtcttgaaatagcagtttaaaaacaattattattattgttattactatttttacctctgggagcctttattgaatcaaagtgcattttgaaacagacaacattcttgctgctgttaagacaacattctggtgtgcttatagcttggtttctttgatgctcccacccatttttccctccccctcttcttttaggactcagttacttctggactttctaacagaaggaccattctaatatgaaaacatttcattttaggaatacccacattgtaggagtgacacttttttgtgtccattgattgatagaccaattatcaagaggtttcaggctagaaacctcttactactctagggaaaggccctgctggtgaatgttttcatgaacagtaactagctgcatccatctgatttcttatccatgaagatacttggctacacgtgatcgtcctgtaataattgtggtagactgaataatggccccaaagacatctacaggcataccctgtttcattgcacttcacttttttgtgctttgcaggtactgtgatttttacaaactgaaggtttgtggcaaccctacattgtgcaagtctattgatgcactttttccaacagcaagtgctccctttgtgtctttgtgtcacttggtaattattacaatatatcaactttgaaaattattattattatatttgctatggtgatatgtgatcagtgatctttgttgttaccactgaaatcattctggggaaccacaaacaatgctgatataagatggcagactcgatcaacaagtggtgtgtgtgttctgacagctccactgactggtcatttctccatctctctccctctgcttgggtctctctatttcctgaggcacagcaatattgaaattaggccaatttataatactacaatggcttttaagtgtttcagtaaaagaaagggtttcacatctctcactttaaatcgaaagctagaaatgattaaacttagtgaggaaggcatgtcaaaagctgagataggcagaaatctaagcctcttgtgccagttagccaagatgtgaatgcaaaggtaagtccttgaaaaaaatgcaaagtgctactccagtggacacacgaatggtaagaaggtgaaagaccctcattgctgacatggagaaagtttcagtggtctggatagaagattaaaccaactgcaacattgccttaagccaaagcttcatctagagaatggccttaatgctcttctattctatgaagagagggaaggaagctgcgaagaaaagtttaaagctagaagaggttggatcatgaggtttaaggaaagaagtcttttctataaagtcttctttcactttgcacataaaattgcaaggtgaagcaccaagtgctgatgtagatgttgcagcaagatctagctaagatgattaatgaatgtggctacactcaataacaaattttcaacgtagattaaacagccttctactgtgttggaagaaaatgccatctagaactttcatagctaaagaggaggcaccaattcctggtttcagagcttaaaatgtaagctgattctcttgtgaggggctaatacagctggtgactttaggttgaagccaatgctcatttaccgttctaaaaatattaagatgcttaaggtttatcttaaatctactctgcctgtgctatataaatgaaacaacaaagcctgatgacagcacatctgtttacagcagggtttactgaatattttaagctccctgtggagagctactgctcagaaaagaggtttctttcaaaatatactgctcattgacaatgcacctagtcacccaagagctttgatggagatgtgcaagattactcttgttgtcatgcttgctgacacaacatacattaggtagcccgtggatgaaggagtcattctgactttcaagtcttatatttaaaaaatacattttgtaaggctacagctgccatagatagttatttctctcatggatctggcaaagtaaattgaggaaaggagtcgctcttctaggtgccattaagagcattcataattcatgaaaggagatcaaaatattaacattaacaggagtttggaagaaattgattctaaccctcatggatgacttcgaggagttcaagacttcagcagaagaagtaactgctaataaacattagcagaatggaaacagcaagagaactagaattagaagcagaggctgaagatgtgactgaattgctacgattacatgagaaaaaaattaatgtaaaaggagttgctttttatgaatgagagtaaaaaagtgtttttttgagatggagtctactcctggtgaagataatttaagcattgttgaaatgacaaaaaaaattataatattacataaacttagttgataaagtagtggtggggtttgaaaggattgactctaattttgaaagaagttccactgtgggtgaaattctatcaaacagcatggtatgctacagagaaatattttgtgaaaggaagagtcaattgatgtggtaatctccattgaagtcttattttaagaaattgccacagccaccttagccttcatcaaccaccaccctgatcagtcatcagccatcaacatctgaggcaggactctccaccagcaaaaacgctacaacctgctgaagactcagaagatttttggcatttttttgcaataaagtatttttaattaagatatgtacattgttcttttagacataatgctattacacatttaatagactacaatatattgtatatatgttttataattactgggaaacaaaaatatatgtgatttgctttgttgtgacgttattgttattgtctggaagctaacccaaaatatatttggggtatgcctgtacaatcctattctctggaacctgtaaatgttgacttacatgacaaaagggattttttcagatgtgattaagttgaagatcttgagagaaagagattatcatggataatcagggaaggacctaaatataatgactgtcttctatgaaaagggagacagtaaaatacatgattagagagaggagagagaggcaatgtaattatagaagcaaaaggttgcacaggtgcaaaaaaggcgtcatgggcgatggaatgtaggtagcctccagaagctaaaaaaaggcaaggggagaaatcttctcttagttcctccagaaggagctaacctctcaaacaccttcacattagctcaatgaagataatttcagcctcctgaactgaaagagaatacatttatgttgttctaagccatgaaggtgttggtagctggttatagcagccataggaaactaatgcatatgctaatcatgtaatgataaaactagtaagcatgcaatgtttatacaggaaaaagccttcctataaggaatggtagtatatttcactagtagagtactttacagattttagagttcttttaaattattactcccatttgattctcaaaacaattctataagtaagcaggaaagatattattataatacctattttactaatgaagaaattgaagctaagggagcttacatgtcttgtggtaaaaaaaagttatttgactctttgcctagtaatttcttctctatagggtcctgtttctttaaaaaggagctcagaaaagcatctgtaaccagctatatagaccacatttctttaaggaaggcaaatacttttctggtccatagtcagacgcattatccattgcaacactggcctgtgcttgcaaatgttttcttaaactggataaatagaaaattcatcatggaaagacaaccttctaccttaaattcatgttaagcagaagtttattgattggtagatgcaagatcctctctacacaagaaagaattaagcagaatattcatatgaatttatattacttaatatggggtatgccattgaaaggagttagcaagcttgctttaggcaaacagtaaggaaagggtcctggagagcctttgacctgccctgtaggtgcttgcaccagatgttttgtgcagataaaggaacttgcaaagggggcttgcctaaacgtacagactaagggcccacatacaactaggggaatgggatggagccaccagcaattcatgccttatataaatagggaacccaccttcatcagcttgtatgtaaaggcccttgtattcaactctgaagggggcaaccagcaacctgctattagaacccctctttttgctgagagctttccttttcacttaataaattctactccactcattttttcaatgtccgcatgcttattcttcctggtcatgagacaagaacctggacgtagctgagctaaggcacaaaaaacctgcatcattttgggggctcatctgggatacctggtgggtgagtaaatgcagtcccacagcctttcactttcatttctgagccttcttgtcctcagacttttcctgaaggcagatgcagcactgaacctctggtgagccaattaggaatgaatggcacagctacagaggacaggatgcaggagaggaccatgacacgcccacccccgtcatcctctggggttgggaatgtcggtctcgtcccaatccagtcttttctatggcgttttacttctttttttcagtactgtcacggcacctatctcttcttttgtaatgttaagggtgttgctgcaaactgcggagatattactaggtagaatgagcctttgacccagccatcagacatgcaattcagaataatgcgatttccttctgttcttagaggtgtcgcccacccccatcctgatggacatgtggggtgggaatgagctgtggctgccacctgggcccgggccccaggacagcctcggtagccaagggccccatgtggccagctggccagtgtttcctgcttaccatccccccgacgccatgcaccaacagagtctttcctcccgtggccaagccaggaagagggtacaatgattgaaagtttctctccctgttggaggaacccatttgcatagagctagaggattttccctcaggcatcttccctgccctgcccttaagctgttttttttttttttcttttccccacactgtcaggagttaccttttatgcaagaggtttttttttttcctttggaagacatcttattaggccagtaccccaattcacaagacatccttttctctcccttgtttgaggaggactcagctccatagctttaccttagcatgactaagtcctgctgaatttcatggatagaggaggtcatggtagcattcatggatagaggatgctcccacttcatggatagaggtcatgctagcattcatggcatagacaaggtctagggaactcaaaggctactgacagcattgggaaaaggccacatgtggataagtgtggataattcccaccccctcggccccctgttaatgtgggtgaaaacctctgttttccttatgaaaccccaggaattgaaagcagaaagatccctctcaaaacctttagggttcctaacctgtggtaagtaaagaatgttactttctaataggcccaggagacccatgttcttgagacctcaagaaaagaggaatttactcaactcataggtatttgaggctaccaacccatggctggcctcagctgtaaaaggtcttatctgagattccgtggggaacagggtgtcattaaagccgatttaaaggcctgtgtgaaaaacaattactcatgctgcactttacgcaaataatcaggccaagtataagactaaggtttattttacaagcaacttagtcctatcatgatttgtttttgacaaaaatggggactagagagagaaaaattatgtttcaatgcttaccatatacttgttattaaattctcgtctcatctgttgtttttaggtttttgcctacattctagactaaccctgtttatccccgtgaaccaaccagtgatctctggctgtatctcagaagaaacagacagatgggtaatataaagatctagatcaatagtctagttctggacaattatcctgcaaagcctgcaaggtggtaagaataaatggggtgcccataacccagaagtttctttgttatggaaaataagaccaagggagctaaccagagccaagccccatgcccccacatcttggcaggcataactatagccaccagttttctgggcatttcagcagccttggggtttttttgagctgcccttacccccttgtttcattttgatgtgcatcttctaataaccctaattgtttattcttgcttagcggccattaaacttcaaatggtgttgctaatggaaccaggtatgaatgtgtcatttttctggagacccttaaagtgacctcaagaggagccctaactgccgctttcctaaaacagtgccccctgtcagcaggaagcagttaagagctgtcattgaccactttccccaccagcagttggggtatccactcctcaagcggggaatgaaaggcattagccaccttgctttaggtagacagtaagggaagggtcccggagagcctctgacccaccccacaggtgcttgtaccagatgttttgtgcagataagggaacttgcaaagggggcttgattaaacatgccagcagccgactaagggcccacatgcacactgggggaatagggtggaggcaccaggaattttcaccttatacaaataaagaagtcagccccatcagtccgtatgtaaaagcccctgtattcagctgtgaacagggcaccagcaacctgcttttagggcccctctttttgctgagagctttcctttcctaataaatttcactccactcactcttcgacatctgcatgcctatttcttcctggttgtgagagaagaacctggaactagctgagctaaggagcaaaaatcctgcatcacaacttagcatagaacatagtgaatcctaaaatgaaaccagaaatattttagaaaataataatcttaaatatatagacagctaaatagaataaaaaactaaaataaaaagtataccacaaatgtgaaagtgatggtttcatatttctaaagatcacccaaggagacagtttagaaattaaaatgaaaagtacatttttagaatgtattaaagatattataactatgtccagctttattttcatgctgtgtctgcaatctccactaggatgacaatatgcctataaccaagaattttctcattttccatggtcaacattataattactgtaaaggcaaacagcatggctgagtacaaagtacattcaacaggtaaagcatacagtataaagtctatactgtagctatgcaaatgccatcatcctcaaaagcacaagtaaatattgattaagaactttaagcactttgaaggttgctggagcaaaatgaatacgtttagaagtttttagagattgttttgactctattgggttcctggaactgagttattcaatacttctgaaagaagggggcaacatattagatagcagaaagtggttcaagaccacacctcagagaaactttaaaaaaatgaaggattaagaaagtcattatttgatatttttaaaaataaataacctcagtagaaatccattttaattttaacctttatattactaactagaactcatcttttattctatttcctttcatataattcagatctgccctagtacgtcactgaagagagactaaagaaaaaattgtctaatttcataggacattatagatcctgtgagtcttctaaggtacctccctgcttgctagggcataggaatttgcacatgggaatctacagtcttttatgccaagaaacaattcccagaaatcatttccttctcaagtggctttctggcctccctggagctcaacacagtttttagggctcaaggtccctctttctatttattttctgctcccatcatttctttatttttccttcctgaccaagatgtttttttttttcttttttattacaggaacaaaaagacatattattttctgcctgttccttgtgggaaaaaattcaaattttctaaattttataagggctgcaatttccgaaatattcttccattcattcaggaagtacttgaatatctactaaatgccaaccactcttttctggatgtttagcagtaagcaaaaacaaagttatgcttgtggaaagaaacaaaaaaaataagcaatttaaaaaataaatataaaccatattctgagaatgctaatttttgcattttgtaaggggataaatggagaaatgctcactaaaaaagtgacatttgaggagatacatgagtgaaatacagaatttggaaagaaaaattagtaactgcaacatccttgatacaggctggagttggctagctttattcaggattatcaagaaggccaatataattggagccgagagggcaaagggaggaaggaatagttatataataaaaaccaatgtggacttccagccttttttgtctaccttcacccctttccagagtcagcacagaggtggctatggaaaaagagaaaaaaaatcttcaataaaaacggaaagtaaaaagagtggaaactaatatctcaaatgttttctaaactaacaaagattccacagaatttcagactttggacaaatgttatcattcttattagatggtcattcttggaattgtttctgcttagaattatctgaaaatggcactgcttgcagttccctcccagttgattcatatcatgtacttgttgcaatgttagtcatccaggaattttatcctaattatatctgctgctcctttgattgcaatgaatttaattcaccttacctattaacttacttaaactcttttagtattgttaagccattcacaataagctaaaaggaagctaaaggtttgtttatgttctttagtctatgcttaaaataacacatagacttttgcagggtccacaaaactattgtacaaaagtgcacaatataaaattctttaagaatttgggcagtgtttatccaaatatttgtgaaatgcaaagacattatactttcttgtctttcagtgaattcacataaacattattaggccacccctttaattcatgcattattgacaatgtggttgatactggttgaagaaacagtcattgaggaatactaaaaattgtcctttgatctaaaacctaaaatatcagtcattgtcaaagcttattttaaaatttcttgctattactggtgataaagttctacatttaagaaaaattatttgtacctcacttgaaaagaaataacttttgtaagtgtaaatttaggatggttaccaaaaaataaacttcacatactctaatagtggaataagcttcagaaccatttataaaaatgactaatgcagcattatcaagacttagctacatgttcacttgttattgtataactctcaggagcatgcatggagctttgtctggcatttaattaagcccattttatgtctgtcatgaaagaatactggcttgaaaaaatgattatgaaaagtcatgctcaaccctacgttcaaagaatgatgcacgcaaagctacaaacaaatgtatgcccagaaatggccagaaaatgttattggggttgtacagaaatgagttgaactgacataaaaaattaacaatagtcactgatatgttaacagatgctaaaagccacatttgcttgggtagtttacccatagttttaaaatgtttaaataaaatgttttataaatgcaaattatacatttattgagaacttggagcttaatcagcagtttgaaactttgatcactccaaattatcagaatagaataaggaacagaagctagtctctgcttctttataacctggtcagctgtgtaaacatatagaaaaaagaatagtatgaaccgagtgagagataatatttatcaactctacatttttcagagctccaacaaattccagcaggcccagtgtagagccagagccaaggacaccatagaaaatagttggcagcaaagacaccaaagaaaatagttggcagcaaagacaccaaagaaaatagttggcagcaaagccaggcaaaggaaacaaattagaaaatggtagcctaccttatttgaaaccagggtaagcctgacacagaatattgtatacaaattataatttttccacctcaggaaggatatgtttaaaaattcaaacaggtggagaagcttctatcaagtaataaaagattaacacctttagattttagtgacagattaagatgaactagtgagctttcagtcttctctttactcactttctcatcgctgactagagctctctttccaaaccacaaatctgcttttgcccatctattagccatttaggaacttttgaattcctatgagataaagcctactttcttcaacatgccatgtcaggtccaccacaattaagctgcaaggtaaggttttacctgtaattccactcatattcgatcccctcacgtttagtctattcaggaatatccattattcccccaaaactccttgaaattttactatgctattattccctctcgcagaacaccttctttctccgttcccttcccttcccttcccttcccttcccttcccttcccttcccttcccttcccttcccttcccttcccttcccttcccttcctttcccttccctttctccctttctctctctctttctctctttctctttctttctttgctgtctttctctctttctttcttagacggagtctcggtctatctcccaggctcaagtgcagtcatgccatctcagctcactgcaacctctgccccctgggttcaagcaattctcctgcctcagcctcccgagtagctgggattacaggtgtgcgccactatacccggctaatttttgtacttttagtagagacagggtttccccatgttaaccaggctggtctcgaactcctgacctcaagttatctgcctgcctcggcctcccaagttgctggaattacaggagtgagctactgcgcccagccccttttctaccagttagactttagcacctcattcaacaccaaatgacattgtgtcaggagagtaagtgttctccctagtcttcacctatattaacaaccttactttttctgtagcaatatttattctctgcgttgtccatattaacaggaccacacttttcccatagtagccatgtacccctcttaagaaaaaagagacattgcccagactcttttataattatgtgtggcccagaatagacaatgagatataagtggaagtcatctggggggactttcagggtctttttacctttcctttcctttgtgacttaccttaccttaccttacctttcctttgtgactacaaagcaaggtcacatgctgaggagagtaggataaaaatacatagaatctagttccctggtgtcattttaagatgctgcacttctagatttcttgttacatattaaagttaattctctcatttgtttgagatgtttctcagttatattttgtgttactccagaattataattatttgtttgcattttagtctcctccacaggagcataaattcatagaaatgtgttcatctttgtttccacaaagtataatatctagcacaaagtaggtggtaatttatgagtagtggcaatttgattgctgctattaaaaactttattgcatgaaaaggacatttatgtctctgaccagaaatagactggtaaaagttttaataaatgtatggaacatgggttaataacaggtgattgatggtagaactgttgctgtagggcattataggcaacttttgtaacatcataaggaagtcaactgctaactgtcattggagccattataagtctcagaataaggaatagaaagtacaacttttacatgacctagtatgacatgttctctttttaatgaaaaaaaaatccatggaaagaaaactgtgatgttgaaagactctcaaaagagaatctttcagaagtaaaagacagaaaataattttgcagcaaaaaacatttcatgccaagaatcacaatcacattcataatttggagtctgggtcttccaagaagctggagaacctgtgcttccctctttcttctgctaatttcaactaataaccctggatattatgtgcaaaataagaagacaaaaaccctgctattatatagataagaagactgtgaaatatagcaagaagaaggcagacaggttgatgacacccaaagaatgacacgatgggcttatttttacctcatatatcccacacatggagctaaagaagctggcaacctcaagataccagtcggcacagacaactcctccctcccctccaaaaaaattttgctctcttaagccaaaggataaggaaagtggaagcctaacaagacagaagattttagaaaataacagctatatggctgggcgtggtggctcacgcctgtaatcccagcactttgggaggctgaggtgggtggatcatgaagtcaggagttcgagaccatcctggccaacatggtgaaaccctgtctctactaaaaatataaaaagtagctgggcatggtggtgtgtgcctgtagtcccagctactcaggaggcagaggcaggagaatcacttgaacccaggaggcggaggttgcagtgagctgagatcgtgccattgcactccagcctgggtgacagagtgagactctgtctcgaaaaataaaataacagctacattttagttatttatcacataaattactgtggcctgagtccagcccacaccagccaaccaagccagaatcctgggctttcaccatcaccaggtggtaatgacaaacgccccccatttcccccaccctccacaaaagtcatatcaaagaaagacatctttcctctctgagtaacagcaagtccctgtagtgtcagtggagaccaggtgggaaagctggatgtccactccaactcaacagtaataaggcatcctcccacatgttcgagtgatgtcagaagaccaggggagagtcaggacttttaacacttctcagtggtaatgagatcaaccccctaccccaagtgtcagtggggaccacatgggaaacaggaaataggcactcctacgcctcccagcgagggaggtatcatacgtttctagtgggggctggtcatcccaactccatccgtctccaaacattttatatatatatatatatatatttaaattttcattttagatttgagggtacatgtgaaggttagttacatagataaacatgtgacatgagggttggttgtgcatattagcatatcacccaggtattcaactcagtaaccagtagttatcttttctgcttcccctcttcctcccacccttccccctgaggtaaatcccagtgtctgttgtttccttctttgtgttcataagttcttatcatttagctctcttccaaacactttaaaacctaaccacatgcttctaaataatctatgcataaaacagatagcctcaagaaaaataaaaaaatatacattgccttgctagaaggaatataaaaatgtagtccaaaaaattgtaggacatacctaaagtagtgctgagataaaatttatagcagtagatgcatacgtaaaagaagaaaagtctcagccgggcgcggtggctcaagcctgtaatcccagcagtttgggagcctaacgcgggcagatcacctgaggtcaggagttcgagaccagccaggccagcatggtgaaaccctgtctctactaaaaaaatacaaaaattagccggtctacgtggcataagcctgtaatcgcagctactcgggaagctgaggtaggagaattgcttgaacccaggaggtggaggttacggtgacctgagactgtgacactgcactccagcctgggcaacagcgtgagactccatctcaaaaaaaataataaaagtctgaaattaataatttaaacttccaccacaagaagatataaaaagaaaagcaaaataaacataagacacatataaaaagtaagtaggaatgtgggctggaagaaaatgggtatgcctgtagaagagaaaataataaagataagagcagaaatcaacgaaattgataatggaaaaataatagagaaaatcagtgaaccaaacatctggttcttcaaaatgattgatgaagctgaaaaacctaacacaagactgtaaaagaaaaaaagagaagacacaaattatcaatacaaaaaataaaatagatcctgccaaaatcaaaatgataacaagagaatatggcaaacaactctacaaacataaattttaaaactttgaagaaatgtgtcaattcctcaaaattaaactaccacaattcacccaatatgaaatagataatttgaatagacttatatttctatatctcttaagtaatttaattcataatttaaaacttccccaaaatagtttccaggcccagattatttcactgaagaactcaattcaacatttaaagaataacttacatcaattctacactccatcttccagaaaatagaaaaggaaggaaaacttgtcattcatttttgaagctagtattgccctgatgccaaaaccaaagaaaagcaatataaaataaaaaacgatagaccaaaatctatcattaatatagatacaaaatgttttagcaagatgttagcaaatagaattctacagtatattaagaaaaatacatcattaccaactaaggtttattccgtgaatgcaagactggtgccataattgaatatcagtcaatataacctattatttcagcaagctaaagtagaaaatcacataatatctaccagcagagtaaaaggatttcataaattttaacatcaataataatttaaataatttcagaaaaatagaactatttgggaatagaaaggaacttcctcaacttggtaaaaagcattaatcgtaaaacttacaactgacattatacttaatggtgaaacactgaatgcttttttacaaagggtgagaacaagacaaagatgtttgcttcactgctcattcggcatgctgctgcaagttctagccagtgcagtaaggcaaaaagaaaagatagaagaaaatagaaagcatacagataataaaggaagaaataaaactatccctctttgaagaagacgtgatggattgtctatatagggaatcccaagtaatctaccaaaaaacacctacaactaataaattaattcaataaacatgcaaaaggtaactttatttctaaatattagcaatgtctacatgaatataagaattaaaaatacaataccatttagagttgttgaaaatataagaagcactcaagtgtaaatctatcaatgcatataaggagattgtatgctgaaaattacaaaatgctgatgaaagaaaaggagatcaaaattaatttagatatatgccattttcatggactagaagactaaataaacatagtaaagatattgatcgcattaaattgatgtagaggtttaacataacacctctcaaaacccaagcaagaattttgtagatatagaaaaacatcactctaaaatttgcatggaaaatcaaaggaatcagaacagccaagataattttgtggaagaataatgaagtgggaactactctagttcataatttatatagctacagtaataaagattgtgttgtcttgtcatagagatacatacgtagatcaatggaaaagaatgaacccacacaaatatgaccaactgattctgtaaaagtgcaagagttattcactagaaaagagataaccatttaaataaatgaataattggtgctagagcaactggacatccatagacagaaaaataaaatctcacactcttaagaatattaactcaaaatccttcatggacttcaaagtaaaacataaagctataaaacttttagagaaaaacatatgagaaaatcttggcatctagattgaaaacaagttcattagaatttacaaaaataacacactacattaaaaaaatgataaactgaacttcatcaaaacaaaacaaaaacttttgatttgtaagagatcaagaggatacaaatacaagcccaagcaacaaagtgagagaaaatattatcaactatttatcccaaaaaggactaatgtctagaatatataaagaactctcaaaacttgacattataaatcaaataatccaattagaaaattggcaaaagccaagaactatttcattaaagagaatatagagatggccgataagcatatgaaaagttgtttggcattattagctattaaggaaatgcaaattaataccacactgtggtatgactatatacctgtcaggatgattcattaaaataaaaagtagcgacaacaccaaatgccaaatcactcatacattacaggcaaagcaaattttgtctatttcttacaaaactaaacatacctttgccatatgacccagcaattgcactcttgggcatccatcccagagaaataaaaacttatgttcatacaacaacctatacacaaatatttatagaatccttattcataatagtccaaaactgggaacaacccagatgccttaaacaaactgtgatatgttcatataatggaatacatctcaacactaaaaatgagccaactatttttacaagcaacaacttgaataaatctttagaaaactaagctgaattagaaatgacaatcccccatgcaatacatattttatgagtccatttataaaatatttttgaaaggataaaattatagaaagggagaacaaattagttattgcctatgattttagaaggggtgtgggctggaaggatcttgtattctgtaaaacaacaacatgagaggtctttgtcttgatagacatgttctatgttaactctattaatgtcaacatccttgtcataatattttaccatagttttgcaaaatgttacccatgggacaaatgaggtaaagattacaatgagattgctctatattatttcttacaactacatatgaattttcaattacctcaagaagtttagttcgaaaaaggagaaagaaaagcattcagacaaacaaaattacttgtctcccatatttttaaaacttgaattcaatccaaatgactttgaggctttgcctgatagccacatgcaaacagtaacatataaccaacagctgatttttaattgtgcaggacaactatactgtgatagactgaatatttatttatctgagtcagggacttaagagttcaactgctcaggtcctgaagttttagcaaattattttctgccagaatttgttcatcagtaatgattatttctttgtttttctcagcatctgattcaataagattttcaccttagaaatgtaaatgtcaacaattgtgtgatagaacttgcatctataaaaaagaacaatatatgttttccagtaagagctatcatctatatttagttttcttgagtattttcaaaataaataaaataagaaataaacaaaaacaaaagatacttgagtcaggcataggtatatttggttaatggagagtcatttaactattcctctgtacatgagtagacaattctcaaaagaagatatacaaatggtcaacaaacatttaaaaacatgctcaacatcactaatgatcaggaaaatgcaaatcaaaaccacaatgcaatactacctactcctgcaagaatggccataataaaaaaaaaatagatgttggagtggatgcggtgaaaagggaacacttctacactgctggagggaatgtaagctagtacaacactatgaaaaacagtgtggagattccttaaagaactaaaagtagaactaccatttgatccagcaatcccactactggtatctacccagaggaaaagaagtcattacaggaaaaagatatttgaacacacatgtgggtatatatatatatatatatatatatatatatatatatatatatatatatatatatagagagagagagagagagagagagagagagagagagagagagagagagaggtgatggaatactactaagccataaaaaggaatcaattaatggcattcacagcaacttggatggaactggagactattactcgaagtgaagtaacaaaggaagggaaaaccaaacatcgtatgttctcactcataagtgggaactaagctatgagagtgcaaaggcataagaatgatacaatggactaatggactttggggactcaggggaaagggtggaggagggggagggataaaaaactaaaaatttggttcagcgtatactgctagggtgatgggtgtaccagaatcttaacaacaccaaagaatttactcatgtaatcaaataccacctgttcctcaaaaacctgtagaaataattttttttaaattacaggaaaaagaaccaatggttctaataataaacactttaaaccattataaccttctcagtcaaaaaagctctctttttattcaaaatagacaaatctggagaagtgacacagcaaggatcctgtcttacaaagaaaatatgctcatatcccaaacttttatttttttttttcatttgtagaaatgtctttgtgctttttccaaagtgctgcttcttcagttgggctgctgaaagctgtaaaggtgaagtggagctctaagcgggacctcgtttcataaggatgcttttttgcctcataacataataggctctaatctaaaataagaaaaacaatctttggaaataaagccatagtcttaaaatctcgcctgcctttgcagatttccttttaccaaagtgcatcagagcacttaaagtgggacctgacttccaatggaaacatgtaaaaacaataataattctagtgtcctggtgacagctctttgactctctttaggctttctgtgatttgcctactttttaaaaacatttttccgttattcacaatggcaaaaaagtgaaatgaaaacagttttgttttctttgctaaagagagaccagacatttttttttaaagctttcttcctttcaatttgtttcttgcatgttggcaccattaccaattgttctgctggtgctagtgtctaagaagcttatacaattagttttatgaaaattttccaaagtaaaactgcattcatgtagtctcatgaaattttttgtcaactgggtaacgatgttattataaaatctataaaatcatactcaagtattaaattatatgaaaaaccactagtcataaacacagtaacaatgcaatcatgacttcttaaggttgttctagtttgtaatggagtataaagtccccattttgtgtgagtgaattttcattggcaacaaataaaaactatctgaaaattgaaaaagtcatattatcatcagtatgtttaccatacttctggattcatatagtgcatcctttctttgaagttgtgtgggaggtgatttattatttgttcatcaccattttgaaggtgaaaacatctctttttattgtctacccatttatttacttatacatttttttccttttatcagaaaggcagtatagtaaaaacattgtatttttcaattcctgtggaaaaaataagagaatacaaatcagatagttttgcccaaaaatataggttaagaaatactactgcaactgaaaaccaaatataattccatacattctagcagtcaagacaaaaaaaattatccattgcttaaaaaattatactagttcaccatagtaaaataaagtataatactcagaagaatttttgacgtgactatgctggaaacattcatctttgataaatgctttgtgaaatctgaagaaatatgctttccatagactaggaattttcttttatatttcagggaatttatggaaaagctttacttttccataaatatggtttacataaaccatactatgttagaagcagaactaaaattgtgaacctgatcttccaattctgatgttttgtcccattgattatgcatagtctaaccttctattgttcttatttggagaactagtacaaccctttgaagatgaaatatgtaggcgttagaatcattgtaatatataggtctttttgaccttataggccctgaccccaaaagaggggctaattgaaccaatttggcaataattggctgcagtgagatggtttaacactgaggtaaaggcccccacattttgcatatgtctaaaattccttataggaaaagaaatccttttattttaccatcaaagtgatgtacataaaagtaaataactctggaaaaggtaataatttgccttagtatctcattaagctttaatggagaagaaaactgatagcatgaagacaattttggggtgagagaaaaaaaagaaagagacaggtgtgcttctgttgtaagcttcacaaaatacagatttctgaattacatcttcaattgtcctgctgtattatactgaatggggttccaaaagtcttcataattaacaaatgaactccttgggtaacactgatatgggctgtctacaaacttcattcagggagaccattagtgggagggagacccagaagcaaaggccattttggcaacaggatcaacaggtgaagatgaacttggcacaatctatggtttccaatctaaaaagtatcaatgtgcacaaagaagcattaattagggattattttctaataaagcttatataccataaagcatccttttgaaatagaaaatgtaggtcaggcacagtggttcacccatgtaatcccagcattttgggaggctgaggcgggagaattgcttgatcccaggagttcaagaccagcctgggcaacttgtccatatgctgtctctacaaaaaatttaaaaaaattaggcaggcttggtggcacatgtctgtggccccagctacttgggaggctgaggcaggaggatcaattgagcccaggaggccaaggctgcagtgtgccatgacagtgccacttcaccccagcctgggtgacagagcaagaccctttctcataaaaaaaaaagaagaaatagaaaatatattcaacctactctttaattgctaacttttatgtctgcttactatgtgccaggcaattttccaagtgttttcatgtattgacttatccttacaacaaactatgagggaaatgctaattaaaatcatctttatcctgttgcagcaatgaggaaacggaagcatagggaagttcggtatcttgctctggttcacagcaaatgaaacatagagccacggtctctatgtttctatgcctcaccaggcatttggtctccagagctgaactcttgaccgctgtgttattt

SEQ ID NO: 2462 - DNA, 2490 bp, Homo sapiens
ccccgagatcggggcccagactgactgtgcctgcgggttcctcccatgcccccttgctcgtggaggggccaggagggttagggaggttgccatgattgtacccccttaacccagcctttgcatcccaggggaacgcccttttgcttgtgactggcagggctgcgacaagaagttcgcccgctccgacgagctggcccgccaccaccggacgcacacgggcgagaagcgcttctcctgccctctgtgctccaagcgcttcacccgcagtgaccacctggccaagcacgcccgccgccaccccggcttccacccggacctgctccggcgccctggtgcccgcagtacctcccccagcgactcgctgccctgcagcctggccgggagccctgcgcccagccccgcgcccagcccagcccccgcaggcctgtagggccctcgtgcagcccaccctgaccgccaggatgcttctgccatccaggggtgtagtgaggacccacggggagcctgggccccttccagccgtgggcaaaccctgaagacacccctgcccccctccagagagtgaggagggggcctgagactggacctgggtctgcctgacctcagaggtggctctcaggatgggtgacgggggcttgtgtctgtaaatagccatgatactaactttcttcccatctgtgcaacggggcccccccagggcagctaggaggtcctcccctctcctctccaccaccccctgctgcccccctcccggggtggggtttgggggggtggagtggacttctgggagccggcccggggaaagcaccccctgccccatccctgcagattgggatgaagtgttcagacagccatagaggagtcgggggttgacacggcccctgcctctccccaccccacccccaccccaccgaaagccatgggagtagttcagggaaatgggggtgcagcccagccaccccccattcgggtactcaatctcaggtgtccacaagttctgcccacggtaggggctgcctggccccccagacctcgggggtagagccaggagtggggcagcgttaggatgcccggaggggctccaggtgttgcttctgagacctgggatggggagggaggggacctctgggttcttccaaagaacatttgactcagtggggtcgggagggaatcctggcttatttattttcctctgtcctcgggtgtgggggccctagctcgccctctctgggtgggtgggtgagagaggctgcaggggaggctggcaccgggcttgggcctccagtccctgccttgctgactttggccgttgcggtatcacgtgacaatcaactctcccttaacgacgactgcggctgttgggctgcgctgccctccctggcctgcaggtggggccgtggagcccatgcccgccggggttgcaggctcttccgggcctgggctgcagcctggcccggccctgcttccctggcctcccctccttctcctgggtgcttggaagaggtgggtcctggcccgtggttgaggtcttgcctcgtggactggaagcagagggctggctgtgcagcctcctggggtagctcgttttttttgcaccgggtagaatattttttcaggcacggattcctttttttctgggcccccatgggtggtccggcatcctcagggggtgtgagtgtgtgtggggggtctctgagctgaacttgggtggggtggggacttgttcctcgggggccacctttgtgtccttgtcagcggtcgtcctgctgtggcctgggttgcatttcctcttggggggggtattgaggacccccagcctggaatgagaagggtccccggttccatgtcagacccagaaaggtggatccccccactgttggctgcaggaggtttttggtacccccttttgttccagaaccgtcctgcctctcgcttggggacaggggggctttggatggcactggtgtgcacctggacccagccccggcctggcaggatccagggatgggtgcctgggatcctggggggagggaggcaggggacgcccttctggagctgggctcggagggtcctgccccatccagccctcggctctctgtgttctctgtccctagcctcaaaccctcttctggcagcgctagtgagatgccttagtctgtgggggtgggtgggggactggggccccgttttcctttgtgagtcttggttggccccagccctggcaggggcctgtctggagcaggggtaggtagggctgtgggttccagaactctataactgggcccctctccagtgtccaggggcttggagagacctgcgcccacccctccactctcccaggagtcgctgatcactgggacctggttccagccgtttgcaggggaggcggctccgagaggcgtgtgctttccgtgggtggcgcccctcccccgccctgcctggcctcatccttgtatttaattaattaaacaagcccctttttaaacccta

SEQ ID NO: 2463 - DNA, 3115 bp, Homo sapiens
tgtatctctatatatatcctattgggtctgtttctctggagaactctaataatatactacctaatcaaattgttgcgaggattaaataaaatgatatatgtcatagtgccaaataacaagccctcaacaaatggccattatctttattactagtgggatttagatcatgtgcttcttactaaaataataaataatatttattgtttgtttcagctatgaaaagaaaacatttggaagatcactgattccttcatggagaggctggcttgggaatagatgacgtgtcaaagattgacatcaaccttgagtgcttatttgtggacttgagatacagataaaaaaaaaaaaaaaaaaacctccctagagtgagggctacttgggatacatgctatatcccaaggagttctcagtttgaggtcagccccagctctacaactcaccaggagagtgcgcgaggatgagggagagacagcctgctctggttctcttcaaggtgacaatgacacctgttgacagatgagaattccagccaggaatacagatttaggaatcatgtttctcactctcatgatgacatagaagagatgcgtctgaatctttctgccagtgtgttaaagttattctgatattgactgtagttctgagctttgtctctatcccaccaaaccactaacttctggaaattacttgtagaccaagatgggaggactccgtgtgtggctccctctcttcatgtgacaaagaaacttcctaaaatactaaaagctaaaggagattgttatctaagcttgagatggaaggttgccagcggaaacttggaggatcacagccagtcgcctgggattgaccacagggagtggcagaggcagaaagcaaaagaccagttgcaattatccagaatcctgaattgagcctgtgttcccagttcctagaaaccctcaaggttattggtttcctcctcgcttaatagaccagtggaagaaatctacctccagttctatcttcacatgagcaactgtttacagtttacaatattactctgaaaatcagttcttttcaagttttatctaacacccaccagaagaaacagaagattatgaaaatggaatttgtcaaagttcctctcccaacaatatgatatttaattttgctaacatttttttttgaacacttactatattgcagacaatggtctaagtaaagcattttatgtgcatcctatcatgtcatcatcacacagccctgtgaggtagatactattattattaaccacatttcacattcaaaaaaactgaggcttagagagactaagtaaattgtccaaggtcacacagccatgaagtggcagagctgtggttaaaacctatgtctgtctgatgtttaagattttgctgttagcattactttgaaatgacaatatgagggcattttatgtattttttttgccccaatatgatctgcagaaactatgtattttaagtactacatttcttttatttaccaaattattgtcagataagaaaccgaaataaaagtttacagggtctaggattcctccataatgaatgaactttggggtatttcagtgacaaattggctttaacgcgatcaaattccatcctacaatgaaagtgtgttagtttgtggtttcaagtttaaaaacagcactgtattgtcttccagaaatatataaatagaaattcaagaagtatttcaatgaatacagataaaattagttttgttagaacatcaaatatgtgggtttcatttcttagctcagtttagaaactgtaatttcaattttttttagcagctgtggtaaattttgagatttgaaatttcatataatataaatcctcatttattgagcatttaaattatatgcccaacaatttactgtgtacattacttcacttgttcttaactataactctacaaaatattattgtccttgatttatagatgaagatattgagactcagttaagtaacttgcttgaaattcaaaaacgttaactgtggaaggcagtatttgaacccagtgttcaaaaccccatgctctttttattatatgaccttatttcctattcagtcttcagaagatatattgtcttattagattattctcgttctctaaataagtgaccttgggcaactatctttttccctggtattttcccctgcctttaaaacaatgtgatcaaactggaagtttttcacgatctctcttagccctaaagctccttggttctgtaattccaccaatagcccatttcaaaaataattctacagtaatcagtgggactcctgtttttcccatcttttttttttttgaaacagaaaattgaaacttttaaattagtttagtaaatacatctactagtttttttcttttatagtcatggttatattatttggtccttcttagttgcaacatgtttccttgctgtcaatttataatacctctcatcaacaatagcctgaagaaatagatttgaattgctttccctaatttatagctggaaaactaggctacgctggtatcttaaattgactttcctgaggtcacgggcactcagtgccaagaggagttggtacctacgcatttgaaatttctggatttctggtcttactctgtacttagtcactcttttctttcatttggccctatggtgggcaaactacagcctacaggccaattccagcctaccatctgtttttgtatggtccatgaactaagaatggttatcacattttaaaatggtgggaaaaaaagactattttgtgacataaaaattatatgaaatccaaatttcagtgtctataaattttgttggaatatagttaccacactcattcttttatgcactgtttttggctggttttctgcctcaacagcagagttgagtaggtgcaaccaagactgtatggcctacaaagcctaaaagtttgttatagaaaagtttgctgaccaactctattggttgcttagtattgctaggcactctgcaagtcacagggaacacagcaaactagacacatgactgccttgggcttaagaagaggtttctaaacttttgaataaaaaacaaaacaaacaacaaacaaagttggag

SEQ ID NO: 2464 - DNA, 9622 bp, Homo sapiens
ccgaggccccatctgttctgtcattttctgacttgtcagatataggtcaggacaggcccgcgcctgccgggccagcgctgtagcaggtgaacccagggtgtatcagcgtttccctttaggccactcttgtcaatgctcccaacggcctcctccttcctccctgtgctgctctggggaggtctcttggctctgcccggcagtaggaacagtggagacaaagacagcttcacattctcttcagctgtcaggattgagagtggcggattcgggaggagaaaaatgagtcagtggcaactcgttgtgtgtgactgtgcagtttatctgagtccgcgggagccatagtcgtaggctgaaaatgacccttatttaagagaggctgagtgcgtggttgtggctgcccaggcgctttgctggactaggcagcctgggaacactaactgagaagtggacggggacaggagccagcctgcggtcctcagtgtcttacagtttcctggagaagtggatgtttcggcaggaagatggtgggtaaacacctggaacgatccattctgctcacttttctacttccctgtaccagtgccatggaatgagaggcagctccattaactcgtttaagatcctcataaagggagttaatatcctgtaattacacaggtgaattgcatttagcaggtccatttgaagaatggcagcgaaatggatcctgtcttagtagtgtgacctttactgggtgagttaaatcccaaagctagccaatttaaggatatggaaggaccttctgtggctttatttcttcatcacctcattttttggtttgtgtagatctttccacgttgcagtggcatttatgaagctgctgaggccttctgaaacttgacagcctgttatgcttcttttgttaataaagtttaacaaaactgttgaactcattctgagcagggggtgaaggggcaaagactgtacaggaaaacaggacataagtctgctttccttaaaagaaaaaagttaagagacaggacaagccatttcttttctgcctcttcgtattacaagttccttgttgctatgcctgttgcctgcagatagctgctaacacctcccgtgccctctcgatggcttgcctccatgcccatctgagtggcttaactcactcttctgaccacaacagcatgtttgatttggaggtgagacttcggttcctccttcttcaagtgctaaccagctggagctgcaaaaatcttctcccctggcaacctgaaggttgacttaaggctagaatatctttttcttgcatcattagtttttgggacatagcagagttagctggtgagagagatggcagtgaaaacacttctgggctaaacctactaaaccgtcaagtaaaaagtgactatgagattcgtggtgtttccttttgtccttcactctgctgaactctaattctcgccttttaagtcattcatttagactttagagtcactaaagaataagagactgaaattacaggtccaaaggtgtaaaggaaagaaagaaattcatctgaatggaaatagccagtccttgaggcccatggctccgccattctgccagccatgtcacatgatctcatttcatctctccagtcctggaaagtgggcattagtaacagctgaggacttcagactcagtgtgttcaaagtcacacaacttgggagtggccaagttaagactcaaacctgaagccactgcctttaaccgcgaagccatgaagtctcccagcaactgctacaaggggacagtgtccttgaacccaaccctgcagggcgagttgggtttaaataagcagagggaaaaaggaagagaattctgggcaagaggagtagttggtacgagcaaaagtgtgggggaaggactgtgcatgacatagaagagtgcctgctggttgcgagctccacggggcagggcaccagggcctctggagccatcttatatctcccagtgcctgagtggctatgcatagtagctgctcaataaatatttattgcatgagtgaatacttgaaaagactgttatcttctccataggctgagtaccctgagagcagggatttggtcttagaaatctttggatgttctgcaactcacagtggttaataaatagcaaacactcagtgagtgtgtcctgatgaaatgagtgaaggaacagcaggtaagggaaggtgagatgtgcttgagtgaagagtcactgatactttgagaaaaactgagcaatatatgcagactggcttggtaagggcatatcatggatggtcatcaatgccaggatgaggagctcttgtgtcctccttgagacattttttaaaaatccatctcttactgcacaacatcgtgggccacaggaacccaggcagtgctcaaactgatggctgcatattggaaccagagtctagcacagcttagaaatcatttttctgcaggactggccttaggctggccccattgtcactgtcttcccacttgagggtgaccacactgttacaaccgaaaagagccctgtgcaaacttgtgaatgggaacctgccagggaatagatgctattgctgggtcccgcagttgttttcggggtagttaggctggaaagtcccagccaacttcctctaagaggtgttctcaggccaggagttctcaataaaagcttccctctcttttcaggtgttggctacgtttgtggttttaagaaagcctgagggcctgaaggcagcccctggagaagccctttccgagggcattcggaaccttctggtcctagaggtgaagctgaactgtcaccaggacttatgacccgcggcttcgctcccattctgcccgtcgagttccacaagatgggctccttccgcaggcctagaccgcgcttcatgagctcccccgtgctcagcgaccttccccgattccaagcagctcggcaggctctgcagctgagctccagctcagcctggaacagcgttcagactgctgtgatcaacgttttcaaagggggtggcttgcaaagcaacgagctctatgccctgaacgaaaacatcagaaccagcttcttgcaaaaggactgttctttgtggaggagaagatcaagctgtgtgaaggtgaaaatcgcattgaggttctggctgaagtctgggaccacttcttcactgagactctccctaccctgcaggcaatattttatccagttcagggccaggagctgactatccgccagatctccctgctgggcttccgagacctagtcttgctgaaggtgaagctgggtgacctgctgctgctggcccagtccaagctgccctcgtccattgtccagatgttgctcatcctgcagccaggcggcactccagggtccggcccaaggtgactgtcctgaactatgcctccccgataaccgcagtcagccggccactgaatgagatggtcttgaccccactgacagagcaggagggggaagcctacctggagaagtgtggcagcgtgcggcggcacacggtggccaatgcccactcggacatccagctgctggccatggccaccatgatgcactcgggcctgggggaggaggccagcagtgagaacaagtgcctgctcctgccacccagcttccccccgccccaccggcagtgctccagtgagcccaacatcactgacaaccctgacggactggaggagggggccaggggcagccaggagggctcggagctgaactgtgcttccctcagctgagtcgccacccctgggcctttccatctcctgttttgcaaccaggatgaggacccctccatctccgtggattactgaggggggctcttgctttatgcgatgctgccttatttcctttagggtactgtcctggtcaaaatgacctaaggggaaaccgttgttgtaaacctctttattttggtgactgtgaccacttctttgtagccaccaattgtagtgaccagttgcctaatggtcactttctgactccagccttgccagcctgactcagatcctcatctctgggcctttctccctccgatgttggactgcctgatgctcccaatgacatatccaatgctcctggcatttctggagcaggaggttgtcaggacaacacatataaccaccaaggatgtgttggcctttggagttcccctttaggttcctagtgatgtggaggtttatgggtgaaaaattagtggagagggaactcctctcccccattttgtgtagagtgaaaatagcctgaagcccctactcagcagggctctgggaatgtgccttccttattttagtttcagaattgctgggaaagttaccccactggtgggtgaggatctatcctcaacctacatccagatcctatgtgctgcttgcacagaggcctttggcttttgacccaggagggccgcgaggctggagctgccctgtctttcattgagccttagcatttccctctcaggcttcctctcaagctcaaggaactcacccccagataagaagctggtgcctcttgtctctctcatttcagaaacggactttctcatcatgctttcctatggtgggtatgaggggccagctgataccaaccaactggcctgtatctatctatctggatttgacttgaatttttaaaatgtgtatcgtttaaaaaaaaaaatgtttgcaaattttgcacataggatcttgcactgttcattttcagtggggtgagtcttcacactaaaaacacaagcagagctcctgggaaaagagactggaagtggttcaggataaagagatccatggtgggcagggctgttaggtcacagagctctagaagcagctggacttgaacccacaatggcttgtgtaaattcgtaaatttcatggtttctaggaaaagctgcattggggtggggagacccagtttgcctcataggcagaggattctccaggaagcatggaaaatggaatgtttccatgctttacagtgctgggagagaggggagatgtgggcaggaccttttggaaggatgtttattctctgtggttaaagaaatgctgagaatttctagcatgtgaagcacttgggggcagcaggccttggcacggtgctgcatccttctactgctccctccaggtctgggggcttttatccaccttgaatccctatcctcctctttgtagttgtcggtctcactgataacagctccagaaaaaaagacaaggctccccctctgacccttcctgttggtatttatgaaatctcaaagagatgagccaccttggcttccaatatggcaagagggtgctgggagaaggtgaagatcagtctaagctgccacggtgatgagaccttctcattatgtaactcttgatggcatttcccttctgagtgaagatttgaaatatgattgattagaattgtgctcttgatggctgggaatttagaaattttattttaagagttatttcattttcatcctaagagtgatgggagagaaatgtccaaaagagatctgctgatctgctgagagtttcaaacaaacaaaaaaataatctctatgtatgtgttggataaagtctacagactgactaacatgcattagcaaatggagcatcagtaggtagcaacatgataatttatgtaactgatagcttctgtccttattagtacacttaacatttgagactagtatttattgatccaggcaaagtaattaattaatcatgcttgggcttactttttcagtttgtaaggttaagcatatgtgcatgcgtgcgtgtgtatataaatgccttttccatatcttaaatgtccctgatgaggagagcagtcatcaattaaatatataagctcttaaaatgagaatggaagtgtcagtatagacccagtgtacttaagtgctgatgactgttagccagtttacaactttttaccatcgatgtacacatttgatatttgtgcagtaaatagactgtacctataaaaaattttattgatgtttatggtcatgttagctatcagagagctattggagtgagagctgaggtgtccttaaccactttttctctcctagattcattttcattatttatgctaggattttcttatggttgacatttgatgacaggaagcaatcatgactcttcaagtgagctcacagaaacctttcatgttgtctgtttccaaaatggattcaataaacaacattttgtccatgttaccctattctcatgctgggtgccccaggggtgtcttgatcgaatttgcaagtatagcagtcaaatcagatcttttttttttttcctcaaattagatcttgatgcatctttccctcaaactccctgccccaacttctgcctcctcttttcttgttgcctctactccacagtcagacagcagccttagctcagccagtcttccctgggttttgtttgcaatcctggactggattggcaactcatttcctggagaaacatattgtggagctagaaaatactgaaaaaagtctgagaagccaatactttttctaaaaccagcttggcctttcttcccagagtatttgacctagagggaacagttaccatatgtactcatggatgatctcatatattcccctctgattctgtttggcagaggaaatttatgttttactctgcataaatacttctaggaggcttatagcagcaacagtctgagaccgctaaagacttaataagagcctttgaagaggtgtgactgattagtcatcctgtagggtgtaaaaggagagtgtgtatgttttggttgagcctttgcaggtcataactatggtaaataaccactgagcattctgcctcaacaggtttcatgtcattagtgtgcccatgacatagcagtgcaccatcatattcattcatccacccatctacccatcaaacacttgtggagtttccattgtgtgtaggcgcttttcttcgtactagggatacagtgatggacaaataaccaaggtgcctgctctcatggagcttacactataggggggaaggctggaaatcaggtcaacacaagcatcacaactaccaaacaacactggatgaaatggcaaagtgccagtgactggagagtgaagaaaggatgacggtgggtagaatggccaaaggaggtctctctccaagtcaactgactcaagagctgagtgacaaggagccagccttacgatctgctttgtttccgatcactgccataactatcacagacttagcagctcaaaacaacatatttattattacagttcgttggctggaagtctgacgggtctcactgggctgaaatcaaggtggtgtcaaggctgcattcctttctggaagctttaagggataatctgtttccttacctctgccagctcttagaggctgcccatattccttggcttgtggctttcttcctccatcttcaaagccagcagtgaatggtgggttgagtccctttcacatggcatcactccaaactacattcggcctccctaggacccttgttgattacattgagcccatccagataatccaggattatctcccaactcaaggtctctaatcacatctgcaaagtcccttttgccttgtaggatacattgcaggtactgtggattaggatgtggacatccttgatgggggagggggagtctttattctgccccacagaataatgattaccacataatccttaggttttgctgcttctactgattactctttgtgggtagcaagctcccaaaagaccagcttagctactgaggaaactccttgtcctccggcccagtggaatttgatgggaaaagagaaggaaagcaagatggacaaaaagtgtcccccccagggctctgccttcacgctaaggagcagtggtaagttggctgaagctcttctgaaagtccttaaatgtccttgagtccctcagctggccagagatacactggtgtcctctctggcatgcttcttcttgtctccatccctcctcagctggactgaagatttctgtgggtactgctctgctgccgcctctgctgaaatctctctcccagcaggagaaaggccagccatgggatgtactgtggagcctgggaagatgaaactgcagcatagaagtgctggtctcagtgttcaggggagactgggtgacatggcctggggactttacggcctgacctccacccaccatggcctagactcccacagagaccatgattctgtagtcccaggctccaatctctaattgcctcattgccttctgtcaggccctcaccatccccagtctggacttacacaacttggtacttcctgtatttgtgtacagactccatctctcccttatggacattcccatttgatctaagatgcaacccctgcttaaaacttttccttggctttcgatataatccacacacctaaacttgacttcaaggtccttcacaagctggccccacctaccttcctggcctcattggctgctctttgactccctcgagttggagaccaacagcttcaccaggactgttcattgtcccaggaagctgcctttcatctccacatcccctgccatgctcccactgttccctctccctgggggccctcctcacttctccagatagaagcagccacttcaacctctatacattctcaggggcttaatccaggaagtcaagaatgggtaggatttatatgtgcaggcttagggcctcacaatagagaagtttctaagtcctgtgcattgaataaatgaatgggatggtgtaattctgatccccaccccgcccctcccaggtatgtgcagaaaggacaccgcctctctcctttttctccaggtagggatcttccccatgcagctctctccaagcatgttccaactgaggctgtgtggccaggtgacccagtgaacacaggtgggagtctgagcccttcttccaactccttgcctttgctccagccaatgtctgccacttccctgcagagagttaaccctgttcctggggatgttttgctccagagccagctcattttcttggcctgccctctttctgtctgtggtaagagattgctttgggatctgacagtcctgaggacagtgagagcacctgttgtttgctctttgaagcaatcaaagagccatctctttgaagaagctctcctgccaggaagagggagtgtcccaggccagtgaactcaggcaagagcctccttgtcctaaccctctctgcattcaggaatctagcatgagggccgagtactaggctgttcctcacaacaaccttgcaaggcaggtgtcaccctcattttgcagatgagcaaactgagccttgggtcttttaagcaatggagcttggacttgaccccaggttcaccacaagtccagtggtcatccctttctattctaggaggtaccctagcctgatagaaaatgaagaatagctaagccaggggcagaatctgctcagcttgctacaaggtaagagatgttccagcgtttctagaaaagctgaggaacaaagctgcatctcttgcttttctgcagtcatttctagaaaacctcatggcgtagggactctggtatcctggacagtaaatttcttatgtagaaaagatttcgg

SEQ ID NO: 2465 - DNA, 2260 bp, Homo sapiens
aggaagaataataatttccaagaaaaagtacaggaatttattttatgtctttttgaatttagacagagaattatttcatagacatcatttagacaaagttagactggcctgaatttaactgcaggtcctgagacttattattaaggtcatatttgccaatgtctggtgagaaatagactgggaagatgaaaagcatcaaaagatttctaagggctaccaagattattgaggggatactgaagaacatgttttttatttaaatatttcctaggactgaccttcactcttttttcagtgaatctaccattaaaaaggaagaatctgtggccatcctggaaataaacagagtgacatggtgacaattgtggatcctctcctttgggataatgcactgtgtatcccattgcaagtgcttctcagacatcagtgcaacgacctcttcagtaatctgacctaaaatgttgatgttctttcactgcgaaggatgcatggaaactgaaaaaaagacatacagaaaaaaagagctatgtcagctaaatgaattgacttacgttcagttaatagacagctgttcatgttaatgccctctcacgccgtctttcactaggctacattcagagaagaggtatatttgcacgttttctttcccacagttccttgggcatgtgttatctcttttgcatcatcagtttatatttgagctaacagaggcttccatattaggcaatttatatgacagttggtttggcccagttgtttttcaagtatctttaatatcatctttattctattatttgtgcttctgataattttaaccaggaagatataaacaacttttgaaaaaaaatggcacagctcttttctattttaatgccctttgttgtcattcctgtactcagttttcttttgtaattaaaaaatatttagtacaatcagtgatttatttccacatttaaacttggaaatcctcttcaccaatatccttatcaatttctttcttattgataacatgttcatgctgtaaattgctttagtattattaatttcttgcctcctttcttctaggaactgttgagcaactgatttttgattatttcctgagttgttctgcaggcttgaaaggatagtttcttgttggtcaaatcacagaaaagtcttatacaagaattatcatcgggtcaagttctcagacttacattgtaattaattgcttagcctcattacttccacactatataatagttttactctttgttctttctattaaactggttttactttagaattttgtttcactgtaatgaatgccataagaatattctttaattcgatcattattattattattattttgagacggagtctcacactatcgtcggggccggagtgcagtggtgtgcaatctcggctcactgcaacctctgcctcctaggtacaagggattctcctgcctcagcctcccgagtagctgggattacaggcgcctgccaccatgcttggctaattttttgtatttttgaagagacggggtttcaccatgttggccgggctagtccccaactcgtgacctcgtgatctgcccacctcggcctcccaaagtgctgggattacaggcatgagccaccgcgcccagcctcggtgtttatttttacaaacaagatagctcacatttccctccaacaccattttaaaataaagcttgtcatttctatttgaccttttgttatctcttcctgattttctgagaatgatttatactaaatattatatcttttatattgtgtacatatatatgttatttataatcccatatctgaatatctgaattccaaaatactccaaaatctgactttttgagcacagcactgacatgacactcaaaggaaatgctctttggagcactttggattttggattttcagattagggatactttacggtttcaaaatctgaaaatctctgaaatctgtaacatttctggtctccagtgttttggattgggaatagtcaatctgtaacatacatgcatattacactgtgttttctttaattaaagtaattgcattaatttgtctaagctagggatgtatcaaaagtacatatttcattttgatccttaaatcaattttgacatatttcttcttatgattaaatacacatgattcatagaagaaataaggtcctccactgggatctttttgttttgtaaaagactttcattatacagctctgttggctatttatccagacccagctcctg

SEQ ID NO: 2466 - DNA, 3493 bp, Homo sapiens
ctgaacacttcctgagctagaatccgggctgacaccctcgtcttccgcaggctctgccatccttccagatcccagtctcaccacacatctacaccagtgtcagctgggctgctgccccctccgccgcctgctctctctctccggtccggagccggtcgctaagcttcagcgagccccagcagccagcacctgcgatgaaatctcatctgatcgtcacttctccaccccgggcccagagtggtgccaggaaagcccgaggggaggctaagaagtgccgcaaggtgtatggcatcgagcaccgggaccagtggtgcacggcctgccggtggaagaaggcctgccagcgctttctggactgagctgtgctgcaggttctactctgttcctggccctgccggcagccactgacaagaggccagtgtgtcaccagccctcagcagaaaccgaaagagaaagaacggaaacacggagtttgggctctgttggctaaggtgtaacacttaaagcaattttctcccattgtgcgaacattttattttttaaaaaaaagaaacaaaaatatttttccccctaaaataggagagagccaaaactgaccaaggctattcagcagtgaaccagtgaccaaagaattaattaccctccgtttcccacatccccactctctaggggattagcttgtgcgtgtcaaaagaaggaacagctcgttctgcttcctgctgagtcggtgaattctttgctttctaaactcttccagaaaggactgtgagcaagatgaatttacttttcttaaaaaaaaaaaaaaaaaaaaaaaaaaagagtttctggctgatgggtgactcagagtgcaggactgcctggccgtggggcagaggggtttgcccttctcggagggtacctcctgttccctgtctgagcatcctgcatggaagtcaaaggaaatccctttcttggtgacgacttaaatctgggttccctcagacattgggttgcaccccaacaaatattaaatggcttcttcttaaagcccagagaaagaggttttttaaaagactgtcgccaaatagctgagccaaaaggctgatcagaattcactttttggaatgtggcagttaaacactaccttgatcattctctcctctttcctcgaggaactcctggagggtttgagcgtctggaaactctctgctctgacccgaggaagcaccctcctgacgccgccttcctccggttattgaaaggacgcctcagaaatgctttgttttcttttacgatgtattcagaagcctttactgattaaagttttcttttatttgggtggccgggagagacccagggaggttctggaggttcctttctgtctcctggccccaccagggatttccccatttctgtttgctgcctgaaagcaggatgaggaaggccaaggagagtccttgcacccgtgagcgtcaggatgaggaaatgacaggaggaagacgtgggtttgggttagtggctgctggcgttttggcccttggtgtttctggagcctccagggatctaggggagcctgggctgcgtgcatgtcgataagcagagctgttcttggggagaaggagggaggtctcgggagtgtagcaccatgccaaccagccctgcgcgaagacagagtgagccacgcccggatggcagggcatgtttctgttttggtgtctcactttcctcccagcgtgacttatttggggattcctcagggcctactggaatgtgactgcccactgcccagctgcctcgggtacaagtcctggccctatgtcccagctgtcaggggctcagggaatcctacccagccacctgtcctgggatggagtgtcagcatccaccccttggttgtcatcgaggccgccctcccagtcctgggtgaagatatttgggccaccagggctcccttggccccttcacgtaggaaatagacacgtgctttttaatgcaggacactttgagtgttacaaaatctgtagacctggcagtagggtcatgatgttgggaagggtgtagtgccctaggttggtgacagaagggacagacacttgtgcacaggtgtctttggtgatggggtttttttttttataacttagtaaaaaaaaaaaaatgtatgtggaattctgtctcttggtaaagctcaaagccaggctagcctgaggtggcgcagggctctccttcctgtcccttcgatctccttgagaattaagagctggcagctgctgatggtgtttcccaacccccctcacttcccaagacaacccccagcttcaggtcctcatggggaggggagggcacgttcttgacacatgggaacttcgctcaggagggcctccccttcccctctccctcagagttttcactgccgtctcgtctttagaaagctgtttgaattccccccgcccccagtttggaccgtgtagatataactggatatacggatttttctctttgtgcaggcttcttatgccgttggtatacagggcaggaaagagaggaataaagggagagagcagtgtggaaaccacggtggttttgctttgttcttactaggttttggtgccaccttccctgcctgcgcttgtgccccctctcctccttggcactggcggcctccttgcctcccttccacccgtgctgccatcccgtgcctgtcgtgttggttcttcacacgtgctctgttctcggggttgttccattcatgccttcttggagggtgagggtggcttgggaaccgacccagtgatcatgcctactttcttctttgtatctccctccttcccagcccacccgggcagcagactctgatggaaggaaggtgccgtaggtgggcttttagaaactaacgggactggttttcaaagcagttatcttgggaaactgtttattccagcgatgtgacttttttcagaatatttcttggaatcatattcagagtctggggctgtgtgttgagcagccttaaggatgctagacactcatttagtgcccagggagtccagcgaatgacgtctgtggccaagcgaggtctcaggtgcaaagcaaaaggaccatttaaagtaaaatagcttggattcaatcatgtgacttttaaattggctcagaaagcaattttgtaatttcagagagtgttttgagccatggccacgttgtcattgtgagtctatagcttgactccttggagaacaatattcatttggttgtggagactgatttgctgggagaaatctgtcctgttactttctggtcatcccaggttctgacttttaccaggggcaaaaaaaaaaaaagcaagagggagataaatcccatctgtgagtttgtcttattggcgcctttttcctcagctgtcttccaagtattatttttactgttaaaaaattttttaaaaatgtgaaatgtaatgtttttacagcaacaatatgaaatatattttataaggaataaaatggtaccttgtctgatttaa

SEQ ID NO: 2467 - DNA, 6358 bp, Homo sapiens
agctatttcaactggctatgtgttaaattgtgatttcaacattatacttcgaggagcagggtccaattgcaatttttatttcttagtcttcctgctcctccactgctcagcgtgttatctcattcatagtagttacccatacatattatttaatttgaaggaatattaaaaagtgtactttatagaaattaaaatccattttgtttccaacattggaaaacagactttttatgtaaaacctactgaaggagaatttagatggcataagccactttgctgatgtttggaagaacgacgggacaggcaattgaatgctagattcaaggtcaaagctttgccccacttgtcctgagaccatttcttgttcttctttggaagaagtctcttgaaagtcatctgcatagccaaacttagagagcactcttatctaaaaggaactgcttgtcttcatctatgactcagattatttctttgcatattaaattacaagagacagttccagctggatccatcaatgtatttataactcagccacacaatcttcctccaggcagaaaacttggcacatgggctttcagcctggctgcagcattcaaagatgagaacaaaaaataatcacagcaatttttatatcaaattttatttaaattctgaatataataggataatttcaatctcctggcacacagtaagtcaccattttcaccaaaggagggagtgagaggggcagttgaggaactcaccaagagtcacaatataatttctccacctaccttagattctattctcaatgaacaatctttggtaacaacggtgagaatgtcctgtgaattctggaaaagaaaggagtgatgacattcattaatggtctggcataatgtctagcacaaaatctagaccactgtactgggtgctatgtatacactgtctcattaatcagtgaaatagattagattttcttcctataagaaagtagctcttgaagacagcaagacttttttttaattggaaaaaaaagaaaaaatttgcctttgacaaattagttagcacgtttagtgcacagattcattttctacaatttgtttagagctttgtttcctgtagaaattatataagtaattatatacacatgtcacttaaagtgctcttatataaaagaaattgcttgtgcatgtatattagtcataaacatctgtatttttatttagcatgtaacagaaaaccaaactgaaagtggtctaaacagaaaagtgatttgtttagtcatgtaactaaatattcaggaatagatctctatcttcagttgtaccttgaacgtgatcatggaattcagaatctctctctatttctctggccatctctgatattgaaatccttctcccctcgtagttccaagattaagtcattctatacctagaaattctagcagaaaagaatcttttatttcccaataaattaaattaaaatgcttaattatcattggcctattataaggcattgagccgtgacaaaactaattgctgtagccaaatgagggattagactgagaagcccaacctggatcctatgaattctagtaagatctatgtattagttaatataattatatcaatgttaaccttgtttttgataattatactctgactaggtgagatatttatatttaagaagctggatgaaagttatgtaggaagtctaagtgcaatttaaaaactcttccataagtctaaaatcatttaaaatttttttttgaaattatacttgaacttagtgggttatatgaaaataagcactgtaatgtgaatatatttgtgagaggctttgcttggcaagttttttccatcgtttgaatttcagtctgtggtctctatacctgataaccccagttttctcttatttttctttttggagtcacagaccatgtctttaatatggatattgttgatcacaaaaacatgtactatgatgtatatatttgtatatttatcttcccagttagattatgagcatcttgagggcccagcctgtaccttgttcatctttaaaatctcagaaccatgcggagggccaggcacagaatggaagctcattaaacgttagtataataaagcactaacatgcttacttgttaactcacatcagcatctggaatcacagactattattttaactggctaatggcttgactttcgaataaatatttaaaaggaattttaatttaaaatgtgcatttaattcttctcttttatagacaccagtgtccaataccatgctacagctggggaaaacatattctgtgtctgtttctgagaataataaaatagaaaaaaatgtgaatagcatttctatctttactgctttgtgtgtatgtgagggtatgagtggcggacagcattgagagtttatgcatttattctatgataatttattaaatatctcaatgctgtgctaagatatggtccacaccgccccatcttaagagattagtgaactcatctgaagaaccaagcatttcagtgagggggaaaaatcactttaaagtgtatcatattgaaactgaactcagccttcctccaccccgccccctgcccttgtcccctgtttttggaatgagccaatttccatcagctgtggtgttgtcacatgatatgtatccatcagcaaacatgcaccaagctcctgctgaggacaagtgtcatgagattaaaaaaaaaaaaagatcttgaaaaattctcacctacctgaatatgtcttactgctgatattttgtgtacctgatatttggcattttttaactaattaaaattattaaggtggtttagatgtaagtgtaagcctgttttaggcaacgcaaatgtaacttttagctacgaatatatactcaattctatctcagggaaatgtaatcacatatcctataagggtaaatataataaaagccagaggtcatgtacgtgttgaaattcaggaagaaggaaggagttattcatatctctggggctgaccaaatgctacaggctggagatccagccctctgtgggtcagcataaagtcaaaaagacttcctgaatacacataaaagcattattgggatcagtttccatggagttataaataatacagtaactgttcaatgactgttattgttgaaactactgaaaatggaagttatcccaatccctacctgttatggactgagccctccaccccaagttcctattttgaagccctgaaccccatcgtgatggtatttggagatagggtctttgggagataattaattttagatgagatcatgaaggtggggtcctcataatgagactaatgcccttataagaagaaacaccagagtgcttgcatgtttctctctctctctctctctctgtctctctgtgcatgtcttgtgaggacatagaaagacggtggtcatttacaaatcggcaagagagccatttcagaaaccaacaatgctagcaccttgatctagaatttgtaagtttcagaactgtgagaaaataaatttctgttgtgtaaaccatgcagtgtatggcattttgttatggtagttcaagctgctaagaaactacatttccatttctctatatttaacgacaatagggctgtgaacacgtggattcaagtccattggtaaatatttttgctgtgggtggctcttccttctgaagggctaagattaaacttgatgggggggacttcaataagatgttgggggatgcagaaataatcaggattactttagagaagcttttgccaatacagatgacattttaggctttagaaaacccgtaatccaaggatattgtcagctgtgggaaatatcctgctttataacagagacctggtgaaagaaatgggatactacaccttgttttctggtttgatcattaaagttcaagtataaattgtttctatataatgttattggtgtcaaaagtacttaattcaaatggcctgtttggtttacttaaaatgattgaaataaatagttcttacatgtggggcatttattcccttttgtggtatttctaaagacttttctaaatccactgttagatacttgaggaagcactgagccttgaccaagcctgaccaagacctaaaacatatgattactgggaaaactcataatccccaaagattctggatttcagtataggaggtttggtaactgtgttgggactaaatgtttttaaaatttatttcttttgtaatattttatagatacaagtattttaatatatttatgtgactcgtgatattttgttacatgcataaactatgtaatgatcatgtcaaggcatttggggtattcacaaactcaggcatttatcatttcaatgtgccgagaacatttcaaatccttttttctacctattttgaaatatacattattgttaatatagtcaacgactctatggaacattagaacttgttccttctatctaaccatatgtttgtacccattaaccaggcctttctttatccctgcctccccctaacacacaccctccccagcctctggcattcatcattctactcactacctctatgagaccaacttttttagctcacacataaaagtgagaacatgtaatatggtctttctgtgccaggcttattttacttaacatactgacttcgagtttcatccaacatattgctacaaatgaattgatttcattctttttataattgaatagtatcccattgtgaccatttatcaccttgttattatacatttgtctgttgatggacacaagttaatctcctatctttgctcttctaaatagtgctgcaatacacatgacagtgcagatttccctttgatgtaatttattttcctttggataaatacccagtagtgagattatagatctatatttagttttatgagaaatctccatactgttttccatagtggccatattaatttacattcccacagtgtatcagcattcccttttctccacatattcaccagcatctgttattttttgtctttttaataatagtcattctacctggggtaaaataatatatctcactgtggctttgatttgcatttaactgagaattagtgatgttgagagcgttatttcacagatttattggtcattggtatatctgcttttgagcaatgtctaaatatgtcctttgcccactttttaaaaataatttgaacttttatgttaaattcagggggacatatgcaggtttattacatgggtatattgtatcatgctgaggcttgaggtacaaatgatcccttcacccagatactgagcatagaacccaatagttattcaatgcttgccctccttcctccctccacactttcagagtctgtggtgtgaattgttgttatctttatgtccataggtactcaatgtttagctcccacttataagtgagacaagcagtatttagttttctgtttcgtttgttaatttacttaaagtaatggcctctagctctatccatgttgctgcaaagaaaatgatttcatgtttttatgactccatagtacttcatggggtagaggtaccacaatttctatatacaatccactgttgatgggcacctaggttgattccatgtctttgctattgtaaatagtgttgcgatgaacataggaatgcatatgtctttttggtagaacaatttatattcctctgggtatatacccaataataggattgctgggtcaaatggtagttctgttttaagttatttgagacatcttcaaacttctttctacagtggttggactaaattacattcccgctgacagtacgaatttggaatagagatgtacaaagacacgagggaaatgcttggaagctctcaagtgcggagaattctttgcacagactccctctctctgcacagatgaacaccatgagcttgctggaaggggttcaaagaacagcccacagcagcactcgagtttgctaaagtgactgacgttggcttcagtttggaatccaaaggcgacaactgacaaggaagagcggaagggaagggagaagtgagatttgaacagttgcaaaagcccaaggcagcagaaggcaaacatcttctggggttatcaagtgctcatagcaagtggcaccagacatctttctaacagagtaacatctggtgattgaagcagccagccctaaagaaacacctctctctccctccattgtagagtctgaaacaataggcaaaacaagaatggattgtttgcattttgatatctcatttattcatctttgatgggagagttgattgtaataaaattgggaatattaaatagtgcctactgtacatcagatattattctaagtgcttg

SEQ ID NO: 2468 - DNA, 16087 bp, Homo sapiens
tggaaatattgggcagggagaaagggtgcttttagaaccgagctgttcagggtcccagatcctctaatgtaatgccagctgaacccagacagtgacttccacctccatgaatgcaggtgattgcatcctttgaaagcctgtttgcatagcagacaatgaagctgagcagagaaaaacaagatgagagacagatggagtaggagacctgagaagatggcttgagtccatgaattctggtgttccctaggccacatttgcccccatccttcccagatcctatttgtgagccattgggcatcttagctcaattcatggtgggctgactgtccatgtttccttcagccaccctggacggcagctgtgtgccgggtgagttagaggatgaattgcagctctataatgatctgttttcattatcagaggagtccttctcaactctcgtttctcgctgactgcttctcctttccatagcctgacttgagttcttgcctgctttgaccatgagaactgaaaattgaggactagtaagtataagcccttcctggggctcctatcacatggcatgtgcccattggaatggtaaaattgaggacaaatgtaaaacaaaacaaaacaacaaaacaaaacaaaacaaaacctttctccagcactaacagctggtgggcttaagaattattcaggttaagttgaattgacttcaagtttgagctgacttggtctgtgaagttgtatggacttctaatcaccagaaatcctcagctctgcctcagtctaaaattaccgagtcccttcctttgagtcaagaagataagtcaaactattctagaaaagccaccatccctctaggacctcatgtattaatgtagggtatgggctgggctgctgactcaaacaatatattcctctcctgtgcaataaggcaagtggaagcttttccccatgggttaatccagtcacataatttcttctattgcatcctcccctcaccacctctgtggagcaccaagtctctattccagctcacacacacaggaaatggcaaaaaaagaagtggggagtgaaagctttctttgaaaaatgagatgtgaaagttgcacatatctcttctgcttctatctgtttgccaaaatttagttataaggccaccccttcatgcaagggatgctgtgaaatgtacatttagctgggtagcaactgtcctgctaaaatccagtgggaagagtgctcccttattaaaacgaagaaggggaaaacgtatcttgggaatatttagcaatctctgcctcatctggcactatattttgatacctgcacaggtaagaaaaatccactcacgtaatacgaagtcaaaccataacctatctacatatttagatctatctatctacaactatctatagttcatcaattctaacacacgttttacaccatagcagctcagctctcaaactggaatgtctcttcacagttgatggtgtcttatggtctctgccagccagaaagcagtaatggtgtggttgtcattgcctgcacattcataaacttagccatttaaaggataagctctccacaggtgcgaaaaaaccccaaacatttaagaccatttgagaaaggaatgtgagtgttggccttgccttgtaatcttctgttgacacctgaaaaaaatcaaggatgttccagcatcaaaagttgcagaatgggtgtcagcttcttggaagaaaattccagagaaaagagaggaatcctcagaagaaatgcatcaccaatgctcttgatagcatgaggaacagaaatacacagaaaaattataaactttaatgattctgagttgaaaaataaattataagactttgaatgtagatatgtagaattctctatttagtgtatgttttagcatgatatatgctaaaagtctattctaaataagcccaaaagagctttaagcaatatgaaaacatcgaggctatcaaaatattatcccaaacttggaaatagacaagagagatttatttttagtgcagtgctaggtttgattttctatttggctattttataattttatagaggtagagtttagattgtagatttagtccagtagaaatgcaaatcatttctatcccatgaaatggataagcccaatgatatggctatagctttgtctgatattaatcagatttttgctttgttttcttcaaatttaacccaacaatctagtaaatcacctatatatacacccaacttctcaaatcccatttggactcgtttaatattatgcttgttctcttaataattagcaagttgaataaaatctttgatgtgcttactttaagtttgcatgagagttttcttcttcctttaacaaatcataggacacttggcagcatttctttagtgatgcagaaaataatggcatgacttgcaattgatggcatgctaagttcgatggattatggtattgctgctgcctcaatttctatttcatcagcaagctagtgaaaaggaaattagggtgaccaaatcacaaatgttgtaggcatgacatctcaaaatgttttgatgaagctttagtctggaaacactctgcaataggcatatgtcattattttgcctgctcagcatcagaaatgcattcctttgtttcgggaatttcctatctgtgatatcttatggcacattgagatgctttcccactgctgaagctaaccgtggcagatacttgcttccccagcctcctttgaagctgagacatagatatgtttacaccatcctggactataaattagaaactggtgcctcagtcaagcaggttcttcagggaatcctctctaggggtggcactagctgtcacagacagagttcttagggtggccatcgctgaagcgggagcactgggcaagtgcctagggtgggtagtggaggcagcatcagtttttggcctgagttgatctgagtcctctgaggttgtgtggcctctcaatttgcttctccagctaccttgtaaatgctgtgagccactcaatctcctttaatagcttctcaatcttctttaatcagtgagagtcatttgcatgaaacagaaaacaccaatggaacagatattgagactcggagagtcgacaggaagcagtgcttcatgagtaaatttggttttctacctgcccagttgttttgatgactcacactaattgtatttgagatgacagatattttaaaatttaatgtagataaaggagcccaaagacctagagagataggaatgttgtagagaatttatcatggcaacctgttttgctattccccaactatggccctcaagctggcctgcaaggcactccctttgccaaagctttgagggccatcctagaacctttaaaaaacactgcagcgggggaatcagagatagttaatgtagcctggttggggctaaagacagtgaaaaaacactggtttcctagagttttctcctggttctctaactcttcctctccttgataattgctctctggaggctggtgatacaggtgaaagatgctatctttgaaatggcttcttggtctcaaaagggatatcaggatccccatggtactggccttgaactaacggatgattcctggggacttggaatgctgctgtacttcccttagtcaaggagtaaggatttctttggttgtgtaataagtggaatttttagtcaagtgcaccccatagtaggcacaggggaggggagaaggggagagtctagttctttagggtataactggattaggagtagtcaacatctggcagaatttctacatcagctccctgacctatggtaagagccactatggtaggaagggccaatgaaaaacctctgaaactcctccacagaaaaattataaatcaaaagggatattggacccctagggaaatagcatgagtttacgtggttgtccagccttcccgacaattcttaagctgcccggtatcctttttaaaaattcttgttctgctgaaatcctctgaagccagtttcatttgcagtgccctgatactgctatatgattattttgccaatgaattgtataattaaacataagaaaaaaagaagttttattcttggcagttgttatatcaaagttaggtaacttcactttgaacagagaaaactagctcctgtgataaaatagtcatgagcttctgcaggcacttagcagtttaagaagtagccaagagacggattggacaccaccaacatattttacttatttgaacaatatgtgtgcacacccacttattggaccacaggcaaaagccctgaggtttggtcaaaatcagaatgctacattatgatggaacaagaatctggggaaacataaacaaatccaaaatctctaggattgcccgactacaaacaaatactcgagctttacgctgccactcctggaaaaataataactggcttctaataggcaaatagttctaggaagaacagacatttggaagacacaatttgcagagagaccagcaggcatatatttagggaaccataaaagcctctctataataaatgcagtttaattttttcaaaaggcaaaatcaaattatgctaaaagaattaagataaagtctcttgctgcagaaaagacactgtttatctttgcttgtatgatattaatttatatattcctgggtaaaagcaaaaattgagctacagaggtttttggttagtttctttggcttgttcgtttgttttaaatcagtcaccagcaattatagattctttcatattcacacatttgttcatccaacagtttttttcagtgcctgtctgtgctgggctcagggaaagcgtgggataggctggcatatgagaaaaacatggtaaatttgggcaactaaaagcagccgttggagcacaggaaacataaagggctacagataagcaaggatcagatgataaaatcctttgagatggcattagagaaacctgacattatacagtgcacaatggaaagacattacaatcctttaattaagacatggatgcaatcaggtttggcttttagaaagatcacagctgccacatggagaatgccacatggagaactggagggttcaggagtaggtgcacccatgttgcaggagcttaggagaaggaatggaggcaataattggaaggattcaagacaaatgtaggcagtgaaattaacaggaatttgttaagtaagtatgtgtgtatggggggaggtatgaggccagattctgacttgagaaataagattgttggtggtaccaatctcaattataaattacacaagaaaaacagagttgggagtggtgtaaatgatgagtttggtgtgttttattccaagtgcttgtggcacatgaaggttgaaatatccaaaaggctgctggatacataaatcacaaagaagagatctgagctgaagacatggcctctgaaatcatcagcatcatcccactagtggctgaaaccaagggttgatgggagaatagcaaagcacatagaagaggaccttgaggaacaataaacataagggctgtggctagaaagaggggaccataaagatgactgagaatcagtcagaaccagagatgtcatggaggccgaggaaagagacttgcaggaaggggtgggtaacaagtaagttacagactgagaagtagccaatgaatcgagcaattaggctcttttctgtgagttgtttctggggaagagagttatgctgcctatcataacaaggcagtgtttcttctccttttctttctcctctaccatctcttctttctccttcatctttttcttcctcttcattcccttctcctaaccctcccctcctccttactcttcttcgcagaccccccaaattcttaagaccaatgggaagtttaaaaattcaactatgtaattcacatcctatagttgcttttggtggaaacactttctctaatatattcaagacagactttctcatctaagataatttgccctgtcatctgtaggtgattatttgttctagggacagaagagctcctgaataacaggagtattggtagggaaagaaagaagtctgttgcagtgttctaaatgtgggagttgggggggattcagacatcaggtttcgggaataaagagtatttgagtgttgatctgagaaagaagaggtgagaggaaatagaggagatgagattaagagccaggcaactgaacacgtgcaaaaggagggtgaatgtgcagaagtctagatcttgagagcaggggaggaagttaagttttgaggttgctagagcagaaacacttgagcaatagatgccaggctggcggccgtggttgggtagaaaccaaagacccatgggcttttgctccctgagggcactgactaaaacttctctcctctcacctagtttctctttgatctttgctgtttggactatccactacctcattttcaatttgtttattcacttatttattcaaaaaatgcttgttgaacgtttatacgcattaagaagtggttgttgaacattcactacgcattaagtagcagatatacagatggaaacatggcatccttggcctcaagctatgctgtttaaagtagaaattggaagacccatgaacaagccttccctctgactgtgaaaagtggtataggggaattcagtataagttctgtggagatcctcaacaggaggacacctatgtctttctgggccatcagagaagccttcagagaggaatgaacttctgtggatccttcttcacagtttcaggtgcctcttactttgagtagcgtctgggatgcccttgcctggagaaatgatctctcctgtctgctgctttctttgtcttactgaggctttagggattatgtctcttggaatttttatgttgattttttgacctctcattcagatctctcattttggtattttgttctagttctctattagcaggttgcaagttttggattagatgatgtctgctctacacctacttcttgggttattccatctcaggaactcattacttcacaaccagagaatgcatatttcatcgttttaagtttgtttcatactcgtggtggtggtggggaattctaacctccttgtctctggccaaacctaatgacattgatgataaaggacttggaaataataaatgaaatacggtcactctgtggaccaggataatgttctcctaggaatgtcttcctcagttacacacaacaagaatctggctcttagaacttcaaaattaaacatccaagtctactgataatggagcattttaagttagaggaaatagtattcttggaaactaaccaaaatagttagaaaataaaatgggtttagtaggtgctttcaaagggtgtactacagacattagtataaatgagcttggacaaaaatcccctgtctctggtatatgtatgtcactccacactatccctttctttctcgacaaggagattttgttatagaatctgcctaatgagaaaatcagaaaaagaaaaggtgatgttctcatttcaaaacaaagcttaaaaattatatcaatgcattaacagaaagatatgttagtgtactttaatagattttatgtgattcattcacagctatgattttattgtgaaactgatttcttcataaactgggttcctatgcagtttttcccaggaaaatgaaaatggatgatcaaaatgataaatactataaattagtgacagccttctgggtaatcaaaagattattttaaacgtgtagaaaatgctaaaatgggtcttttcatctctcaatttcaagtgaggcaacaatatgatagacattagacaccaaagtgggtgtgaaacagattgtcatatgcagactttacaaaaggaatgctcaaagaacagtttcataactttgaaactcttgagtgcttaatttactttgagaatataaaagtgtaaagaaagaggagacacgcggggacattatcagctgattttctggggagagaattatggctgtctgtgagtttccacctctcttccctacaggaaaagaggggtgtggaggggctgtcttctaatgtcaggttgcaggagagggaatttcacgaggtcatttggcaagttttctgtatactcccttgcagggaactgcagttggaggggtcagggactggtgcctgggaaagctaaggaggccagtggcagctagaaggaggtggtcactttgtctcagcatttgtcagtaggcggtaaacacaaatgtttcctgtggaccagatgtagagagagatgagtccaaactgttttaagtctgtgataggcagctttcaaaaatggcctaccatgattcctgtcttctgttattcatgcccttgtgcaatctcctcccttggagtgtacgctggacctagtggcttctttctaatcaagagaatatgataaaagtgatgggatgtctctttcatggttaggttacaaaagactgtgatttctgtcttgctgggcactctattcccttctcagcttgcatgctttggtgaagcaagctgccatgttggagaggactacctggcaaagaactgagggtgacctccagccaaaagccaggaggagctaaggccctctgtccagaagtctgtgaggagctgaatcctgatatcaactatgtgagtgaactgggaagcagctccttttcagttcagccttgtgatgactgtggccccagctttgtaagagaccctgaagcggaggacgtatctaagccaggcctagattcttggcctatagaaactgtgagataataagtgtggattgttttatttaattaattaatttatttgtttattgagacatggtcttgccctgtcactcaaactggagtgcagtggcacaatcatggctcactatagccttgatctcccaggctcaagtgatcctcccacctcagcctactgagtagctgggactataggcatgtaccaccatacccagctaattttaatttttttaaaatatagtactagaaatgagaccctgatctgttgcccaggctggtctcaaactcccagcctcaagagatcctcctgccttggccttccaaagtgttgggattacagggatgagccactgggcctggctgattgttttaagccttaagtattaatagtatggtaatttgttatccagccatagctaacgaatacaaattcctatccaaaaggacaccctggggaatgaggaagctttaacggtaagagtctgtgtagagtggacaactcaataaccagtacagagtgggaaacagcagcgagggggacagaacatgtcactcatgtcaaggaagcccagcagaggagcctctgatgagctcttagaggcacccatgagagaaatgatggattgtaacatgtatcaggcccaaaaagagcaaagccataagcaaagaagacttcccttggccctctttcccttccttcatccctcataccactctcagaggggctgaggctctggtcagcaaagaagaaacaaagaggaagtgagtaggtggcaaccacacccctgggcccttctacaagtggtctgcttaaagcagctcccagatgaggaaggaaagaagattttgctctaacttcagtttagatattaatatttggggctagccaatttctgcttgtgaattgagcttgccttttgtgacttaaaatgaccagaaaagccagcgctttctttcaggtactgaggaaaatcatccccactgaggatatatttaaagttgtgttttgatatatcaccaactgtgttgtttgacatgctggttacaaatatattttaagtctttgaaaattggtagattagttattctgtctatagcaatgttcctaactatgtcattccattttccaataattttaggcaataatttactatattattctttattttgtttctgtaccaggaacataccagaattctttaaagttcaggatacaatctcttgggatttttaacataatgtttacaaattaaaatctggatgaatgtgtgcacagaggttgtttaaagcagtgaaacttctctgtatgatgctataatgatggatacaagtaattataaatttttcaaaacccacaaactgtacaataccaagagtgaaccccagtgaaaattatgggctttgggtgataattgatgcaggtctatcagttgtaataaatgtaccactctggtgtagggttttgataggctgtgcatgtgtgggggcagggagtatatgtggactgtctgtgctttctgctcagttttgctgtaaacctaaaactgctctaaaaaataaagccatagctgagcatagtggctccagcctgtaataccagcactttgggaggctgacatgggtgggtcgcttgagcctaggagttccagaccagcttcagcaacatggtgaatccctgtctctacaaaaaattaaaaaaaattagccaggcatggtggcttgtgcctgtagtcccagctactcaggaggctgaggtgggaggatctcttgagtctgggagtttgaggctgcagtgagccacgatcacaccactgtactccagcctgggtgatagagcgaaaccttgtctcaaaacaaaattaaaatataaaataaaataaaaccataaaaataaattaagatcgctcccttcttggctgtatatgggatgttattaaatatgtaataaatttgtaatatccttagagaacaaagagaaagaagcttatcttactattgagtttatttggattcagcaatgaaagtaaagagaattgaaatctctgagggggagtacttaggaaaaagtaaacagaacataactagcctgacaaaatagaggagaaaagagaaaacatttacacagttacagatggcatcttttaattaggtgaagtggtaagccagcccaatgcattctctgtcctcctctgctctgtgccccaagagactggcctcactggactctattgccaagatcccttgcactttggtttgcagttggatttggctagtggaggaaggtcacatggccacttgttgtcacacccccttgccctggcactgtcttaagagcagccatgttcctctatggtcacagagtctggagggctttcttcttctatggtggctgctcttaccaagctctgataatattatttcctgtcccctgcctctttaggcctagtgatagtagtggcttcttgccgctggtagtttttgggttcctcaacacccgccgtggttcccttaatcctggccacacctctgtgaaggatcccaccactaaaaatgtccttcaaaatcccagctgaatgtgctgtttctttcctgccaggatcctcattgacacacgaaggagccaattacgttactgaaagatccagaaactgcaatgaaataacctaatctggttaatagttttattatgtagaaagtatttgctttctacatctatccacgtcttagaattatacgacctgcttacttttgctttttgtattatttgacagcaagtgctcctgtaaccttctttcaagaccttttgattagaggagattattttcagttttttgccagagtggactctgaaccattctttccttattggactcttgtcgagctgacacttgctgtacacattccacaaaggccttgaacctggcctctgacctcctgagatccttggcagtggctacttttgttccacctgcacctaaccatgccatgtcggggggattttatgctttgaagtctggattcagcaactctaagctggctgtaggaaattaattatatggaaataaagttgaaaccacaaaatcacctgctaaccaaaatttgctaaaatgaaatttccttaaaacaccagtgttaattcattcctcagatgcatgccaggtgtgacaaatgaatcctctatgctgtggaggttgacagattcagactttatggaaagaggaactatagccaatcccaaacctgggtcctttccagaaaagaaagctgtgccttctggcacaagaccaaattacccaacctgggatctgtttgtaggattttgtcttattaatttttatggcattttgcctaaaacaaagggcacacacaaaaaatctgtatttggttgatgtttcagatgaatggaagtttaaattaatagattaaaatccatccttagaattctaacaccgtcaagatgtggctggttaataggtaatttaatgtagctaaaagaataaaacttgtttaaaaacaggaggctctattttccaaaacaaattttggtggtcactagtgttagttacgaattttatctctcttcttcaggattgcatttcctgcctctttgagattaggcatggccacatggcttgctttggccaatgaaacgtgagagaaagtgtcaggtgtcagtcctgggtgaaaactttatgcatgagtgtgctatgagtcacactttctttctttctttctgatgttatatccagaaaggcttgtgatagtggctactgcattggcctgaatccctgagtaagggccagggaagtagagtccctgtcaacccgaggtgatcatgtagcatgaatgagcaatatagctttgttgtttgaggccagtgaaattctgggattatttttcccccatgtaactgagcccatgcaggagtgacaagttcctgataacctcatgctaaaacacaaaaagaatagtctcacaaaaatactacatgaggaatacagtagtcccccctcatctctgggggatacattccaagaccccctgtgaatgcttgaaacatggatagtacccaaccctgtatatgctatgtttttttcctatacatacctacctatgataaagtttaatttataaattaggcacagagatgaaaaactaataaaatacaacaattataacagtatgctaccataatcactcttgtgctttggggccattattgagtaaaataagggttcctcaagacaagcactgcagtacagtgacagttgatctgataatctagatggctacaaagtgactaatgggtggggaggcagacagcacggatcccctgaacaaagggatgattcacatccttggtgggacggagcaggaaggctggagatttcatcaagctactcacagcagcatgccatttaaaattcatgaattatttatttctggaattttccgtttaatatttttggaccacaattgacctcaggtaactgaaactatgggtaagggggcctactatattatatttgggagttgcatttctgatcaaggactaagcagcaaataaacctaacaatcatacatatgacctgtaggtgttatagagaaacaattttactttagagtagatatatttataaaatagaaattcaacagctataaaatttcattataatttaaaagtcttttttatttttttgagacagagtctcactttgtaacccaggctggagtgcagtggtacgatctcagctcactgcaacctccacctcccgggttcaagtgattctcctgcctcagcctcctgagtacctgggattacaggcatgcgccatcacaaccagctaacttttgtatttttagtagagatggggtttcactatgttggccgggctgttctcgaactgctgacctcaagtgatccagccacctcggcctcccaaagtgctgggattacaggtatgagccaccatgtcaggacataatttaaaatagtcttatgcaatgcacactgattctgtaagaaaccccaactatgctgtgtcattagttttaccttccataaataatagaattttagaaacttgattttgttgttgttgtttctttttgttgtttgccttcctttcctgagctttgaggagctctggtggagagcagggaatggaggtggcaggaggggaaatgagttgatgccttttttatcttatgacaaatattcctgctaggttctaaaatcattcaaactactctcaaaattgcatttgtctgtttcaagaagtcatggcatccaaatagttgaagacctctttgagtattttcattctgcacacttgtagggcggggattcttgagttggatttgtctggtccactttcttagcaggtttgttttcctctttcttcttcccattaaacaacagtgggttacatttaaggtaaagaaattggatcacagagtgtccgagggctgtgggaaggagggagatagtggcctttgcacgtctgctttgaggataattttgtgtatttttcgaaaaaccgttccgtttattttttagcactaggtggtaaagacttagttcccacaagcctccctgagttggttcctagttctggcagcagtggcctctcaggaagttactagaaacttcaaaacagccaaaagagagtcctgagtgttcttcagtgaagtactaggtttaattttccatgggttgcctattttaaaactatgcagacaagattaacttgtggattttttccaaaagaagctgcaaaaaatttctgtctcatggaagaatcatccctgaaaagtttcttgcctggtaagacatggaccagttattttttttaaatagatacccagattctcaaaatttttttaaaaaatgagtcctaacatcttactgtttaccttattaattagtaagttaaataaaatatatgagtattctttttatatttgtctgagagtcatgattgcagcaaaggcaggcagggaaactgcattgtccatcttcatgctggaccatggcagaaatttaaagccaacaaagccaaattaaaagctgaatttaaagccaacattgatatataattcacataccataaactttacctgtcttcagtcttttaggactggaagtagttttcaaatgatcgaaaaacattctaggaagagaaaaactaagctattcgagggcagttttgctcagtgtctcaggacggtaacatcacccctaggtttctgatggtcgttggattaaggaaggtgtttgtgaatctttgtttcccataaatgtcatcagggctctgcttcacacaggggttgtatccaaccagagcattctgttttatttggtctgagtttgctgatgttctgtgacaaccagctccggatgttttataaacaattaacctgacagtttgatggatgagggtaacatttgggtatcatctgcactacaatgaaagacagatgattatttttgacagaaacgatcaccactcacaatgtggaaatggtgaagccagatccccgaggctcacactgtctatagaattagggccagatcaaaacccacttgagagtaggcccaatagcctgggtgacggacccgatttgggcattggatgtgagctgcaaaggcacacaatgtgttttagaaaagcctatgtttgcagttccaaatgtgagtgaaacaaagagaaagaaaggcaagtccagctctggcaacactaaaatcaacaggccagcattggccctgggattcattttaattcacaacgtagtttttaatgttctttaagttttgtgtcctattttatttcttaatcaatttttaaaaattggcatataattcacataccataaacttcatctgttaaaatgtacaattcagtggtttttagtattttcgtagatatgtgcaaccatcactctctttccagaatatcctttccatcaccccaaaaggaaagcctgtactcattaacagtcattttcccccaaaccctggcaacatgaatctactttctatctctatgggtttgcctattctggagtttcatgtaaatggaattatctaatattggtattttgtgtttggcttaattgacatagaataatgtttttgaggttcatccatgttgtcacgtgtatcaatattttattcctttttatggccaaataatattccatcatatggatagaccctattttgtttatccattcatcagctgatggacattgggcttgtttctactttttggctcttatgagtaatgctgctacaattattcatgca

SEQ ID NO: 2469 - DNA, 1807 bp, Homo sapiens
ccctcggctgcggggtagcgggcagccctgcgctgccggccgcctagcctgcaccccccgccctgggagggaagcctcgctccagccgcgtcgtttccgcgccgaagtggcagttgctggagtaccagggcaccaagtggaggatgtggtagacagcctctaagatgcgccccctgccaatgatctctgcctccagggaggagctagaaggcagagagaaagccactcaggacttcccatcccagaagataaaggtgaggaaagcagcagcagcagccacaggccagtattccagagcagctttgggttcctgtcaagacctgctttgagaaggaggtggctgtggggctggagggctgggcctgttcctgagctggctgctggcagcacagcaatgaggcaacattgagaactgcgacacgaggcccagtcctgctactaaaccaactgtgtggacttgcatagtcacttcacccctcgggcctccatttctccactttggaaagcagtgttgggacgatgttaagggtttgcaaccttccaacatgaagacttatttttaaaagcaaaacatttcaaagagtccacatgacagtagtgttcattttggcatctgttgatttaacaaatacaaaattaggctgggtgtagttgctaacgcctgtaattccagcactttgggagaccgaggcaggaggatcacctgaaatcaggagttcgagaccagcctggccaacatggtggaactccatcactaccaaaaatacaaaaattagctgggcttggtggcacgtgcctgtaatcccagctactcgggaggctgaggcaggagaatcatttgaacccgggaggcagaggttgcagtgacctgagattgcaccactgtactccagcctgggcaacagggcaagactccattaaaaaaaaaaatacaaaattaggcatggtggtgttcgtctgtagtcccatctatttgagaggttaaggcgggaggatcacttgagctcaggagtttgagtttgcagtgagctgtggtctgcctgtgaatagctgctgcagtacagcttgggcaacatagtgagattccatctctagtctttaaaaaaaggaaaaatacggccgggcgcggtggctcacacttgtaatcctagcactttgggaggtcgaggagagaggatcacctgaggtcaggagttcgagaccagcttggccaacatggcgaaacccatctctactaaaaatacaaaaattagctgggtgtggtggcgcacgcctgtaatcctagctactcaggaggctgaggcaggagaattgcttgaaccaggagggagaggttgcagtgagccaagatcgtaccactgcgctccagcttgggcaacatagagagatcccatctctatttttttaaaaaggaaaaatacaagggataccagagcactgggccagtgcttgttataaagtccatcaatgggccaggcacggaggctcacacctgtaatcccaacactttgggaagccgaagtgggtgaatcatgaggtcaggagttcgagatcagtctggccaacatggtgaaaccctgtctctactaaaacttggtagttttttgtaaaattagctgggcgtagttgtgggcgcctgtaatcccagctacttgggaggctgaggcaggagaatcctttgaaccccggaggcagaggtttcagtgagccgagatcacgccactgcactccagcctgagtgaagagcgaaactccgtttcaaaaaaataaaataaaataaaaaataaaaaaataaagtccatcaatg

SEQ ID NO: 2470 - DNA, 10934 bp, Homo sapiens
caaccaataaatcatatttattctagcatagctctaataatccaggtgtgagtccattgtatattggatttgaaatacataagacttgaagttgtcctgtgctttatcaagttcgtatcttgaattcatttaaaataaaaatccttgtagagtgcttcaatctccatggagaaagaagacctatattaaatattagattaatgcatgttgttatatagatgcactgtcaacaactttgggaaaacagtgaacattcaaggatggctagaaatgaactgcatttactaagctaatattttcctttgaagaaacattttggtcaatatttgatgccctgtagatttgagcaagaaagataaaggcatttaggtttgtgattgctcttggcaagaaagctagtgtctgtaagaaattaattacaaccaaaaaaaaaaaaaagaaagaaaaaaccaaaaccttaatgggtggagctcataggtgaatgaggacctctgcaaattgacatggatttcaggtttaactttcttgtaatggaaataaaatacaactgaacatgctctcattttttaactctgtacaaaatacctactcaaggcatctttgtattttggttccaggttctcatcagagaattaccgaaagtcaactctgagcagttaccaatggatagttttaagcaaatcatatatcagagaaataatgtaataggcattttaattagccattctcctggattccctaaacttagtccctgcattaagaaagatcattaggaaataatattcctgaacccatttcatttccctgaagaaatatcttccctgagtaatgccttaaagttttcttctgcaacttttataaacaacagatatataaaactccactttgaacaaaatggatgtgccctgtgcaaaatcccaattgaaaacttcacaggatctgttaccctatatctcttaaagagtcgcatagttgatgcctctttgaattcgtaccactgaagtatgtcactgcagatgagcttgtatgatttctattagtaggcagcatgaagtcatcatgtcttccattttgcccaacgtaccagaacacccagaattaaaacagtatattaattaatgaaattaatatgcctgtaaacaaaaagtaacatggtatttgtctcattgcttttttttttttttcttttttttttttttttgagacagagtctcactctgtcagccagactggagtgcagtggcacgatctcggctcactgcaacctcctgcctcaacctcccgagtaactgggattacaggtgtgtgccaccatgcccggctaatttttgtatttttagtagagatggggtttcaccatgttggccaggctggtctcaaactcctgacctcaagtaatccacctgcctcagtctctcaaagtgctgggatttttacaggcatgagccaccgcacccagctcattgctacttttattaatttcttttaaaattatgtttactttttaaagcaaacttaaacaaagcagctcaatctccctgcaaaaggctagggtacctttcagcagcagccccctggtggttgttataatgctgtgcccatctttcctgaaagaagtctagagatgaaattacatcaaggaaacaaatctgagtatcatcacagtctggtactcttaatcatacccttggtccttttcaccgtgtccagtggcaggtaccttctagctggaatagtgatctgttcttatcacatcacgggatctgttaccccatacctcttacataaagaaacacaatggatgcctctttgaatggagagagccatttcatcactataaatacttgctttgggctaggcagtaatttggctaactggaagatatagtaaaagcaaaattttgtataccttcacccctaggacatctaagctatataaataaaatcttaagaattttttcgggtgtactatagtttctcaatgtaatgtgaaaattattttaaaattatctgaggatgtacatatatatatataatgtgtgcatgtgtgtacataaaatatatgagttacatatatatatataatgtgcgtatgtgtgtacataaaatatatgagaaaatgaagaaataaaaatttagaaaacctagattgtgccaaagggcacagtagatgttaaaagaaatgaatctaacgttaatgaaatggaatttgattttgaataaaaatggtagaggttggcacaatcatgatggggtattatacaaaagactctatagttaaggcctcacttaaatcctttacttaatagtaggtttccagttttataattactgtttaaggctgtccattcccttagcacatcactcccctgacatcagatcagtgtccttgaaaatctatgatcatgttttcccaacaactttacttgtagttcattttgttccattctctgagcattcttagcttatactttaattttatcttcattttatctctcttggacatgagccagtgtgttatgccatgacttcaagggatggcaaacaaatactgactaattgaggcagccacacagctccaactctagctcaggtgtgtctacaatcacacacacacacacacacacacacacacacacacccctcctcctgtaagaacataatgattctctcagcactatctcttctaatgtatccactgcagctttaaattcattttctttagggaagctttatccaattttgcaactcttacccacatagtctcctcactacccctatactcacatatcttccccagtcattatcactatggcttatggtcaaccaccctcttgaatctagcattatccttacattctagtgaaaactattctcagtgatctataggaaattgcctttaaagcctttccggttatcttccaccctctgttttcaatcacaattaactacatgcaatcccctgactactccagactctgggtgttattacctttcctagaaacactcctatccttacagctccatcccctatagctcttagtattcattattttctctgaagactcaaagcagagctcaagtgtatctcatggcaaattttacataactctctgatatctcacaatatcttgtaactactttttagtgtatagccaccccaaacctctaccctccatgtggctggaaagaattctatgatggcatagtgccagccataaataggtgctcaatatatgtttgtagaatgaatgattgatcttcatacaatttctcacatatcaaaatttccaaatcaagttattaacacttgttagagttatagagatattactagtttggaaagaagtaaaattggcactaagatgtaatgaaatcataatggggaagccttgtttagattactttttagcaaattttccttgattcagttcgttccaaaagacccactaatgtgacaattgtggtatttatgtgttcattaaataaattatttattgagcacctggaatattcctgacactgagattatatcagaagtaaaatgggaagacaagtatagttactgcccacataaaagttagagaggaaggtgaaaattcatacaattgcctgaaattagaattaaagtgataaaacaggactgggaaacacaatcatggtcccacacatactttgcttctaaaaaggaaacaaacctgttgttctgcaaaagcaagataatggaaacaaaaatatctttttattttctccctcctgtcccactcagaaaaaggatatgaaccaactaaaacattgcacatgaattctatcactggatagattctgctttttgaggcaagcagggtgatatttccttcccccttcccccaggacatcataccagtctctatatccacaaagagactgcagtgctcagaaaacaactggccagaaaatagaaacagttcttaagtacatgcataaaaagagaccttggagtagaatattctgagcattattcttttacatttattgcactgattcaagttgttacagaagaaaactaaaatggggtatcttgagcagagagtgccatatgattgaacctcaatagggttgtattaggtaaaagcctctcaaactccggaaactgaaatagaaactgtgtggtataaatttctctcttgccatgcctgtcagaagattgaacaaacagaacaaattctcaagtgagtggtaaatgagatcaaaggcaatccatatactctatttgtttacaaacaacagctgaagatctatttttttcaacgaagagtaaacaagctagttaaagagagcctatgaagaaaagctgtaggacacactagagcaagataatgaagactcagaaaaaggtataggtcgaacactaatttatcatgaaaatcagaggatcagcccagaaaataatatgacctctatgacacagaaaacccaaacaaaaatcacaggttaagagacaattacaacatgtgagagtgagtgttttgaagatttcaaagggaaccaacacaataggaaagaaaaaagagggagaacacaaacaaaacaagcaatgagtaaaggtcaaaaataaatatataaagtattttttttcttaattggaaaggaaaaatctgcataactctgtactaataaatgtaaaattttaaataaaatgtattatatttggagaaatataaatggcctagatttgctcataaggaaatagaatggctattactattaaaaaataacgatcctggcaaggtttcagagaaaaggaatgcttatacaatgcaggtaggaatgtaaattagttcagccattgtggaaagcagtgtgacaatttctcaaagaacttaaaacagaattaccatttgacccagcaatcccattattgggtaaatacccaaaggaatattaattgttctaccataaagacacatgcatgcatatgttcattgaagcactatccgcaatagtaaagacatggaatcagcctaaatgcccatcaacagtaaactggattaagtaaatgtgatgtatatacaccatgaattactacacagccataaaaaggaacaagatcatgtcctttgcagcaacatggatggagctggaggccattatcctaagtgaacgaacactaacaccacatattgtgagtgggagctaaacaatgaatatacatgaacacaaagaaaagaacaagacacactggagtctacttaagggtggaggatgagaggaaggagaggatcaaaacactacctattggatactatgcttattacctgggtgacaaaataatctgtacaccaaacccccgtgacataccatttacttatgtaacaaagctgtatatgtacccctgaacctaaaataaaaagttaaaaataaaaagttaaaaaaaaaaagaaaaagaaataacctgaaagtgccaagaatgacgttttctcttcttttgtgtaaggtcctcttctataaccaaatgggagctgagatagatgtgaatttaggggagggaaagaacccctctctgttctcagtccagcaaaccaggattctctgaggaaattccacaccaagccctgacggcaatgaagttttgcagtcttgtctttggttcatttcctccttgaacaccttgggaagaagagagctatggtttgaagaaggattttgttcctctgagactccttgaataatactacctaatagccaaccttgctaagatttgatacagttcaaatgtggccttactaatgaagaaattatcagaaaagtaactcaaaagggggttcactgctattttctgaggagagtgatggctcatgtggaagagaaagttaaatgccctccaaaattgccagaatacagagacgactttgggaagtggctccacagacatagatgacattctccaccctcccaaacaggtaggtgggcacatacaactagtccttattagactattaaatcagtgagaaataacttctcacgttaagctactaaatcgtggtggttttcattgttgtagcagctactctgagcccaatatagaccataaaataccactttgcctaccagttattgtgtttttttttccccatggaactccgtacacacacatttttttgtttctggatacaatgaagtggtaaaattaatagtttgtcactcaggagttccaatactgcttttgaagtattgtgttatgcaacaggatttgcaacatttggctgaatgcattatcaaagtgactctgctgactttcctgctggtgacagttttgaagtgcttgctcaaatctttagaaaagcatcatttttctctttgatcaatcataggtagatatatcccttcacattcctctcttcctctcatttattctccttttgccacccacacttactctgatgcccttgatacttatagagattcctaaccaaatagctcaatttttaactgcattttttacaatgaacaaatcagcatttttccatatctgatgaattattggcaattgaagaagtgggtattattttgcatttaatgtataattgttgcattctagctgtcactggtattacctattggaaactattaccatggtgttgatcatttaagagacaggtaggctgcctttggaaactggactaactctttttatgttataaagatgtataaatcaaatttcctttgtatgtatttagcacaagttcagatttatgcctttaataagacacagcagtgatccggttgcatatctgaaactaacagtctgcagaattttccctatgggttccatttgcctgcaagccatgagtaggaggctgcatggtcccaaacagagtaaaaacattttccagaatcctgctgggtaagtcaacagtggaatggacctctaataaggaagtgggtagttagaaactctgtaatcacttagtgatcatttctatctgcaaacatttgttgttggctaagtgccatcacatttcaagaaatgataatttctttactatttcaatggattcttgattcccccatattcttggatctaaggtctcaaacttctcaaacagattatgagatcctttgtgatctagccaaaatgtgcttttctaggtctatctctcatactgccatactttctcacaatgactccactcttacacacacacatgcacataccttctttgctccaagaatatgagctgttggttctgtatacattcttgtgcacatttactctagttcccaagttggctaacaatttctctagaaagactttcttcacggtttaatccttgaaaagaagactgacacaaagatcactctgccagaggacttttagaaataactttgaggatcagtatccgtagatggaaaaagaagaaatcagattgagcaatgagagaaggccagctgtgatgaaattcgaacagaaatctcagatgattctatgaagagttttgaagctgacccttcagcattgccccaagctgggggaaaagggtcaggaatttatatttgatgtcaatcaggcactggacacaaagtgctgaaggaagaaatgtaaccttgagtgagtcagctgtcatcatccaagggagtacctgaagggaaactagagctgtaggcaatctgccaggaggactctcagcagctgaaggaattaagtcattttttctagaagggaaatctagaaagcacatcacagaatccactacagtccacccttggctccactcagatctgcctttttttataaactgaaaatattttagatcaaaatgtataggatgcaactaaaacattatgctgaggaaatacatagctctaaaaagtgatcaaaaaatctatcacaagtagttagaagataaatgatttcaaagaatgatgggcccccaaatgggcaaaagctgtcagaatcacatttgtcagaactttggaaagattttttttaatcaaaggttcataataatcaaggaaatgtacaattataaaatataagggcacttacacacagtagaagaattttgtgtcattttaacttacccttgcccaactccaactcactgacttatttgaagacagcatccgatgtttctgatgtgtctttggtatcaaagggagaaaaattaaccttgttctaaagaaattgtgtttgtgtgttttgacctgtgtgggaattctctgaaggaatgacataaggtcttgcctctgtttcacctaattcagaactttctcagaacggaactggatatgctgaggtcattttctgaaaacattgaaaagcaaatgagcagctactgctacctatgacaaaatatagttgttgaaacacacacaagagacatgccaaaatcctgggagaaaaaagctgaggaaaatgtgttaacaaaatagaaaataaatacaaaattgagagtgtggtcaggagaaagagatccagttttagtcatgaaacaacagaaattattacagatccaagagcaaaaattttgaaatttgtagagacatattctgaaaacatttcatcagaatagacacagtgaaaaataaaaaaaactaaaattaaaacctgaatatggtttaatattaaattaatcaagtcggtaatgtaaaacttcctaccaaaaaactccagatctagattgtttcaccactgagttctgccagacatttaagaaaaaataattttaattgcatacaaactcttccagagaattgaacaagtatttcagttttcaactaattcaactggttttgagaattaacactgcctggatagcaaatgccaacaatggcagtaaaagaaaagaaaattataagcctatctcattcacaaacataggtgtaaaaaattccaaacaaaattttatcatcttagaagcagcaatatatgaaaataatactatatcatgaccaagttggatttatatgtctatcataaatttggtttaacatttgaaaatcaataatttaagtatgttaaatatccagaagacatataaattacaacttctaaactagcaaaagcaaataaataatagaaagtggggacaaaatatttataaaactttgataaatccaagaaggcagaaaagggtgggggaagggaaaagcatttaagtggagaaaatgaaaacacaacatgaaattgtagaaataactccaaatacaccagtaaccattgtacatataaatgcactaacttgtcaagtttgtcagattagaaaacactgataaatcaagaaatagtagtagaagcacattatttaaagccgtgaaagtaataataagaactgaaaatagaagatattaaagtctttgcctctgaggagctatactaggaataagaagcaattgttaggagtttccctccaacttccttccaatttgaagtttgttactaaatgttaattataaaactcactcttaaccattcaagaattccactcatttacaagtgctcttttttctgtaaaacaattaaagtgcttattatttctctctaagcattatacgtttctagtttgttagccctaaaatgaatgataaactgaatcccaacttttaaattcttctttacaacaggtcactggccattacctagcagctctatatgggggtaacagattcaaagttccaaatcatggtcttattaaaaaccactaatcttccctttttgaatctgacaataatgttctcaagtttctttatttgccacatggacttttatacagaagattataatttctgccagcagaacacagccccttcattttgccaaaggaagattaaaactgatgattttaattgtttcaaatatattctgtggagaggtttcctggccacaactagatccagcaaagccacaatggaactatacccattttaattgtatttactatgccccaaaagctgaaaagctaatgcttttttttcagtatactgaattactgaaccatcacaaactctttcacataataaacaacttgtttgctctgggaatagtattttgtgaaacgatacagaaaacaattttagaactggaaaggaacttaagaacattcattttgtccaaatcattttccagatacggaaaatgaggcccagaaaatttaaaattcctttcttaaacttacagagagctaatggcaaagtcaggctagacctgagtctcctcactgccgcttcctctgtgtctacacaattagagaactggtaccaaggaagtttgagaagatgaaaatctggtaaaaaaagagaaacttcaatcataggaatcatgccccatcttatatcaagaatgtatctattgaacaacaattacagcaaaagggaagggcaggtcaatacacttgtgggcaggtcgtggtcatctcagtaggtcttggtcatgtggtccagatcacatggctgttatgttaatttagatcagagcatttatggtcaacatcacctagtgtacatgaatgataattgggctttctcaaatactcaagaaaaagccataattaaactgttttaaataataattttgtctcaaaggaataacttattaatgtaggcataggctgaatctaagatttaattactaaaagctatgtgatattttcagtgatgaagacctgtctaaaagtcttgagagaccatacgatcaccatgaagcagtttgctactgagtgcagcaatattttgttacaaatacaaaaaattgtgttaaaaacataaaatttcagccccacctagacctaactgcaagtagagccaaggatccgtgttctaataagctctccaagtgcttcccacacatgttcaatcgagaggttttcaaccatttttgcacaccaggatcacattttaaaacgctaatgcctgagtcccatcccatattcatatttattggactggagtgtagcc

SEQ ID NO: 2471 - DNA, 1309 bp, Homo sapiens
gctcttccaccctccatcccttcctctaggaagcccagtggtggccatgggagggcgtgaagttgttctcagacccacagggatggctgggggttgggggagggactcttagaccctgcctggcatccacagaaggccctggtcctggatcaggactgcaccgtgctggcggatcaggaagtgcggctggaaaacaggatcaccttcgagctggagctgacggcgctggagcgcgtggtacgaatctcagccaagcccaccaagcggctgcaggaggcgctgcagcccattctggagaagcacggcttgagcccgctagaggtggtgctgcaccggccaggcgagaaacagcctctggatctggggaagctagtgagctcggtggcggcccagagactggttttggacactcttccaggtgtgaagatctccaaagcccgtgacaaatctccctgccgcagccagggctgcccacctagaactcaggataaggccacccatccccctccagcgtcccccagttctctggtgaaggtgcccagtagtgccactggaaagcggcagacctgtgacatcgaaggcctggtggagctgctgaaccgggtgcagagcagcggggcccacgaccagaggggccttctgaggaaagaggacctggtacttccagaatttctgcagctgcccgcccaagggcccagctccgaggagaccccaccacagaccaaatcagcagcccagcccatcgggggatccttgaactccaccaccgactcagccctctgacagctacccaacagtccaggacagctgcatggcacccggcgggccgagcatgccatgggtccgctctgcatgccctgtctgtgccatgagtgtccctggccccttcctgccatgggcaggcccgcaggaagagccggtaggggtggaaaggggactcagatgagacacaccccacagctgccaccgccttgtccctcaacaagctcacccccaatcccttgcagccaggccacaatgggggaggtgagtccagccccttggaacaggcttgcccaacatggagggatggcgttggcagtgccagcctccccagcctgtgccaagcttcaacaggggcaagaggaggggccggcccctcctcaggaagctggtatgagtaaggccttgagggtgcaggcaggcagccctgtaccccacccacatagactatactgtacatacagattttgcagtaggcttggggcagctgggtttgtccttgatgtatgatactgttattataataattattattattctgccatga

SEQ ID NO: 2472 - DNA, 68461 bp, Homo sapiens
gggcaaggcttggacaagtgatcattagtcatgctgtcagagaaccatttctttctcctgcaataggcagcatggagaacagcttcttttcatccacctagtcccattccatctccttagtgaacatctgctgtagggacctgcagtctctgtttatggcaaggactttctgaatattgaatcatctttcacattctacagaagtcacagaagccaacacacaactccagagttaaacatattaaacccctgtcatcagagagaactttcaaaaaatcttgagatgggacccattggctcagactgagtcagatgtctacccttggaccaatcaactgtggtctctgtgaatgtaggctactattattgccctatttgagttttcttcccactcatgagccaatcaactctagacagaaaagggaatgatctgaagcttggaagttctcacaggaaccctataaatgaagaagaggacaggacatgttttaagacaaagaaaaacgctatgcaaccaaaatacatctactacaataacagtgattattaaaaagtcatttaatttctctaagcctcaattttctcttctctaaaagtgtatgaattgtctattgctatggatatgtatcaaataagatactttaaaagttttaaatgacaaacttctatacagttctaaaaggttgctctgattattacactggtgtcaccaaagtggtttctagattctatttctgcagagctttcatttgtaaaattggaatgattttctctactttttatggttatggactaattaaagagaaatatctaccatttatttattgatggtttaatatatattatggtaggaggtttgcacatatttccttttttaattttcaccacagtcctataaactagatagtcttaccaagcatactgtaatgtaaacaggttaagatgattaagttcctaacatgaattagtgtcagagagaggatttaaatcaggtctgagtgattccgtgattccaaaggcaaggtggggattttaaagagccatacaataacactcttatgtgttataattttattgttcatttttataattcaattataattggtttatttctgagctagtttccttaaaatttttaatattttgccattacatttttaatgacctagtgattatattaaaaatcctatcttttatgaagatataatgatgccatactgtggatttgccaagtgatgctctactacttgttgggagaaattaaaattttaattctgaatgagaagcttgatatttgtaaacaattgcaagaagagagggataaataatcacaacttgttcagaaacagtatgtcagcatccagggaggtttctggaagaattattaacagcaggttatcatctttggtcttaacagtggaaagtacaattaaggagtagttgttagaatttctgggttctgatccacctggacagaatacacattttcttttgtaatttatattagaaataagatacctggcccatctgagcatgtatgattagtttggtggaattgtgttctaatcagaaacattagagtattctgaccatttttgtaagaaaaagagtctcaattgcatggcaaaaaccccccaaaaaatggtattctacttttatgttcttaatttaatgacatgttagatactccagattccattcaaagagatgagtgggctagcttttgtgatatttctcattactgagatatcatataaccctttcaggtatttctgaaaacacatgagacagaatcctctcttcatgaagtaatatgtggaagtcctcttcattatatcaatgctgttagtgtttacctcttgactttcagaaagtttctgtgcaatgcctttcttttttggcttcactttaggtctctcttccattaatcttgcacatatacttaatgattctctttcaaagagtgtttcctttaaggattaagctcctttgggaattaatccaaacttgtaggtttacatagcagtctaaaatcatgaatttttgtatctgggacaacaactccatccacaacacattatctcatcatttactcagagagtattcagatttctttggacctgactccttgaaagtgagctgtccttcttatgtatccaaaaagtctcaggtgtattatagctttgctatttgaaaataatatcaaagacagcatcttacgatgttcaaaggcaatgttacattatttgtttttcagatgataggactgaaattttgaaggctgaaatggcttgctatggaatacaatgtcatgtggcagattgggaaggaacactcagggcttctggctcctagtccagagtaatttttgtgctctctttacatgtcaccttcatctgcactgtatcatttggttcataaaataatatggcattcaggcagaaacagatttggtcctccactagtttacagataagaatattgagccctagagggatttttgtccaaggctatatgacgagaaatgttttgcccccaagtttaaggtatttccagtacaatttgctggctttccaacttaaaaacgttctctatggcccattaataaattctacaatctctttttattttaaacgcccttcatattttttagatttcttatatttataatattttaaaatacatgttttattgaattaataaagcaataatttccatagtggtccaccctgaactctccagggaacctgcctgctgctcttgtagtataagaacagcagcaaacagcttttttgttggaagtctacatgagttctgttgctaataaaatgaacatttcttttttaattttaatttgagttggggatacatgtgcaggtttgttacaagggtacatttcatgatgttgaagtttggacttttatagtcccatcacccagatagtcagcatagtacctaatgggaagtttttcattcctttgaccatctttaggccccctagtatctattgttcccatcaatatgtttgtgggaactgaactgaagggaacaaactgaaggtttatctctcacttataagtgacattataagtgatatttggttttctgttcctgcattaatttgcttaggataatggcctccagctgcatccatgttgctgcaaaggacatgatttcattcttttttatggctgtgtagtgttcgtggtatatatgtaccacattttctttatccagtccactgttgatgggcacctaggttgattccatttctttgttattgtgaatagtgctacaataaacatatgcatgcgtgtgtgtgtgttgttttttttttggtagaatgatttattttcctttggttatatgcccagtcatgggattgctgggtagaatggaaggtctatttttaattctttgagaaatctccaaactgatttctatagtgaagtaatttacatttcctccaacagagtataagcattcccttttctctgcagcctcaccagtatctgttgttttttgactttttaataatggtcattctgactggtgtgagatggtatctcattgtagttttgattggcatttctctgatgattagtgttgttgagcctatttttcatatgtttgttggcctttttatgtcttcttttgagaagtatctgttcatgtacttggtctactttttaatggggttactttttttcttgttgatttaagttccttgtagattctggatattagttctttgttggatgcatagcttgtgaatattttcttctattccttaggctgtctgtttactctgttggtagtttcctttgctgtgcagaagctctttagtttaattaggtcccaattttcaatttttattttcattgcaattggcttttgaggacttagtcatacattctttccctaggccagtgtctagaggggtatttcctgggttttgttttaggatttttatggtttgcggtcttacatttaagtctttaatccacctttagtcattttgtatatggtgataggtaggggttcagtttccttcttctacaaacagccagttttcacagcactgtttattgaatagaaagtcctttcctaattacttatttttgttgagtttgttgaagatcagttggttgtaggtgtgtggctttactcctgtgttctctattttattccattggtctgtgtctatttttgtaccagtatcatgctgtttcagtcactgtagccttgtagtatagttcgacatcaggtattatgcctctagctttattctttttgcatagaattactttggctatttgagctcttttttggttccatatgaattttagaatagttttttctgtgaaaaatgatgatgatttgatacaaatggcattgaatatgtagattgttttgggtaatatggacaatttggacaatgttgattcttccaatccataagcatgagtgttttttctatttgtgtcatctatgatttctttcagcagtgttttgtagttctccttgtagagctctcctaccaccctggttacatgtattttatttttttgtgtatggctattgtaaaaattgtgttcttgatttggctcttagcttgaaaatcactggtgtatagaaatgctaccaacttttgtatgttgattttgtatgctaacactttactgaagttatttatcagatccaggggctttttggtggagtctttagagttttctagatatagagtggtattgtcagcaaagagagaaaatttgacctcctcttttaactatttggatgccttttatttctttcccttacctgattgctctggctagggcttctagtactaggttgaatagcagtagtcacagtacacatctatgaaagctaacatttcttaaatgatgtacatgagacaactttttaaaatgtggaaattattttcatctaagccaaaacaaaaagtttttgtaatttttttccttgaaaactaattgatgttaatttaagaaaatcattttctgcatcttttcaaaacatttgttaatttgctaatgtacattaggaagcagttcaataattattaccaggaaactatgggtatattccaattttcccaataataaatttaaagataatagataaattaatagtacagtattttgcccctaatatttttcctaaaagttgtagactctgaggaaatcacatctctgttcactaaggttctatatgcattttctattgctgcccttatcaattacaacaaacttagtggtttaaacaacacacatatattattttatatctcgatagggagtaaattggacctgatatggtttggctctgtgtccccaaccaaaatctcatcttgaattgtaataattctcatgtgccaagggcgggaccaggtggagataaccgaatcattggtggaggttcccacatcctggtttcaatatagtaagttctcatgagatctgatggttttattaaggggcttcccccttcgtttggctctcattctttctcctgccaccatgtgaagaaggacatgtttgcttcccatgccaccatgattgtaagcttcctgaggtctccccagctatgtgaaactgtgaatcaattaaacctcttttctttataaattacccagccttgggtatgtctttattagcagcatgagaaccgacaaatacaaattcattcccttgaagttgttagactgaggcaccattctttgctggctctcagctggtggtcattctcagcttctagaggtggcctgtatttcttaacttgtgggcccttttgtcttcaaatccaacaatgtaagttgtcatccttctcctgccttctctctcctgcttttttatgtgtcatcacatctctctgaccattgctgggagaggttttctatgtttaagagctgatgtgattagattaggcctattatgataatccagcataatctccccatctcaaaattcataaccttgatcacatctgcagagcctcttttgccacaaaaaggaacattcatatattctgggaattaggatataaacattttggggtccattagtctaccataggtcctttgtaagattctgtgactcttcaattcaagtttgtgtctgcagaataactccttttgatttcagagaaataaaaaatattgggaatattgtggcttctgtgatgaaaagtcttttaattttattacaattttaaaaactttatggaaaaatgaaatctgcctcaatttatgctaagtatatatcaaacacaagcctgattttttgttaattcaatcagttattcaatgcaattaaaacaattatactcttggttgtttagtgtcaaagtgactgaaggtccattttcaaggcgtgaagcaatgccatgcaaacatagcgttgaggcaaaaaaaaaaaaaaattaaattccagattgtcccccttcttccttcttcttttcgtcctaaggaagagaggatggtattatgggataaaatggtgggatttcaaataagatacagattatttaatttggatatgtttcaaagtctcatataaggaaccaattgctcttgaaataggaaggagactttccttctggtagctcgtaagaaaggtgagctgttgcagaggaatgagagcaatggtactgtaattattgctccacacaggaccctcccgttctttttattcatttgtttatttactcaaccatattcattctgagtttatctaaaccaggaattataacaaagccagtcattctacctatagccttctttccagcttgtctttggccactctctcagaggaaaacattatgctgaattttttgtttatcttttctttgacaaaaaaatatttataggccaggtgcagtggctcacgcctgtaatctcagcattttgggaggctgaagcgggcagatcacttgagcccaggaatagaagtttacagtgagctgtgattgcatcactgctctccagcctgggcaacagagcaagcaagaccctgcctctaaaatgttttttttaaatataaattctagaactgaaaaattcaataattgaaattaattagtcaacagatgcatttattagccaattggaaaaacaaaagataggattagtgaaccggaatataggcccacagaaaatatgcagactaaagcatgggccattaactgccaggcattttcaacttgtcttacgtggtacctgaccaataaccctgaggcaaagaccagaatggggagtgccagggttgtagactgggctccaagtctgctaaatgaatttttctttatgtatgtctaattttaaaaagcaagatacaacttttttcctgacctatatttattatcaacacttttgacatcaaatttgtgggggttttctctataccaatatattctccaactctatggacaccaactttgtgtcctatgattgaattcaattctgacgctaactctcctatgttagcactgagcccacagattaaagggctcaatcctaccaagcttcacctacttcagatggcaaatgccagtcccaggttgccatctttgcttttggccaaccagttataaattggagttttctatgtcccccttctcaagttccataatttgctagcatggcttttagaactcaggaaagcactttactattactagtttattatgaaggatgtcatacaggataccaatgaatagccagattaaaagatacatagagtcaggtatggacgaggtgtgtggaacttctgtgccctctcagggtgttcccaggacctcaatgtgttcattaacctggaagctctctgaaccccattgtttagggaggtttcattacataggcatgattaattaaatcattgccctttggtgattaactcaatctctggccccactctcttccctgcaggccaggagttgaaagctctaatacttcaatcatgccttagtcttcctgttgcctagttccaatcccaaagctaactagggaccctcagtcaccagtcatctaattagcatacaagagacactcatttctttatgcagattccatgtgttttaggagctgtgtgccagggactggaaacaaagaccagatactttttataaatgtaatatgttacatttccttttaatttgatgttgtcctttaatttatgattctagtacatttatatttattgtgattatttgtatatttggagctatttctaccatttaaaacttatgttttctcctcttccttttctgtgattgagttttcatttgtttttatcctccttttctcacatcttatttgcttagaatttatacatgtaacttctcttctttagtccttagctttataattgtattgtaaacatttactccaatagagccttaaagctaaacaccatcttgatccctctcctatatgataaatgtatattaaaacattttaggttttatctttccttccctaccaatgtagtggcaagtattttggatgggatcttgtgattaaaccctgtcagtttttatctgaaaatatttttattttgtccttattctgctgcaataattaatccaagttgacagttattttctctcatcatttggaagttcttattccataatcttcaggctgtaattttagttaagaattctgctggctgggctcacacctgtataccagcattttgggaggctgaggcgggcagatcacttgaggttaggagttcgagaccagcctggcccacatggcaaaaacctgtctctactaaaaatacaaaattagccaggtgtggtggcatgtgcctgtagtccctgctacttgggaggctgaggcaagaggatcacttgaacccaggaggtggtggttgcactgagccaagatcacgccactgcactgcagcctgggcaacagagtgagactccatctcaattgaaacaaaaataattctgctgtcattttaattgatcttcttcttttaaaaatatgagctgtgctttttctctagttgcttttatgaacaagagttctttggaaaggattttggaggaaagaggctttattccagtgaatagtttgcaaactggagaaacatagcagtgtaagacaaagatacattccaaaaacaaagagagggtttgggttttatagcaaatgttcctgtctagtttctcaaccaggttcacttatgcaaaagaagaattgaactttgcttagttatgattggtcaatacagttaagccctaattggttgatatagctcagcccttggactaggacaaatgagctctgattggttggtttccaaccctcaaaccagaaatctgtcagatgcttctttcaaatgccaggtgttggaggatttctggaagcagtttatcctgacactaacaacaataactggtctgccttgattctagaaagggaggtcctatgataacttttacaacaactttctgagaacgcaaactgtgtgattgctccctcacccagccatggccacctgttttaactttgagcacctcagccacaaggaatgtattttgtctgtaagtaggggctcactttaacacgtttaagattttttttgtataattttattatgatctgtcaaatatggatgtatttttggatctgtggtttcttattttgcatctctactgggaattttacagctattattgcctttcttttgttctcttcattttctttctttttatatatttttttgatcttcaacaaaatccaaagccttctcattttgtcctctatatcctctatatcttttattttcttttatttatttttttgagaccaagtcctgctctgtcacccaggctggagtgcagtggtgcaatctcggctcattgcaacctctgcctcctggctcaagagattcttgtgcctcagcctcccaggtagctgggattataggcatgtaccaccaggcctggctaatttttatgtttttagtagagatggggtttcaccatgttggccaggctggtctcgaactcctagcctcaagtgatccatctgtcttggtctcccaaagtgctgggattataggcgtgagccactgcacttggcctctatatcttttaatgtttacttgttttgtctcattatgctacattggggataaattattttgctatgtcttcctctaatctattattcttttttttttttgagacagagtttcgctcttattacctaggttggagtgcaatggtgccgtcttggcccactgcaacctccacttcccaggttcctgcctcagcctccagcagctgggattacaggtgcctgccaccacacctggctaatttttgtatttttagtagagatggggtttcaccatattggccaggctagtctcgaactcctgacctcaggtggtctgcctgctttggcttcccaaagtgctggggttaaagccatgggccaccacgcccagcctattctattattattactatttgtttgagtcggagtctgctttgtcacctcactagagtgcagtggctcaatctcggctaactgcaatatctacctcataggttcaagcgattctcctgcctcagcttcctgagtagctggaattacaggcatttgccaccatgcctggctaatttttgtatttttagtagagacagggtttcaccacgttggccaggttggtctggaacttctgacctcagggatcctcctgccttggtctcccaaagtcaaagtgctgggattacataatctattattcttttttttggcagggggagacggagtctcactctgtcgcccaggctggagtgcaggcacgatcttggcttcactgcaagctccgcctcctgggttcatgccattctactgcctcagcctccccagtagctgggactacacgggcctgctaccacgcctagctaatttttttttttttttttttgtatttttagtagagatggagtttcactgtgttagccaggatggtcttgatctcctgacctcgtgatctgcccacctcagcctcccaaagtgctgggattataggcgtatgatctattattctttaaaaaaattcttgctatttacctaatatacttattggcctttattgagcctttaatttcaacagttataatattttatttctgtaattactatcttttcagctcaatgtgcttatttctcatgttttttactctatgcttctctttgtaacttcacttttcttttacaaatttcatgcatagctattttcttttttttttctttttttttttttttttttgagacggagtcttgctctgttgcccaggctggagcacagcagggcgatctgggctcactgcaagctccgcctcccaggtttatgccattctcctgcctcagcctccggagtagctgggactacaggtgcctgccacccacacccggcgaagttttttgtatttttagtagagacggggtttcaccttgttagccaggatggtctcgatttcctgaccttgtgatccacctgcctcagcctcccggagttctgggattacaggcgtgagccaccgcaccaggcccttatagctattttctattatgtcagtttcaaggtctgcaattccttcactttaaatctttgtttttttttttttgtctgatgattctcatacatagcagcttgattttctgtgtatttgagaatccttgtttttaaggtcatgcttgcttttaatctgtaggagacttagcctacctgaggaaagtttccttcaaggagggcttgcttctgcctttgcctgtgggtgatttatcccaggcacttcagttgctattctttcagttatggctcaggagagggctctgagacttcaatttccgtcctggtgctatctctacagcattgttccctgggggcaccgctttccaggggcacctgttgatttagtccagctcgatgccctctggctgcccactgctctgactaactgctgctttagctcagacttcccttctctatgggctgggtcccgggatgtttttcctgaagccttcagggtttcctgctttgtatccagtctgacccagactccctgtcctggaagtcctggaattagcaatattttgttggcttgtctgttttctttttggtggtggtggtgttgactccaggaaatgtttcctaccttttgtgacaccagtggttgtctccaaggaggtgcagtattttgtctggttatgaataaaatgattgctcataccttttaaatactagtgaccctggaagtaaaaacaaggtgatgacgtcttggcactgtgatatacaagtggcagtcccagaaagtagctatgtttgtatatggagagtaaaagaaccatatttaagatgttatattttgagaggcaaatgttggcattagtatctttcttgtatttgtgaccgtctaacaagaagcagcagccagagatttgtcaacattggaaaggtaaaaagtattggtagggcacagtggctcatgactgtaataccagcactttgagagactgagttgggaggatccctcaagcccaggagtttgagaccagcctgggcaacttaaggagatatcatctctataaaaaaaattaaaaattagcagggcatggtggtgtgcacctgtagtcccatctaccagggaggctgaggcaggaggatcacttcagcccaggagttcaaggctgcagtgagctatgatcatgccgctacattccagcttagctgacagagctagaccctctgtcttaaaaaaaaaaatacagtcaaatttgtgtttgctttatggaaagaaagaaaagataattccaatgctgttaagaatattctaattattaaagtattaattagctttaaatataaactattttcccttcctactagaaagcaaaaaaactgggtaatatattggccgggcgtggtggctcatgcctgtaatcccagcactttggaaggccgagacgggtgaatcacttgatgtcaggagttcgagagcagtctagccaatgtggtgaaaccctgcctctactaaaaatacaaaaattagccaggcatggtggcgcacacctgtagtcccagctactctggaggctgaggtgggagaattgcttcaacccgggagccgagatcgcgccattgcactccagcctgggtgacagagcgagactctgtctcaaaaaacaaaacaaagcaaaaaactgggtaatatatgaatgatataaatgataatctgaatatatttagatgtataattttagaggagttgatgttacattgtccaacatatgtagataatgtgtgaaaggcttctgagaattatataattttcataattcaaaatgatcatcttcatttagcccctgcaggaaactcaattaaataagggaaaatgtcttgtttaaatatggagaatttatgagtcacacagccaattcagcacaaggtttttatttccagactggtgctcttttttattgtaacctgctgcccacagggatgggtgaagaggacctttagggacaagctaaatggaagagcataagtctttttttttttttttttaatctaaaactgtagttcacttcatttaggcctctaacaaaaagtactaattagtgaagaaatgttagcaataacaaatctttcttgaattatcactgattgaaatgtcatgatgtctgttgattaaaacagtgtgtgcaaaaaaaggaaaacttacagcttcatttcttcctaatgaagtagaaattggaattcatctacaaatacgtttaattttcatggcccttgtttccatcatatgctattgaatagtcgaagaaaaaatatagggaattagatttttgtcaggaacaataattataacaggcactttatagtattcacactgtgcccagcagggctctaagtgatttatgaatttaatccatgtaatccttataacaagtccacgagttgcgattataatctctattttaaagaagaagaaacagaagcaagagatagatctacttgctctgggtcaaacaaacaattaaaatatgaacagtatgtcccaatattagtttccaaaatgaagtgttttagtaatccttatatatttaggaatgaatggcagagcaaaaatgactttagaaatctaaatggactgtttttttttcctatcagtgcattatatggcttctgaaaccatttttctcattttaaatatgaaatctcaaagagctactcaagtcaattcattattttgctgattttttcatttttctagactgcacttgttaatactcttcaatgaggcccagttttactacaacaaacattgacatatatattaggttggtgcaaaagtaattgcagtttttgccataaaagaaatgacaagaaccgtaattacttttgtaccaacctaatagaaagataagcaaagtcaaggaaactttatagaaagcaagggactctgtagagaagtgccaatggtgagatcattgtgaaatctctatattaatacaagtggggtgtttccctaaggagttatactcttatttaggaacacagtatcctgtactagtttcacatgattgtcaccttaagtgaagtgacagatgagtgatggcagttataaaacgaagactggtttcagaaaatctaaataaaaactaaacaattgtatacgacaatagaaaatgatgttgatggcaagaaatgtagagactgttggactgaataaaaatatggtcttgcttattcaaagctcttatggagataaatcagaatgtttttctaacatttggcctgaataaattgtagtacacaaaccacagagtatctaaaacaacaactaatgtttcaatcttaatttttgtatttggttcagaaatgccacttggaatgttatacataaagaatctgacattgtgtaaatggctgcataagcttaatgtaaaggaaaattgtggaagaatttatcagcttggactgaatatttcctcaattcacaaaatgaactgcaactccaatagaatgcagagtgaaaaatttcctgtctttttcctattgggtttgtaggacgattgataaacacattgctgttgtgtttgtagggatattgataaagacattgctaaggatggtatgtcacattttttcttttatgttgacccacagaagaaatgtctgacatatttccatgacatgaaaagttatgcttcttttgaatgattgccttttaaaattatttggacattatatgtctgatgagcaattttgtttctctttttgctttggacactaggaatctcaaagctgaatttgaaaagcattttatttaaccgtgtaatatcctgtggaattcaattttgtgtactaaatttatctaataggccagcctttattatcctttgtattcattcttggatttgtttttgagcctgttgcattatctatatttctgtaagaaaattcaaatcattttgaaaggacatagggtataattacctgaacaaatgttgtatttttccttatcaaaatttataagtgcaataaacagtaacaaggaatgaattatcaactatgccaaagtgacagataaaaaatcacataccattattttctgaatacggactccaaagtatgaagatcagaaatgaaaaaatcttagtgttgttattccagtaatggaaagggagaaaaaaactgataattcatgttatcatgaattgtgaattcatgataaaataacacatgctattatgcatgtgttattagaaggaattaggtcatcagagtcagaatttaaaatttttaaatggttacatatatttaggaaaaactttgacagttacctttgagatgtatgagctttgtaatctaccttgcttaatgtaaaccctacattaaattgccctacttgtttttccatgttagccaatgagaatatttaaggaatcaaatcaaatttgttgtacattcactttggctaattcaatggtcagatttttggaaccaaatcacaatagcataaataacggtggtagaattttgattaaagaccaggcagtttgcttatcccattcttttaagacctgtcctatattgtttatatttgatggggtgtaggaagttaatatgtaataacaaatgacccccaaacttagaggctttaaaccataaaagcttatttctcatttacatctacatgttcaccatgggctggttgaggctttgccatctgttgacttcgtaactggacccgggctgatggagattctgtcagggatattgcaaggctcataacagaggggacatagaatcatggtgactcatgagctgaattgtaaacttctgctgagaagtatatctcactttttgttcacttttcattgtccgaagcaagtcacatggctaaacctgttatcagcagagtggggatgtataatcctcccactgagagcaatgaatattttgaataaataatatattacgttgctgcaagcaaagggttttacctcttgtgtttttggttttgcctgattgggcctggtacaatgtttaatacctagactgtttgactctctagcatatacaattacagattgtctagttttgactctggtacaaatagatggcatttctctccccccatatcttctaggatgcctattttttgagaggataaaattaaaaataaaaacctctcagggtagcctgtttttttgcactcttttctaaactgctttataaaggacagacatatttatcctttataaagacatatgtgtatatacacacacatatacacatacatacacatgtgtgtatatatatgtgtgtgtatgtatacatatacacacacatacatatacacacacaaaatatacatgtatatatacacatttattaggttggtgcgaaagtaattgtcacttttgccattgaaagtaatggcaaaaaccgcaattacttttgcaccaatctaacaagcatgtgtgtgtgtgtgtatgtgtatgtacatatatatatatgtacatatatgaccttggaagagatctgaggtatggtagaggtttacctcttagaattgtttcgaggattaaatgagatgatttttaagcagcctttagcagtgtttgtgtggcacatggtaagtgctcaataaatattatcttattagtattatttcaagcgtaatatattttgatatctttagagctcaattgatacttgaacagtcatgaaaagaaatgatttactttaaaaaacacttgaaaaactatcctattagatgaatttatattttattataacaatgcatgtagacacacgtacatacacacaactagaaaggatatatgtgagagacatatgtatttatttagtcacaaaaagagcaaaataaatgtgccaaatcatttgaagatcatttgcaagaaatctgcaccctctaatccaccattatctttcaaaatttcatggttactttcttggcgtacatggacaaatgtttccactccttccataggacactaattctaactttggcctcccattaactgcaaaacatctcatgcaacattattctgcaggtttagctgactttattggttaacatcaagaaaatcacttaaatgttaataatttgaaatggaattgaactctcttgaactaaattttttattaaagcacacatggttttcacattgaaggaacaaaatattccataaaatatgttttaaatttaatgaactcaagactgttagcaatcatttgaatcacaatgaaatcaacatgtgtggcaaagatttgtctactctggtaagcagcaatgcatttgtgcaccaatttttactttaaattttatagaactataacaaaagagaatttcagctcagttcttgaaatcatggacaaaactttgcagaaaaataaatgagtcatatcattcaataccatacatacagctgagttgacttttatccaaactcattatatattatcattttagtattgtcccctgcattttctttgccttctcctctaagaaatattttccttatggtagaaatccaattattttttcccctgtaattgaaattttctgttttcatgaggccaaagccgagcaaataagatagaaatggagagtagtgagcaagaaatatttgcagaacagaattatatgggagctccttccttgtatgtagggggcacaggtatgaatgcatgtgctagaacaggttttcctcactgaaacaagtcttatcacagaatcactatgtgaattaatattttggaaaatgaaataattccttcccactgatttataactatagagatatttaattcttttctgatcaacctttaacattgtgaccacattttccaactttgaaattatcaatcttgaatgtgtccataagaattgggaagtacagtatagaaccttaagatccatcagtgcttttgtaaagtgaaataaactaatttaatggtagtgataactctcagttgctctcttttttaagttgatcttttaatgttttgtcatatgctatttttcttggcagtgaatgtataatgaaaaacctgtccataatatgaatgattaccctataatttatctcctttgggggtgtagacgaattgcaagttaaatatcaggaaatgcaggatggatgaacacttctctgggattgagaatcagctgagtctaaggaattttgccagaatagtatagctcatgatgttggtgggacacatggctccataaaagtcccacccatcttgtgtaaaggaggactttcaccttttcatgccctggttcccatggtgactggtatattattagtttttggcataatagtggcattgtggcatatcatgttaaattatagctagggactcagctgcaaatgtttttgcttcctgatttatgggagatagcatgattgagagaaaagaatttgtaagcagtaattagaggagcagaggtaaagaagtgcactgagatatatattttttttcagagaaatgcagttaatggagcatgtcaatgaaaaggattttccatttttaggctggctggtacgtcccctgtttaataaaataagactgaagtgtgccttttactttctatacagtctgacaaaggtaatttagaatggagcttttcgatgtctgtaggctgctgctgccaggatttatatcttcatgaacgaaacacaattgcagatgccttctcaagctgattgataggcaataaaaaactgaaacaagagctcaatctccaagaaacaagaaaaagttgtgtgtgttaaatggggcagagagatatctgctatcctcttgtgatatttgtgtctattttaatgcctatgtagatttgtgctgtggcacatgaaaccaggtatatattaccaatgtaacatgcttcatttgatttgcaacattttcagtgaactgcatatctcatagtgctcagagccaacctaaaatttctgactgattagaattgtctgcatttgtaaatcactgaggctggacctggaaagaaaagggatttggctcctctggggcccctggtatacattgtgcttaatagaagaattttgattcagatccttgtttgatgctgaaattattcttttttctccccatataaaatctcctgaaaattgaaggcaaattctataaggggcacaatatagatcattgtttattatgcaacacattccttcttccctcccttcttccattcttaaaaatagtttttgcatctttgcttatctttacttaccctacaaggatattgctatctgctgtgaagatagacaaaactgaataattttgatgcaatgcatctggacaataatagataatgtttgttatagaggattaggtctgtgtaagacatctggagagatagagtcagtaactctgttaggactggggatgagtcaaggaagacttcacctaagagcacaagcagaaagaaaatttcaggcatggagaatagatggtaactcaaatacatgaaagagtaatgtatttccagctgattagctctggtcaaggctccaaggaaggctgaataacaaagggtaatgacatcaaccttcccatactactaagctggtttaccaagttgccttgatattgtgaacattgatggacctttaggacaaaagatacggtcaggagcaaagactcaacattaaatgtcctcttgatgaaagtctcaggtgctggaatgactgtaatatgaggataggcaagatgcacattgataaagaagttccaaatatttggtgcagagagtaagaagctccccagttttggagaaagcattaccaacgaaaggatggttattagtaaaaggttattctgagacttctgtcttggattactgatgatgttgatgcaggtatagaacaagttaagtctgaagtactgatgagccaagataactgtcttatagctagaaatatgtatttcattctagggcagaagctgaaattgcagatatagatttgagaatgtccatcacagagctggtagttaaagccatggagtagtggatgagaatacccaaaattgctgtacatgaaactctacaaagccacaaaatttacttcgcggtcaagaaggaagctgagagagagttataatgattggcatttgtctgtggtcagctgagcaataatttccccctttccccttcctaactgtgcccaggtttttgtttgggtatccatacatcttcccattatgttgccgagattccttaggaatctgtctcaaacacagctctagggatgagccatggtttatacagccattcagactaaccttatatcactgccataatgattaattcaaataacccaagcctaagtaacatggcattttcaggatgggaggggcaaaagatctaattaaatttaattggacatgatgggaaatttgctggatggaggtttctggggaaagtatatcttctgaaagacagtctgttcattctgaaaggtgtgacatgttaatatgaagcttggaactgttacaacataggataaaactgacaccagagatgcagaatagaaggaaagaaaccaggtccttggacaagctgcctaatccaatcagctctgacctctgccttatctggaaatttcatttacattaacttatatgttgttattatttagaccaattttatttgagttttcctttgtttgaaatggaaagcaccctgatagctgcaaatgaacaacatgaggaatgtagttaataatattgtattgcatattgaaaatttgctacaacagtaaattttaggtgctcttacgacatacactcacacacccaaagtgacaatggaagtttctgctgtgtatgtatataaaacaccatgctgtataccttaaatatatacaattaaaaagggacatgttgaaataagacattaagaaaagtgtcaaatgccacagaaaccttaggcatgagtttggcaattgcagttctttctctgtctttgctagattagccctgtttggggagagggatggaagcagatttcagtaggtagaagagtgaacgggggaaaataaaatgaagacagcaagtttcagtagggcaagcatttttgtctttttaaaatgtatgactgaccccccagcccctggaagagtacatgagaagcagtaagcacttaccatgtactggacagtggataaatgtgcagacattaattgcacatttcccatttaagaagtgtcagaagagaatagaaatagtgtgtcaacatactgaaagaagaggataagtaaaaaataatttaaaattagaaaaaattttagtttgggatggtccttactatgtaattagaagacattcaggaaaacgtaaaagataatagaaaaagttaagaaatgtgaagaataggcctataaaatttttgagaaggtaaaagatgcaaagagaaaatctggaaagtttctaaagaggcaaaaaaatattaataagctacttacaatggaagaaaaatgagattagaattctggaagcaaagagattgtggactaactggctgcagatcagtaggaggagagggctacaagctgggaatgtggatataattcatctgctaaaggaaaagaaagatatttatggatttgtgagaattcagagaatatgtcatgtatatgccccaaatgggaaagattaaaaaaaaaaataaagctttcatcagaaggaaactccagcatgtggtggcacatgcctctggtcccagttacttgggaggctgaggtgggaggatcacttgagcctgggaagttcaggatgcagtgagtctgtcttgactgtgctgtacaatgcagcctgggtaacagagcaagaccttgtctcaaacaaaaaaaaaaaaaaaaaaaaagaaacttccacataggtgactataagtcgaaaaacaaatagcaagcaagcaataaaccttaaaatgtgtacaatgtacctaaaatatataaccaaggggatacaaaatgtttataaataaatagtagtgataagataacaaggaatgcatgttttaagtgctaaatacaaattgttgaaacagaagggacattcagagaggaaaaactgcagttactaaatgttcatcaaaacttaggaaggctcattctacagggttcatcactaaaagggagaatagagaaagaaaagtctctcagtggccttcttagggaagaaaaaaacaccaccaccaccaccaccaccgtggggaaatagcacatctcagtcaggaaaatagttgttattttggtttcatataaaaagagatagatgtaagaagttggaaaagagaaagtaaacactcgtagaatggaaaactacagaatttcatattaagtccaaggaaaagaaggaataaatagtaaaacatcaaaagcaagcaaaaaaatagtgtaagcaatattaaagaagcaacaacaaagtaaaacagtagtaagcagtaagatgtaaggaataaaacaaagtaactaaaagttatgttaaatacgacttggccaaattctcttattgaaaaattgacactgagagacttaaaaaaaaaaaaaaaaccacccagatatagtcagtaatgaaacactgaaagttatgaagaaagtttaaaaagagaagccagacaaaggcaaagaaagagacagaatggcaatattattaggtggggtagaatttaagattaaatgcatcaaatatgtatatgtgaacaaagaatgagttagatctgtcaactctcttgagaaaaaagagatttctatgtgcgaaatgatagatgtagagaaaatattgtgaaaataatttttgtaaaacaatcttccatccctaagtacgtgtaaatgtgcacgtgtatatgtaattctatgagcaaaaggaaaacgtggaagactgcagactggtgtttagtattggccacctagaagggactggggcagcttgtacaggatcaggtgcaggtgaggctggaggaagaaaaataaggtttcaataacagctgacttgtggcaaatgcattggtaaactgcccatcagctccttcctaaagacttaggatacaggccctggattcaggagacattggagaatgacatcaaagctcaggacgagtcccatagaaaaggttctagaactgactcacagctgcctgcttagccacactacttaggagaataaattcctttttattttgttgtatataagtatacaaataaaactgcaaatagcattaaaaaaattaaagtgtaaaaacagatgcttgagtccaataacaattggttgggttcccttgaggcctagaaaattttcaaaatgttctggatgcatacgtgttaaggagtgttattaagtcaattttccagaatcctggtatcatagggctaatgtaagacccaagggtcaagtgtagagagaacagcagtatgcactgaacacttgggatctgtgcttcactgacatttcccacctgcagataagttttgaacggatacacatacagattttcctgttgtttccccagccccaggtaattgctttgaacatcctgcgaaggtctggagtcacttgtatttgggtgatcgtaagtaagaaacaatatagcatataacatcttggtaatttagaattttctctatttcaaggtccagtaattatgaccatgactgacatgaatatcgaaggacagacaagctttctaaccaggacataggaaattacctgatatgaaaaagcagattaactttgtgatatatttaggtcaatttagaggtgagatggattttttttctttctacagctagagaaggcagccagccagaaagccccctgcttaacagagaatccacaaaagggatgagttcatttacagagggctggattgattataagggtgatgctggtaagcacacttataaattaagtgtgtaactttaacttctgataacaaacattttttatttacatgggtgagtgtggctttctataacaaatgtttcataaggtttgtggttattaaaagctttatggttaaaagtgacattcctttgtgattaaaccaaaaggttagttaagcagttgaatattaaggcgaggagctttgatcgtgctaataagaaacagagcgtgtagatttcaacttaaataagacaattgttccttatggctaacctctgtatcacaggccacattgctctctgtcatcctttaggctctaccagcagaagcagtggcagggtattgaagactggaggagagtgagtttttgagtatttatccccccagcttcctccctgacctactgccataggttggctgctttttgtctctggaagtcacagacttctgtccggcagcctctttgcatacaactctctttggattccagtaacctcccctttcctgtgcaccttttggcttgtgaatgttaatggccccgctatagcccttggctactgcactctgctctaagctgtacatagcaattcattactgagatctcatcaatgcctagtttgtgcctaatggttactgttaggcccctgactgatgccatgtgctataaccttctagatgttattcacaagtgcaattttaacacaggactttttaacttgtgtcaacaagatagttctcaaaacaattctcatcaaatacaattgtaccttacattttcacaatccaggccaaccaaagaattaaagtttactcatcctgatttccagagttatagcttgctttgtttgtggataatcaggggccatttaattatgatgtggacattataacctacagtgtattattactgtgaatactcccaggtttactactttatctctttagactgtggaattaacatgttgacattttctggcaatgatttgtgtttaacagaatcttgggcaggtctaagtgacaataatttattactttgtccttgttcgtgagcctgtcaggctcagtggagcttcttggagtgcataagagaatgcatgtgtatccactctaaagggaagacatatccacatctgtgcgttgtgggtgatgatgcagagtgactctgttcatctatttatttattcaattaagaatttgtgaacatagggaagcttgcatccatagatagtgaactggagattttttctagctccagacccttcaatgtagctgatgacagcaatgtgtttctcaaactgagaaaatcctgaagagcttgatggacgataagcagccactaatgggtgagttacctgacagcccaacaggcaaattgatgaagaatttttgcaaatcttaacctctgaaaggttggtttgggtataggaaaaactcctgccagtaaatacaacacacggactgaactgtgattgggatgtggcttcttcttgacatgaaacagatgatggaagcttctggatatgatttttgaccacctaattagtggtgcatggttcattgctggcatcttcttccagagaccttgctcagagatgggataaggaaggaaggaattggaaattgtattggtctgttctcacactactatagagaactaggtgagactaggtaatttacaaagaaaggaggtttaattgactcacaattccacaggctatacagaaagcatggttgggaggcctcaggaaacttacaatcacggcagaagggcaaagggaaagcaagtaccttcttcacatgcggagcaggagagagaaccatggggaacaaccagatgtcatgagaactcactatcatgagaaacagcaaagggaaaatccaccctcataatccagtcaccttccagcaggtttctccctcaacattgggaattacattttggcatgagatttgggtggagacagagccaaagcatattagaagtgtcccagccagaggcctgcctctgtttagaggcattctttgagtatgatggtgtaataaacaggagaaatttggagccccaagacaattttcccccggataaagaaagaaatgagggctattttggaagacagtgtggcagtttcttaacatagtcttaccatacaatccagcaatcacactccttggtacttataagttaaaactcatgtctacccaaaacccgcacatggatgtttatagcagttttattgatagttgccaaaacttggaagcaaccaaaatgtccttcagtaggtgaatggataaatgtgggacatctagacaatggcatattactcagcactaaaaataaataaactatcaggccatgaagagaaatagaagaacattaaaagaatcttacttgacatctcacttcaggagaagccaatctgaaaaagcaacatactgtatgactccaactatgagatgttctggaaaaggcaaaaccctagagacacgaaaacaatcagtggttggcaggggttagtgaggatgaacagggagatttctttctaggggatttttagggcagtgaaagtattctcatactatactggggagtacatgtcattatacatttatctaaacgtacagaatgtataagatcgagagtgaaacctaaggttaatgaaagactttggatataatgacatcagtgtaggttcactgactgtaacaactatactactctggtggagatgttgatagtgaggaatactgtgtgtgtggaggggagggcagggggcaggtgaagacaggggtatatggggactctatactttctgctcaattttcctgtgaacctaaacttttctttaaaaaaaagaaacccagatttaaacatgaattgagtaggtgaggcagtgtgtcttttggagtctgtggtcacacataaagcagttcaaacagcctctgtctaagccctgtgagccttccacactgtgtatcacactaatacagcaggtgtcagactgtaaaagaggagaggtcatttagcagtcatggggcatactcctatctccaacttattctcctgaagcattctatgcccatgagaatctaagcttactgatggtgggaagtttaataaacactctgaagctattaaaaggtttctctacgatttctaaaaaccatgcctaaataactgcttgacacacttggggatgttctatttctagagacaaaggatccatcattcattgggtctttcggagagaaagagaataagatagaatttgtattcacaccaaaaaccagatgaaatattttgtgctgtgactgtacatctttggaatgctggggctttggggcaatatttcctgaagcccttaatctttcagtagctgccaactggccaagaaagaaaaaagcaggagggtacttttctgtatattactattcataacagttttggatattttccccagagtagttgatgctcctttgacagatagtaaataattaatcatcatctcattctcgcagagcaaaatgacaggttttttcgatttcacagatgggggaaatgtgatcactaatggagaggagactggcttaggacatgggcctgggagaagccccagaggctttgtttcatggtcagtttgaacagattagactactggatgctcacagtgctgctggctgctgcttccaagaaagattgacatgtttgtcttgacatctcgcttcaggaatggatggatacacagggaagcataaatttgggactaaagtgttctaacatttctcatgctgtatgttcattcgtctcttcgggcaattcagcacatgcgtttatcccattaatggctggagaaaaagttctgattaccttccaatttacatgattcatattagtgggttggagcagtaatggtgatgaattcttctctgcttaggttgtgcatgtgtttagggcccttgaaatctgagaatagccacactgtaagtagctgagcctctttctctagcacctgctcagatagaatttgtttgtaatttaaacaaactaataaacaacatattccaagctggagaattctgaagatgatgattatggcaaattctacttccaattttagctgtttgtggtgctttgccttgattttatggatttaaatttgctttaggttaaacaataccttaataatacacacacatgcactcatatgcatacacaataacacaatgtcagcaagcctagctagtttgatcttcagaacattttgttctagtgttttatgtggctgccataagaatgttatgggcaatgtggggaaatgtcagcatcctattgggagagcagcactggggtaattttttatgtcaagtttatttccctcctgcaagctgacatggagaaagaattggacaggttcttgatctaaggctctttgtctcctgtcttggttatgcttaggccaagtacttttggaggaatggttgagctgagccttctgcagaattttgattctaaggtcccaaagattttttttttccatagacagagtctcactctgtcgcccaggctggagtgcagtggtgcaatctcggctcactgcaacctccacctcccaggttcaagtgtttcttctgcctcagcctccaaagtagctgagactacaggtacatgccaccatgcctggctaatttttgtatttttagtacagatggggtttctccatgttggccaggctggtcttgaactcttgacctcaaatgatccacctgcctcagtctcacaaagtgctgggattataggcatgagccagtgcacctggccagatcccaaagattaaattgtataaatggcaacagcagcaagagccagagacactgaaaagtagtgtagagtagggattgagaatggctttggattttggagtttcattattaaaatctcagctttgacctttggtagttgcacaattttaggcaagctttaattttttccataaacacttaggatagtttctgccctatgatgaatactcaatctgtagtgcaatgatattgatgattgtatggacaacagacttactttctttttaaatcagaacctggcaatcatttcctgcctcctttacagagttacagattctgaatatctaagattagggccaaggtgtctgcgttttagaaagttccatagatggttgtgtaaggagtggatagaaaattatgtttctggtgttgggagattctctgacctcactcagcttggtctctgaacatctatctcagataacattaggccttactccatgtagctaaactcctagtcccgactcagcccttacatgtttctatacaatccctgcctcactgccacaacgatttctctgacctgcctcagaacactacacttcagggaatagagagagtgctgctaggaagatagtatttgaaatgaaatgctagttagactgaggcagggcagatctgtgtagatattaagctgatgaggtgttaaactaggagtggtagaatcatataatgcatgatgaatcttgcataggcaaagttgaaaaacaaactgttctgattcatctgtacttgttgctgaaatagttttatcttaactccctatttttctgtgtgtgttaggtctgcaagagggtactgaactaaaatcctcagattggaatttgctgtgctaactatatgcattgtttggagaacagtgaacattcaaaattgtattcacatatgggcagtcccaggttcacagaggtagcaggatggagactgagcgcagaaccagcatgatgaatcccagatgtttcagcaaggctgtgtttcctaggctcactggatcgtgaaagtgagtacattcaaggaagggaaacatttaaaagaactaggtgtcaaaatggctgaggggatatttgaatattggttcacttgttggggagaggtggtctctttaaatgaacatctcctttcaggttttatctatgttaagacaaaaatctgatttttgatttcctcaataatatatcttgaaacttcacttacatttatagttgccaaacagatttttgaacatctacttatatgcaagttcatgcagttggaaagacaaataatagtccctgcctttgatgattcagtttagcaagggagatagtcatgtgaacaataactacaatcaattataactgctggaatgaaaggctgagcacagaaagtatcaggtcttcaaaagaagatgggaaggtttcatggagtaggagacacagggctcaagatctccatctgaagtggcattcagctgtgctcttataatacagcaacttccacagtatggtaagttccatagatcactggacaatttgtcatgccacaaaactatatttagaacagcaacttctgaaatgaaaaactaaagtattttgacaatccagtgtcacaatggtgaaatcttgattagtaaccttatggccttgccatcctttggtaaagctcctagaaaaacaataaatattttagtatttcccacaaattgtgctttccactaaaggaatgcattcaccttttgcaacctttttcttgctctcatgaatgcctgatgctgtggacaggaaaaaaatcagaaatgttctgagttcaaaattactttagaagcctttgggggaaaacacataccttttttgttttgtgtttgtttgtttgtgtttatgttttgtgacctactttagttttcataaaatctgctccatttttcccccaaggaaatctactctgagtgaaaagaaacaaaacctataccctaaggagaggagcccaaatgccctattgacagcaattttgaaaagaattaaatttattattaatagcatggataacagaaaatataaggctgattattacacaaacggttttcagtgaaaactaatgggccatcaggctcaaatgtgcttatctcctttctttatccagccatgagcagcactttatcccttttgttttcaacaaaggaggtttactgcctccttctctatcatccagtgctaaactgcccctaaactcctatcaatcctttacctgaaataacagatatgcttgtccccacgttcagagattctttaaccagcagataagggctattgtctgggacaatttcctgagattccagcccttcttatccaatcaatgcctacttgtctttcaaaatttggggtttagatatttcctctgaaagaactcccccagtccttccaggctcattaagatccacgtgctacctacatccctatgattctgtcacatgaccctcatcacacctgtaattacatgtgtagggaagttcaaacatttcctctgaagatctgagatttcagtttgttgaaataaactggcaatagacagattcacaggagaaaaggcatcacaaatttatttgatcatagttttacatgacatgggaggcttcagactgacgaccccaaagacccagggtgaactatccatttttatgcttaggtagatgaagcatggccagccatgtagaaagatgattaaacaaaaagggtgtgatctaatagtaatagactgaggggcgggaaacccagcaagccctgcctgtttggattcttctccctgcagcattccttccttctgagtatggggcagggccctctttggaatgggggtcttatgacctacaatcaaacaagggaggccagagaatttctttatggccaattctcacacagaaaggtgggggaaagttggagtcacatttttaggttttatgtctggctttggggaaaacgggttctggtttttatggctcaccatggggaagaggaattatagtttctatggctagcctctgtggagaatggggggtgagagacaggaggacaaagatagaaactttgctttcgaggctgccgctttggagtatcattttctgagccccagtacatgctcagtgttcatcttcctcacctgattgtaagttccaggacagccagacctttttgtgtctgtattcaccgctgtatttctagatcattgtgttcactcactaaacacttgttgaaaagaatacaaatattcttaatactgtaccagtttaatccctcataatgtcttgctggatcagtctaaaaggtatttctttaaagccttctgcatactattctctgtctggggtgatgttcccacaaatgattacttcctgaccttcaggtttcagctgaaacctcatctcttcatggagatcttctgtcacttaggtgggtaattttcagttactttaccttatttgttttcttcatagagctcatcaagatttatagttatatattaaatttttctttacttatttagtggctacgctgagggaagggctgtgtcactagggcccagccaggaagatgctttttgtttttttagttttccccaaataaatagaagttgcatgtgtaaatgtttggtgaatgcctatctaaatatattgtcagtttcaggcttatgggctgtggttttgcatcatgattattctagtatcaagcgtggttctttacacatattaggagctgaaatttttattaaatgaaggaatgcataaacaatgtcttagaattatctaaatcataggacttttgcaatatcttatataaaacttgccatttatacttattagcaacaaatccaagtgagatgagttgcaaatctaagaaaagaaaacaccaattaccaaaatgtatctatataacttttattcagtgagtattaacacctggtgtgcaaggtgctattgaacctctgtgaataagacagatcatctactacagtggttttattattgtaactggggtgggtcttctctctatatttcaggagtgttactatgaacataggataagatgattgacactcgtttcctcatctattaagaatagtagcaaatccaaaatcatcctttttccagaggtcccctagggctacatactcagagccagactcccagtgctgcccttggggaatgggaaagtgcctcagagaggaaattctgatgtgcagagcctgcggtccccaggagtgctaaggcccatcctattctgaagctcctgggcagagtcatcaggtactcgggagcttgggagcttaggggctgaactgggtcttctgttgaagacatggtcaggtgcatggtgggggtgggggtgatgcctctttaaagaagttctgtcacttccctggctacaggacagtatcagagtgtgggtcaggattgaggtgcacatctactctgccaactcccaggctcagagccaacagtcccagtcctgaggctgctctgattttaaactaaaaaataggaaaggcttagttctgcttttttttccccccaccaaggacagtggggccacctagtcacaccaatctttgttaagtaaaatgattttttagtgattccaagtagttttctctctggaaaatatgagtgatgagttggcgtttccagagtgactgcaggattcccaccccagtcacccacccagcctcttccaaagaaggtaggactcattgtttccttattcttttaccctttttaaaagtatctttcttgcagaggcagagaggggagaaagatttcaagtttaatctgtgtcaggatgatccacatatagtaatattaggcaagatgagatgtttgcagatatagcagtctccccttcatctgtggttttagttacccatggtcaactgtgatcagaaaatataaaatgggaagctccagaaataaacagttcataagttttaaattgcacgtcattctgagtaccctgaagaaatctcatgctgtcctgctttgtcccacccaagacatgaattgtctctttctccagcgtatccacacggtagatgggacatgcccattggtcatcaatatcactgaggctcagtgacccaggatcatctgaagcagatgatgtccttctgatgtagtatcagaacttcaatagcaacctaacgctatggcacaaagcctacatcagtcacgtccccacagtttatcatgtaggcattatttcacatcctctcaggaggggtgagtataatacggtaagatattttgaaagtgggatcccattcatataacttttattacaatatgttgttgtaattattttgttgttatactctttttgggtttgttttgagataggatcttgctctgttgcccaggctggagtgcagtggtgcaatcacagttctaatcacctctttgggttactctttgctgggtgctcccctgtgtacctgtgtgatacaaatattaatgaacttttttttctcttattaatctgtctttgcctagttcattttatagtcccctaagctgaagaacctaagatgagtggaggcagataattttttcctttcttatagtgccataaaattagtagaaatagaataataacacttggcatgagttcacaggtgggagatatcacatttgcttgtaggaaccagaaaagttgtggaaaaattggctttggaacttcactcagagatcaggacagggcttggccatgcagcaatatggcagagagtggagagaaagcatggggcatgattgtggtgaaagaaatggaaagttagtgctagaaccagctcatagatatcgttgactagtcaactaaggagatttggctttagttaggaaaaagaattttaagcagagctatggtatgtgtgtagaaatgatggattgaggagcatagttggaaacttaaaatattcccggagggaagttaatgagagcttgatttaaagtagaagcagtgggaaaggagaggaaaaagatggacgggagtgaaggaggcacagcaatggacgtaaggagggcagagtcaaaacagcaggtggctcctcatggaaagatcagctgggggcacagtggactcaccccagggattcagattcctgttctgtcccagggaacaactgtttaacatctcctgaaaagttcctgaattttcagagtcagagtataatttactcagagcccatgagctttccttctgccaggtgcaatgtcttttgcccaacaaacaagaatttcctttgatgcatttatccttatgaattatgtttgtccatttccataattaggaaaataataactcttgacatgaagctggtctttagagactttaagtagttttcatatacttgttctcattttatcctaatcaaagcatgccatgaggaaggctttggtgcccttttataagtgagaggcagtgtacattgtgtagttgtcatcgatattattggttaaactaaaaagtagtaacaaaatgccacctgtgagtagctgcagcaaactcatgaatgtgaatccccatgggtacacgtgggcagctgtagttttaaagaacatgaggcaagaaccataaatacgttgtttcacagcccaggttctatgggcagactagaaataaactcctttgcaaccagttagcagcagcataaccttgggcaagttacttagcttttctgagctttagtttcctcatctacatagtggggttacatgacatcatcattcgatgaaaaaaatactcgtgtcagcaacagctcacacactgcatttctgatttggtaagtgccaggcattcaacattctctaagttttgcatgcaatatctcaggtaatccttgatatggtaccttagaggagctccaagttaccccgagttacaggtggcgtatctgtgtggctccgcagcaacttcagtccttgctttctcagaagaaagactatgaggagcgtaaagccgacaaagagactgaggcaagtctcagagcaggagtggaaatttatttaaaaaggttttagaggccgggcgcggtgactcacacctgtaatcccagcactttgggaggcaggggcgggcaggtcacgaggtcaggagttcaagaccatcctggctaacacggtgaaacccgtctctacttaaaaagaaaaaaaaattaaccaggcgtggtggcgggcgcctgtagtcccagctactcgggagtctgaggcgggagaatggtgtgaacccgggaggcggagcttgcagtgagttgagatcgcatcactgcactccagactgggcacaagagcaagactccgtctcaaaaaaaaaaaaaaaaaaaaaaaaaaggctttagaaaaggaaagatagggaggtgcacttggaagagacacaggcaagcatgtgaaggttaaagagaataaaagaggcatttaaccttgatactgggtctgttcaggccagaccatgattcttcccttaggatgggcttcccgcatgcgtgatgccttccttacccttgggaattgagcaggcacagtgtgtttaggaagttgtatgcatgcctatctgaggcttttttcctttttcctgcggagtgtaccgggaagatcgtatttcactattttgtctcgtatgcgcacgcccagaagtttcttctccttggcatctacattcaatcaatgctttaatgttaatagctgtggatcatcagggaatggcctctccctggatccctgggtgggctggcaaattgtcatttttagagaggcagtgtgacaattgtcaaaccatcacttggcattcctaacaccgagagagccttctcttgccctgctcatgcctaactacctgtaacaaaaatagccctggaacagataatcgtatcattttatagagaagaaaattagaggcctttggaatattaatttgtctagattacaaagttagtacatggcaaaactgagatttaaatctgttttctgatactagattgaagattttaaccattattctataccatctttgtgtatggaaagtacttaacatggtgtctggaattcagtaaatatcaaatgtattttactactactactactattattctcaagtcaaattacaacttcagtggcacaatagatgtattctatgaactatttaatgtttttggacctaaggctcctctccagtctacaccagtctaaatgtaatttaatgttatggacgtaagatttaagtaaatattgacagagcagaatcagggtgaaaccaagtgtttgaagttttagtattaagatacaaaatggactttagaatggattagaaggttaagagagaaagctgataaggagacctgaaaagaaggaggaagggaagggaggaccagaaaaagtacattatttgtgttagtatttttgtcacttttcccaatgaatgaaaaagcagtggctgccatggagcctatacgacagagaacaatgatctcaccactgccaggatggcctgtaagccagccatctaccctgcagactgactgaggggacagcatgaattgcatataaaattcatatatgccaatagctaccagaactgtgtgaggcagccaggacaggacccctggagacagaacagcagacattcttgcttaaaagggcaacacggaatgctgcagcattcttgctaaagggctatataccacaagggtctgtggagtggctcgatagaaacaatggactgaagctgccaggctggagagaaaccttggcttgtgaaaaggagaaggctatggcttccaccagaggcaggatgaaatccttggctggaagttcttccgagggcttaaacttgatgtcagtcagcacagggtactatgtgggggtggcatccatgagtgcaggagattttatagcaccttcctcttgcctcaaagggattgctaatctgaagagtgccaatgaccaggtacttaatgccatcgaggttcagtatctgtgccttattctctaatttctactatgttcaaatatctgcatcgaaccacattctaaattaagccagacctccaagttgtatctgttttacctgtatcacttgctgatccatcctgaaatgtccagagcacttggctttcccaggaagcatcattcttctgggtcatgctcaagacagtggtacttttcagacctatctctgcctgacaaaagtaaactttcctctgcctgacaaaagtaaactttcttaaagaaaactgacaccagacaaagattgaacttcattgaatatggttagtcattccaaaaatatagttgaatccatatttaaagagttcataataatatatgtatactatgctatttggacatggttttttaaatggaatttaaattaaccagaagattatagatatgtctatatacaaacaaatttgatttgcctggtaaaacaagtgtcatgttttgtttcactgaactatccaatagtttggttgattttactgaatgaatgtgtcatttttgtgctgttttggctgtagaagttgtttcatataggctgtggacacagtgtacattaagccatgttggtccaaataagcaaagaatgtggttgctagactcatggagttcacattgttttgtgttttagtcaatattgttcatacttagaacatttaaatgtgcagaacccttcactgtaaagccttttcacatgctgaatttcaatgaaaaaaaaaaatgcaagtgctttttaatgatccagatgggcaatctaacagctaacgttttacaagggatagcatacaactttgtgcctcttcttccactttctttcaatgctactttcaaatacgcaatttgtgctgtagaaaatactgcaaatttttagcaagttttgagtgaaaacagagttataatagaaaccattatgcatgcctctgctgctgagatcagacctcatgtttttgtagtcacccattgttaatgcagcaggagagccctatcctggattctttgtgtctccaaactactttatttcctttcttctcaccatcagagaatgtttcctttttccctatgtctcagagcgcatgagactctatgagtccttttggctctatttcttgctatttatcttattactttttctgtttaaattctcatattctttctgcttctgtataaacaaggctggatttgctattaaatcaaaagctgagggaaggatagttaattatttctgaacacctgttatgtgcccagcagtatagggctttgcatactttatttacaataaaataactatatgcacatggtattaaatccacatttaaagttgcagatactgaagcacagggattaagcaaaatgcctaagatcatgctgccagtatgtagcaaagctcatggaagacatcaggactgttgcctaccaaagtctttcctcttctttattatgctatggtctgtctaccaggtctagcttatggtggggtcaccttcccaggcatgggacactcattttccagtgacaaccatgaaacttttaccataggatagatttccttgattttgctcccttttcttttgctagcctgtctgggaaccagaactctaactgtgaacctactagacttaacactcttgtctatcttcaaagactctgctttttgcacccagttatacttcctatcagcatgatcagtcagttattacctgcccctgcccaccaagcaccaaagactacaataaagtgcttcagtggctgaatttcttggcaccaaagactacaataaagtgcttcagtggctgaatttcttggaaatgatttaccttaaatatacctcagttgctcttttctaagctgttcttccacaggaagtatcagtaagaatacagttgcaagaaacaaaagtggctccctccaccacagtaaagggtaggaatcacaaggctacaacagtggactccacaactgctgctgggcatccctgtggcagtgattgggcactggagcaccatttcagaaagacccaatgtctctggctatggctgtccacagaagacagcaatgaagtagatcattgccctccaacccacttctgttttctgcatcttgcatgagtggatctcatgcgtggaacctgcttggcatctagaatcctagctgcaagggagtttgaaatataattttttagtttttcagtatttgcaactcaaaaacatactttagaaagtagagggaacagaacaccggtaagccaattcttatttgccagaggggtattcagtaaacattagacgtgttttgtattaaaatgaggagaattttaggtaaatagttataataatgtgaataaaacaacactaaaacacaccaactggataattggtgtcgtatcctactggatgggtgttaatatttgtgtttttttgttatagtatttgacaaaaagttttcttaaattcataaatgatctcttaagtggagggaatttgtcttaatcaccttgactccatgtagagtgactcaaagtgtagaaagtaaggtctaccatctttatagtatggagaaactgaaaagaatggaagtatatcttgttgaaaactgctagacttgtgttatatctcggattaaaccaagaaaccatcagtagttcagggaatataaaagtaactcaaagcaagctaatcaagaatacagaagacaaattaatattggaaataccaagtaacaacaacaaaaggctgaggttacttatgtaaaagtgaaaaacttttctaaagatttcagaaatggtaacattaatgacctaattaaaattggcaacatgaaagctaatatgtaaaggtctttaaattaggcccgaagctaagtgctccttaatcaatttttgccagaaacaagttattggaataacaaggacatatacctcataagggagattttttttcttggaattatttttaattggactctaaactagccatctcaaacagttttgttaaaaaataaatgtataaagcagagtgcaagagacaaaacattaatctttgaagaagttagcttttgagaactgaaatctaaatataataccaacttttgttatctgtataaggtgagattctattttggttcctttttcttgtctacttcctaaggctaactattctgatccattttttaaaagcactttaaaaaatgtttttattttaatttctttttagacataaatgatttaattttatttcccataagcctatttcattaaatttgatcctggaaatttgatttttaaaaatatatgatgtatatgaatacaaatgctaagcttgttgtagttgatttcatttaccttcacaaactcgtgaaagtgtttcaatagattaattatgcaattatatgtccccatttgaatgatactatgtctgaaatcaaaacaatctgcattctagacatttaaaaataaatgcaaagttattactatcaaaagtagctggcagaattgcttatttccaatagagttacaagagaagcctggtttacttaacaggattcttaggttatgttccctaaaagcagagcctgagacaaggatttagatgcagatttgttgagggagtgttcttcaggaaaaaaactctgtaagagaggaagtgaagcaggagagggaaggtgaattagaggggaaagggcaatgccctgtgggttgaggcagctcccatcagctgaggacagttcctggagaagggagggaatcatactcataggagctgggagagggtgcactgcctcacaatgcagacaggggttatggattacatgctattgcaatagacaaaaaagaccttcaattggcatagcagacaacagccatgatagttgcttccttctggctcagtctaacatgaactaaattgtcagcaatggctgcagagtgggtaggtctggatgcttatttttctaccatgggattatcaaaaccatatatggcttgatagggtaggcctcagaaaaagatcaattggtacctatgttgagcaatgagttatgataagactaggtttcaaagatgagctaggacaatcagatttcttaatttggatatttgaagtaggctatattggaagcagaagctgagaagccatgatgacctaatgtacaggctggagttctgagggaggcagatactatgagttagcagcaacctcgaggtggaaaaatggcaagcagacagcacagagcgaaaaggccaattgttggagaaacggagaatgggaaacaaagcagaaacctgaaggggagttgaattacattagtagagcattggaccaaagaactacaaagtcctgatggtgaaatacttttgttttttcaagtaggagggaagatgtcaaagagcatgctcaagaaacactagactggattgatgtgtgattgttctctggggagggtagatacggttatttgcatgacgtagttttttcaatcactaaaatgcatctggtatgccttaaagtggaattgttttgtgttgatgataaccagggaatcctggaggccaggatgcttcttccaaaaggagaatggtaaagaagggaactttgaaaaagacagattcaaaagcagaattttaaagttataagtagtagattgtgtgatgtaaacctatttaatagtgattttatttttttatttgcagaagtgtaatttgaccatggggcggagggaacggttgacatttggattacacaatattgtttggtaaatgccctgagagaggtatagaggtgtgcaagaattccaagtgaaatcacaggaaaggtgcttgccaatctaatttctacagaagcaaaaaccagagagagactcacaggatggccaggggttggtttggtgaagaggaggagagctcaggtcattgattgggacaatggtgaaaaatgttggacttgattgtgtcaagggtcttgctagctttgagtccgtgactttttaatggtgctcttcttgaatgtaagatcttaggaatattaatctcctttagcagggggagagagaatcttaggaatattaatctcctttagcagggggaaagagagtctttcctgccctggctcagggtgtagtgaggagagtcatttctactaggctatagtgtgtctaaaccagtgcgtagggagggcgagaacccagttatcacaatccatcctgtgtcacttgtgagaatatcctgtaagtgctattaaacataaaagtttttaagttaagaggagcggtaagctctctagaaattgttgtatcttcattagcatttaaatgatcaaatatttgacccaagaagcatcatgtgtacatgcctgtgtacaagtgtttatttgtgaaaacatacccacaaacccatttttatgaggtcaagagaatcttagacacacttgattgtttttgcatttgctctttgcatttaagctttgatcaattgatttcctgaatatggcattaaaacaggtttcaagataatgaagactacaaaacatatcataaaatgaaataataaaacaacaaaaaaatgggtagattgagaacaatctcatagcataaagagccctcatcgtatttggtggtagtatttttttgtgggcatctaattctatgattagagaacatttaatataaattcagcagaaacatctgctgatctcatcagtgattacctagctatgaaattcttggattcctcttgaaagcaccgtgtaagtctactacagatatttcttccatcctagattctgaagaatatctaggagataatttcacagtttctggtgctaacagtgctaaatcatagatacttagagaatttaattttaagtggaaattttcgtctgttctgttgtcaaaaatgaaatacaaccactacaagaaaaagtattaatgagatcagttcaaggtcaaaacttcaatggaattttctaaaaatcaaaacagggtgcccctaatgtgataatatgtacttacaaacagagctttgtggtttatgccatcaaccgctttgcaaaatcttgccaatagttttattgccataaaaattggagagttgatcagtgggttacttaaagctgtaatcttagcctttagtggatttatttaaatctaatttaaatggagttccttaatatttattttaacaaaagtttacttagaaatttaagattggaaaatagtttcaaatgagtactgctggaactaaaagtagttggatatgtggcgtttttccaaggtggtcagatttccctcaaggccaatttgtcattgatgaagcatctgtccaaaatcattcatctgtgttttgagaacctaggatcaatcaaactctctgtttggatagtcaactattgttttctgagtaaagatggatgatgataggtgaatgtaatattttaggtttaactttaatgatgtctgtttttttttctggaattagaaaaataccagggtggtattttggacttttgccttatctcacaattaagtgcttattggaaactcagaaaagaaaacagttgaagggtatttagaagtcatatgaatttcttcattttgcgctaatggcactttttaatgtgattgttgtttgaatatactggtaatgatggagctggatatttatgaaaataaacactgaagattagtctattttgaaaccttttttgaggcaccaaaaccatagtgtcattctactgttgccacatactctatatcacctagatcatcttccctgttttagccacagacatacatgaagaatactgtgctaatatatgcataaactgaaagttttagccttcaccaataaaggatatataactttaaaatggaatctctagaaaaagataggtactatagattaagctttttacttaactatttgttcatttatttactaaacgttacttgaacacctgctcagtttacattgcattatatttatgtgtttaatgatctgtctcttaccagactgtgagaaacttctattccagtggctggattaatggctaatatttagtaaactttgtatacacatgtgacaaataaatgaatgtaagtattcagaaatgattttttaaaacgaagggaagagagacacaacatttttagcatgtagtatatagtttgttagattatttgttaatcaattcaagcatattatcttctttgttttattcaattattacagtaatcatttgaggaagtaggaacataattgaacaagtcactgaatctttgattctaagtcattggactgggaagtcagggctgggagttgaacttatgtctgtatgatcccagggtttgtgtgcttagattgcaacagttggctgccacacacaaactcttaccactttaccaggttaaataagaaagaacttatttgactactgtttacactaaaaaggaattctagtaaatttcaaaattgatattttcttttttttccagtagccactattatgtatccttcttaaaattgagatggaagaacagtaagggttgttattataaaagttccaatcaattaaaaaggatacaaagcataccttttgatagtaaatatatgaaaataaggaaatatttgaaatttgtatgcttggatacctagaagcatcagaacacaaaaatgattaaaatttgggtgaattaacttaagtggctagatgtataacatgcaaaacagcagtatgttgtatgggaagctattagatttgagaataggtctggcataatcccaacacttaaaggcccattctaagagtttttagaaaccagactgtagacttgcaaggtagaacgcagagaggttatttaggtgggttgtacaattttccaggatgaagaggacttggaacaggctaccacctgggtagaagtgagtacattttgggtgtattttgaagaaagaaccaacgagtttcattgatagattgtggcacaggagaaaaagaggtaggataatgctataaatttgggcctaacaggatgaataaaattgacatttactgagaagaatattggggaaaaaaccacgttgaaggtaaggagaatcggaaagttttgaacatgcaagtgttaggtgctttttaggcatctaagtgcagacgttgagtagatagttgcatgtatgagtctggagactggggctagagctgcacatttaggcatcaccagatcatgaaagatttttaaactgaggctttgatgatatcacttcagaatgagttggttagagaagagcagagcactgaggtttgagttatcaaggcattctgaccttcagaaggtggactaatgaagagggactagctaaaggatcttgggaaaaagtggccaggaaggtaaaagacttgtagtaccttgtgtctcaaaagtgaagaagagtttttgtagaaggagttaatattattaaatgctgccagtggaccacatatgatggagactaatgattgggtttattgctgaggaagtcactggcatccatgaaagcctgtttggaatgggcccgagagaacaggagaaggaatagagaaagtgggtataatcaactcctgaattttgttctaaagacagttgtttgtaggaggacataaggtgaagggaaaggctttatcaatattagtgatattacaacaacttgctatacacatgagaattattcagcagagaaaatattgaaaaatcaatactgtaggagaaagaagataatttcctggagtgaggttcttcagtgaacaagaaagtctggtgcctaagtggaacatttggtcccacaacgaagtgtgtatattttagctattgtaacaggagaggaagagagtatatgaattcaggcgtgtgtgagttgatagatttgtaggtgtgatgatgtacacattctcttttgtttccattttctacataaaaagtagaagagttttttcagcaagagggagattctatgaactaagttgtggaaccccacccctcccagagattttgtatgttgaaatcctaacctccaatgtgatagtatttggaatggggactttgggacataattaggtttaggggaggtcatgaggctggggccttcatgattggatgacttgctcttatgagaagaaacaccagagagcttgccctctctctgccatgtgaggacacagggagaatgtggctgtctacaaaccagaaagagggtcctcaccaaggaaccacattagtcagcaactagatcttggaattcaagcctgcagaaatgtgagaaaataaatttctgttgtttaagccacccagtttgtgacattttgttacctaaagcaaactaaaacagaagaagatatgttagagatttgaggagaaaatatgtaaaagtaatataggagaacaataagtgaattgagcagggaaatgtaatagtaagtttggcaggcagttctgagggcttacctaagatttttattcataaatttaaagttggactgttcagcatagtttcaggttttattctagcattattcagctactttagtgcacagagaacagtgttggacaaggaagtttgagttattgggatataatatgatggagggaaagaaggaaaaggaattagggtgtttacaatcatatggtaagtatggtgtataaagatcacgtcaatggtggcaatatgctaataaacaattatgagtgtgaaacatgtatgatctattaaaaattctaacagatagggtgggtttgtcatctgtcaacttggctaggctcaacaatatttcccaaaattccctttcttgtatattgccagttagagtgggccactagagaatgttcataggatgtttggggaatggaaattaaacagaaatttaatttgtggttcatacccagtggggctgttttggatcttggtttggacagcaactgggtctgcagctttaattccttcccctggatcctcctcctcctcttggcaggtatgtgtctagctacatgacaggtgccatctttctgtgcagaacactgtgtcatcaagattgcaggcagtgagaactggcatgggttttattctttcctcatgggttctagttggtccttgatctcccctgtattacatccatcttgtgtccccaactttctgccctgcagacttcaagctccaacatcaaatggaagacaacagccttacaaatactactgagccagctcccatgattgtgtaagattcaatcctgataacatgtcccttattttacatgcagtggttctgcttctctgatagaattatttctgatgccagagatttatagcacatgtcatgttgtaaactgagatgattaactattgggcaggtgtcaattctccctgaaagcagttatgaatttaatagtcctgatacaaatccagttggacacctccgagaacttaaaatgtcagtaagaatagtttaacagtaagtatgccacagaacacagaaagtctctgcactgaatctctgaggctccctggtgggagcataaggctggaacaaattaatagaagtggccaggttctgtaccatgctttgaagcatgacatagttaagttgtgtgaaaggtctggagcaagcaaacataaaccagaatgcaagatgttcatttcagatggcaagaattaagtggaataaaacagtagttatagctagcacatatggtatatctatgtgtgagacactcattttctaagtgctacacacacatactagctcattttatcattacagtaaccctatgaggtaagtattattgtttctattttacacatcaaaaatggaatcagagagattgaagaacttgccccaggtcccaccagtaagtagcaataaggtcacgccagagagtgatggaggttagagctcctaccctactttctcctatttttcttcgttttgacttcagctctgctatttgagaaattaccctggtacaggcaggaaatggagcagctcaatacccccaagataccctttagagcaggggtctccaaccacctgagctctacctcctgtcacaccagtggtggcattagattctcataagagcatgcactctaaatactattcttagattgacggatgtaagtactagatccctgcacatacaatctagtacttttgcacaatccatggaaaaattgtcttccaccaaaccagtccctggtgccaaaaaggttggggaccactgctttagaggaaggtagtaacaattaatcttgtaactaagtgaatgaacttggaccactgaagatggagaaaatcaactccatgagcagagccaggaaaaacaggtaaaaacaattgaccctgtcattaatcttatgtgttgctgggctattggcataaggctggcagaatgacccagggacagactattgagtgaaacatgttaaggagcaaaaaccaagacaaaagttgttttacatccttatgtgtgaggcatttcagtgcacaccaacataaggacactccttatcatgccaaggtggatggacagatcagcaatcagaatagggagggaaggatgtcatgctgctccaggcctgtacacaggtggtcttactgttaaaagataaggcagcatcagtggctggaacacattgcctttgtgcagtagggaagtagttgggcagggatttaagggattatcatttttcataaaagtccttgtaagatttttaagcctacaatcgtcttcatatatgtctctgatgaaagagtacgcactaaaagttataatagaatccaattctttgcctttcaaattagcaaagatattagtgagcctgggatgaaaacactagtaagtaagtgtgtgatggaatgcactagttattgctgctggcagtgttaatcggtatgacctttctggaaagcaatttatcagtatttatcaagagtcctaagaaacctgatatcatctgaacagtaatttcaccctggaaaatctactgtaataaaataattccaaatctagaaaagagctttatacccaaagaagttcagaggttcaccattaattattgtgaaaaactggaaacagaatatccaatcataaataaatgaaccatggtatacccactcaataaaatagtaaatgccactaaaagtatttacaaagattatgcaataacatggctaccactaatggaagagtaagtgaaaagaaccgaacatgaaatcatttatgccatatgtaagatacatattataaagacacaaatatatattttttgaagtacacctttttttttgtcaaaggattagaatacaaagaccacagttgttagaaaaaagtagttgaaggtagctggtaggaaaatggatagttttccttgctttgtttctacttgtgtgaattttcaaatgtctgttaatgtctcaaatgaaaaaattaaggaagttatatgcaatgacagtagtgtaaatttaattttcagaaagaaagggaaacaaatgaacaaacctaagccccttcaacccaacataattaaagccaaagtgaagtccccagacttccaaaatgtaatttaatgttcccctattgtagctgttacaggaatagctttcaaagtaaagcccataatagaacctaaaataaataaatgttctgaatgtgtagcagagcttggtttattttgaatcagttggctgacaaactttgttgtgattaacctgcatgggcaggcagaaatttaacctgaatatttggttagattgcatccatcttgcttattccactgaagaaaaattaatattttatagggaacaggtgagggtgggaagtgaggagaaattacagacaagtgtgttttatattagagactcttctaggccgtggctccaaggtagaattatttgttggcacaactactcctttgcaaaactgtttatggtgcaaaagcaatggcgtgtgggtgcacctgcgccaggtttcttcaggttctctcgggagatgacagccagggcttctcatttgtgacccactaacatacttttaaaaatttcttctgaaggactggttgttattaatgcctagctcttcagaaatgtttaaaaaccccataaatagcatttttcggttgttgccctaaaactaggcttttaatgtgtgtatatatatacacacacatatatatacacatatacacatatatatgtatacacactattttttctatatatttaaaatatgttatatataatgtattatatatattttcaaaagtttaggaaaaataaatacttggatatatacatataaattccatggactcacaagatgctgtatgtaatttcacttttgtttaaaagtatctcctgcccttttccaagtgtgaaattagttatttattataaaagataatatcaaagaaagtatgacaggatagttttgtctgcattttggacttctgaaaatttttgaagatagacacatgtaatagaccatcaggtcatttcatatttgctcttctttttctgcatacctagtgagataattatattatgggaatttgtacattctgtctatgctgacactactatttttactttcaaatttgactgctgccttcagcattgtgcaatgtttggctaatatcacattttggctgtgtcaagagtttcttggtatacattattgcaatagattttgttattggttccagatacgtttatatgtctttcttgttctcagtttctggaggttaatctgcctagcatctttccttttcttgcagaaaggaatctaggaatccttgagagctgaataaaactgccacattattttttttaaagagctgaatgaagtttttggagagaaaactataaactgactcaaagggaaaccttgctaggtatgaaaaattgcagacaaatttagaagtatttttatatatagtccttttccattcttgctgagaatcacaagttgaaaaaaagtgttcaatggtaggcattcaagtgcatgaaaagcatcttggtgtacagacgtctaaagttgaaactagctctatatttggccattaaaataaatgtagcatggcaaaagtggccagtacagtagttttcattttgttttggctaatcaatatgataaacagatgggtttatcttgcaagctgttccagccaaccaagttttcaaaaaaagcattcaattttaatccctgtctcaatataagcaatgcattaatacatgtgagtgactggatataatctaaacagttttatctttatctcttatcactccttttaactttatttagttggggaaacctttcctctattagatgaaaatttagcagattctaaatgtttatgctcacacttaaggtatgtagttactgtaagagataagatatagtcttaatgcataatttaaaaaataatccagagaaatatattagcactttaatcaagagtgaaaggttgagttctatagatggcagtctgggggatttgcagaggaggaagaaaagcttattagcacccttttcctgggcctggattctctagctgtaattctagattctgccagggaagaagggagaaatttagggagacaaagaggcaagttgtttcctaactggtgataggtactgtcaaaacctgacttcttactccgcaggtgtttgcaactaatgctttttcttgtgagtatttgaagacctatgactggccctgtccagcagcagctcccacagcacaggtaatgtttctcttcctgcctcagccctggtactgagactctgtccatctcagggctgatccaaatccttttgtgctccaggcaagctctctccctaacgtgcccacatctggtccatgggaaacacacattctttgatttttaccagtggaaatatagttacatcacaaacacaggcctctcttctctctattgtccctgcacaagccatttaactttctcagtccatgttattccccctgcagagaatatcgggccctccaagtgaagcccttacttacattgagatgtgtgggcaacaaactcttcttttccttgggtagtagaggtaaggctcaagcccagcttttcccatgggaaccttccccacaacattctgtttcattctgtgcacactgtcactttttaatatatccttaatctgtctcagaagctcaagtgtgaaaccagtttttgcacattttgtttgtgaattctgcattttgtttgggccttagctttggcatctttgtgatgaagttcaggatgtggtaccccaacatatggcaccttggcattttgagtatttcaaactaaagagatttgagaaaacgacaaaataaggaaggtctctttgccccttgggggcagtttatgaaacctaccagggattttttgaccttcccctgaggcagacaaaacactcatgtgagaggtacgctccctctacccataggaaagaagcatcttgacctccaaatacagagttgctaaggagaatctgaacaggccttgctaaattagatcataatctttttgctctatcatattgttccagaactctccattcttcatcaaaccttctgtaaaaaaacactcacgtttaatagttactttgggtcttcatttccttatgaaaactcctgtgtcacataaaacttatattaaataaatgagtttgcatttttcttgttaatctgtcttttgttacaggggcctcaggcatgaacctaagatggttaggaggaaaaatatttttcctttcttttagttgcctgggtcaaaactttcagtgaacgcactgttacactgatgtgaacgccaatgacagtcatgttactttgatcttggactaagatttccaaataaaatacaggacatccatttaaatttaagataaacaatgaactatttttagtacatgtcccatgaaccattcaaaaatgcatatgctaaaaattattcatatttatctgaaattcaagtttgtgcattctgtattttatttgctaaacctggcaactgtatcttagccaaagccctgtacatgccactggaagacattctgatgaacatttcattatctgcagggtttaatgtatgtatatgtatatgtctttcatgtccaaagtagataactgttcaacaaatttgttttgatcgcaaatactacacacccagaagcagcaccacatctattgccatcttcctggctactaatttgttttgaggttagaataaagcctgttttccattagccatgttgaggcttggtttcaggaggattctaatatattttgttacaggaaataagctgtttgctctgctattaaacaattcttaattgcttgcatttatgctttaactcaaatacttacttataatatgtcttgtaaggagttcaaatacattacaaatgcatccaattaaggctatctgattctactgttgatattgttagatactgtgctatggtcatacttttactaataaagggattgagcaatgaggttacaaaaaaatcatagaataaggatgctgtttaccaaattaaagtttctacttaatattttttattttacattaggagacttttttcagctcaaagttttcttaacatcttggaactttgtggtagacagagagagaggtgcttgagaggatgccatggaagatgggatccttcttagctgcaaattctgaaaattttagcagaaaataacatggtgaataaaatttttaatggaaattctttggtgatgctttaaatatataccaaacgttttctttcaaagctaacattactgttttctttcaaagccttagcgtctcactggaatgacttttatttttaaacttaagaggataggacctcaattgagattaagttgtgtttgtgagaaaagcatagaatggaacgaaaaagaactaccttaaaagaagctaatgtgaaaaatagtgcatgatttcgacattttatgtcactacaaattcaccaggagctaatggtgtgaccacactagataaaattaatattggtatgaccacttctgtgctcattttggggtgaagtggaggatgtgaaaggattcacaatgtctttgtgaagaagatgttaaataagtagatcattagtctgaggctatctacatagtttgagttcctaagtagcaaaccacaacctaacttaggaatataacaaagagccaagttttggccaattacatgctgacaacttactgcactgtgcccaaataaggcaatgtctaactgtaaagaatcaggtgatttctctactttgcttctccatctggcctgtaaaagcttgttgctcactctgctgggcagagctctttgaaccttttctggtcctgagtcctgcccgattcatgaatcattctttgttcaaataaatattgctaaaattaatttctctaaagttgcttcttaataatagtttggcatcagaagtgggatatgaaggagacttccagtgacccagagaaggtttccactagacccatcattctttcacagtaactggaggtcatgggtaagtttcttcttggattcaagctctgcaaatttctgttttttgttctgactttattgggcaattctttgaccagactgggttcaggattggatgacatccaataaggaaaatggactgggaccactaagagaccttcagcagagaaggttactagaagacagggaatcatgggatcatttggatccaaggaatctataactcctcaatctggaattctggctaatttcatgtacaagaactatggatgcaaaacatgcttttctagtgagatgggtggaccttatcaaagataacttagaattgcagtggagaaactccttgcaaaaggacatgtatttttatagctacaacagctacagggaccaagaggacctccatgtatacattctaaaccaggattccccagccccccgggccatgtacttatatcagtctgtggcctattaggaactgggccactcaggaggtaagtggtgggcaagtgagcattaccacctgagctccatctctggtcaatgactgtggcattaaattctcgtaggagtgtgaaccctattgtgaactgcacatgtaaaggatctgggttgtgcactccttatgagactaatgcctgatgatctgaggtggaacagtttcatcctaaaactatccccccaccctgtctgtggaaaaattatctttcatgacacctgtccctggtgccataaaggttggggaccaccattctaaaccaaaccaagaggtcccaaactatgccctatgccctgagatgtcttcctttattgtaaatagccaggccactggaaaataaattgtccatgcttacaccggccatctgatagacatttttcctttggcctggaccatttcctcactagaggaaatcaagccaagggcttgattcccaggacaataattaaccaatccctccaagaaaaaaaaaaaaaaaaaaaaaaccagaagaatatttgaaaccccaattgcagaaataaagttcattttcagaaaagcacttgtaaaaattagtcctctgttttctcgaatcctgttctcccctgggaccctctctgacaaatgatatgttctgccaacattgtctttcttgttatcattgcctttgctatgccccaaaactctttcttgcaaaacaaacaaaagttaacccatctctgacaataaggcaagattagaagtatccatgctgagtgcaggcatagaaaatgcttgtcttattcttttctggactcaaccctgaactcagttatacagttaaaacacaagctgggcagggaaaccactgatccagctgaattagtctctaaaatttgtctttctggcattagaactatttttagcttattttaaaacccttttgcaagagaaatttacatctataaaggaaatctccatttgtcaaagcttcttcccagtgcagaaagagagactaagtcactagaaactcttacaatggagaaggcattggcttaaatttatataagaagccttacccttggtttaaagatgcttttctggctgtctttttttgtttgtttttgttttgaggtggagtctcactctgttgcccaggctggagtgcagaagtgcaatctcggctcactgcagcctctgtctcctgggttcaagtgattttcctgcctcagcctcctgagtagctgggaccctacaggcgtccaccaccattcccagctaatttttgtatttttagtagagacagtttcaccatgttggccaggctgttgtagaattcctgacctcaagtgatctgcctacctcagcctcccaaagtgctgagattacaggtatgagccactgtgcccggcccatcttgttttaactagacctttacctacactcctgtttcatggtttaggcaaatggcagtatttaagcctgaagtctaagctctatgcctttgagatgtaaatgttctacctgtcttctctaagacctgacagctgtccctttaaaatttaagtttaggggagatgactcattagaagaactaaaaataggtatttagaaactggacaaataaaaatgattgattttccacaaatattagtaaacagttttagccatcaggaaatcttgtttgattatccagaaatacaatttggcttcagatcttatttaataaattagtgagctttgtattactgtaccaggcacatcaccaaaattttaaaataaaagctataagatcagtttctatgtgtttatgtatgtctgtattgatgaagagtcaaactgtaaaatatttgaagagatttattttgagctaaagtaagtaaccatgacacagcctctcaggaggtcctgagaacatgtgcccaagatggtcggggtacagctttgttttacacatttagagagatacaagacttcaatcaaattcatttaagatgtacattggtttggtccagaaaggtgggacaacttgaagcagggctttcaggttattggtagatttaaaattttcaggttgataactggctgagtttatctaaagacctggggtcatagaaaggaaatgtttgggttgtgataagaggctgtggagaccaaagttttgtcatgcacataaagcctccaggtggctggcttcaaagagaatagattgtaaatgcttcttatcagaaaattaacaaaggtattcaggacttgaactcagctctggatcaagtggacctaatatacatctataaaggccaatgacattatgaagaaactatcaattaatgtgcaaagtaaccagctagcatcacaatgacaggatcagagtcacacataacaatattaaccttaaatgtaaatgggctaaatgccccaattaaaagacacagactggcaaactggataaagagtcaagacccattgatgtgctatattcaggagactcacctcatgtgcaaagacatacataggctcaaaataaagggatggagaaaaaattatcaggcaagtggaaagcaaaaaaaaagaaaagcagaggttgcaatcctagtctctgataaaacagactttaaaccaacaaagattaaaaaaaaaaaaaaagacaagggcattacataatcataaagggatcaattcaacagaagagctaactatcctaaatatatacacacccaatacaggaggacccagattcataaaacaagttcttagagacctgcaaagagacttaaacaaacaccccactgtcaatagtagacaagacagaaaattaataaggatattcaggacttgaactcagctctgcaccaagtgggcctaatagacatctacagaactctccaccccaaatcaagagaatatacattcttctcagtgccacatagcacttattctaacatcatccacataatttgaagtaaaacactcctcagcaaatgtgaaagaactgaaatcataacagtctctcagaccacagtgcaatcaaattagaactcaggattaagaaactcatgcaaaaccacacagctacatggaaattgaacaacctgctcctgaaagattcctgggcaaataatgaaattaaggcagatatcaagaagttctttgaaaccaatgagaacaaagagacaatgtaccagaatctctgggacacagagattctgctaaagcagtggtaagagggaaatttatgcccactaaatgctcacatcagaaagctagaaagagctcaaattgaccccctaacatcataattaaaagagttagagaagcaagaacaaacaaatccaaaagaagcagaagacaagaaataactaagatcagagcagaactgaagaagatagacaataaaaaatccttcaaataaaaaaaatcaatgaatccaggagacagttttttgaaaaaaaaaaaaaaaactaacaaaatagactgctagctagattaatgaagaaaagagagaagaatcaaatagacacaataaaaaatgataaaggggatatcaccactgaccccacagaaatacaaactaccatcatagcatactataaacacctctacacaaatgaactagaaaatctaaaagacatggataaactgctggacacatatgcccttccaagactaaaccaggaagaagtcgaatccctgaatagaccaataacaagttctgaaactgaggtaataatagtatgccaacttaaaaaaggccaggaccagaaagattcacagtcaaattctaccagaggtacatagagaagctggtaccattccttctgaaactattccaaacaattgaaaaggagggactcctctataactcattttatgaagccaacatcatcctgataacaaaacctggcagagacacaacaacaaaaaactttaggccaatatccctgatgaaaatcaatgtgaaaatcctcaataaaatactggcaaactgaatccagcagcccatcaaaaagcttatccactaagatcaaattggcttcatccctgggatgcaagggtggtccaacatacacaaatcaataaacataatgcatcacataaaaaaaaccaatgacaaaaaccatatgatcatctgaatagatgcagaaaaggcctttgataaaattcaacatcccttcatgttaaaaactctcaatacattaggttttgatggaacatatctgaaaataataagagctacttaggacaaacccttagccagcattatactgaatgggcaaaagctggaagcattccctttggaaagcagcatgagacaaagatgccctttatcaccatttctattcaacaaagaattggaagttttggctgggacaataaggcaagagaaatacataaagcatattcaaataggaagagaggaggtcaagttgtctgtttgcagatgacatgattttatatttagaaaaccccatcgtctcagccccacaactccttaagctgataatcaacttcagcaaaatctcaggatacaaaatcaatatgcaaaaatcacaagcattcctgtacaccaacaatagacaagcagagagccaaattatgaatgaactcccattcacaactgctacaaagagaataaaatacctaggagaacagctaacagggaggtgaaggagagctacaaaccactgctcaaggaaatcagagaggacacaaacaaatggaaaaacattccatcctcatagataggaagaatcaatatcgtgaaaatggccatactgcccaaagtaatttatagattcaatgctattcccagcaaactaccattgacattcttcacagaattagaaaaaaatactttaagtttcatatcgaacaaaaaaaaaaagagcccatataaccaggacaatcctaagcaaaaaggacaaagctggaaccatcctgctacctgacttcaaactatactacaaggctacagaaaccaaaatggcatggtactggtaccaaaagagacatatataccaatggaacagaacagagactttagaaataacaccacacatctacaactatctgatctttgagaaacctgacaaaaaacaagcaatgaggaaaggatttcctacttaataaaaggtgctgggaaaactggctagccatacatagaaaactgaaactggaccccttccttacaccttatacaaaaattaactcaagatggattaagacttaaatataaaacccaaaaccataaaaacccgagaagaaaacctaggcaataccattcaggacataggcatgggcaaagacttcatgatgaaaacaccaaaagcaatggcaaaaaaagccaaaattgacaattgggatctaattaaactaaagagcttctgcacagcaaaagaaactatcatcaaagtgaacaggcaacctacagaatgggagaaaatttttgtaatctactcatctgaaaaagggctaatatccagaatctacaagcaacttaaatttacaagaaaataaaaaccccatcaaaaagtgggcaaaggatatgaacacacacttctcaaaagaagacatttatgcagccaacagacatgaaaaaatgctcatcatcactgatcattagagaaatgtaaatcaaaaccacaatgtgataccatctcataccagtcagaatggcaattattaagaagtctggaaacaatagatgctggcaagactgtgtagaaataggaaagcttttacactgttggtggaaatgtaaattagttcagccattgtggaagacagtgtgacaattcctcaaggatctagaaccagaaatatcatttgacccagcaatcccattactgggtatataccccaaggaatataaataattctactataaagacacatggacacatatgtttactgcagcactatttacaatagcaaagacatggaaccaacccaaatgcccatcaatgattgactggataaagaaaataggcacacatacaccaaggaatactatgtagccataaaaaggaatcaaatcatgttctttgcagaaatatgcatgaagctggaagccatcattttcagcaaactaacacaggaagacaaaaccaaacactgcatgttctcactcataagtgggagttggacaacgagaacacatggaggggaacaacacacactggggccagtcaacaggtggagcaaggggagggagagcattaggacaaatagctaatgcatgcagggcttaaaacctagatgacaggttgataggtgcagcaaaccaccatggcaaatatatacctatgtaacctacacattttgcacttgtatcctggaactttttaagttaaaaacaaaacaaggtattcaggcaagaaatagcacaataaatagaaaaatacctcacatctcaatactaacattgaatgtaaatggcctaaattctccaattacaagatacggaatgggccgggtgtggtggctgacacctataatcccagcactttgggaggccaaggcaggcagatcacctgagttcgggagtttgagagcagcctgatcaacaagaagagaccctgtctctatgaaaaatacaaagttagccaggcgtggtggcacatgcctgtaatcccagctactcaggaggctgaggcaggagaattgcttgaacctgggaggcagaggttgcaatgagctgagatcgcgtcaaaaaacaacaacaacaacaacaacaaaaaccgaatggcagaatgattaagaattcaccaaccaagtatctgctgtcttcaagagattctcttgacactaaagagtcagtcacataaacttaaggtaaaggggtggaaacgatattccatgcaaatgaataccaaaagcaagcagaagcagttattcttacatcagacaaaacaaactttaacagcagttaaaaaggactaagagggactatatatgcacctaacactggagctcccaaatttataaaacaattactactagatctaagaaatgagatagatggcaacacaataatagtgggggacttcaatacttcactgacagtactagacaggtcatcaagatagtcaagagaaagtggacttaaactataccctagaacaaatggacgtaacagatatttatagaacattctaacctgcaactgcagaatatacatacttttcatcagctcatggaacattctccaagatagaccatatgataggccacaaaagaagtcttagtaaatttaagaatatcaaaattatatcaagtattctctcagaccacagtggagtaaaattggaactcaactccaaaaggaacctcaaaaccatgcaaatacatggaaattaaataacctgctcctaaatgatcattgggtacacaatgaaataaagatggaaatttaaaaattctttgaactgaacaatgatagtgacacaatgtatcaaaaccattgggatacagcaaaggcagtagtaaaaggaaagttcacagcattgaatgcctatatcaaaaagtctgaaaaagcacaaatagacaatataaggtcacacctcaagaagttcgagaatcgagaacaaaccaaacccaaacccagcagaagaaaagaaataaccaagattagagaagaacaaaataaaattgaaacaaaaactacaaaagataaatgaaacaaaagctggttccttgaaaagaaaaataaaattgatagaccattagcatgattaaccaagaagagagaagatccaaataatctgaattagaaatgaaatgggagatattacaaccaataccatagaaatataaaagattgttcaaggctactataaatagctttacataataaactagaaaatctagaggagatgaataaattcctggaaatacacaactctcctagattaaatcagaaatcagtggaaactctgaacagaccaataacaagcagtgatatttaaatggtaattaaaaagttaccaacaacaaaaaaagtcaaggaccagattcacagctgaattctatcagacattgaaagaagaatcagtaccaatcttcttgacactattccaaaagataaagagggaatcctccctaaatcattctaagaagccagtatcaccctaataccaaaagcaggaaaggacctaacaaaaaaaaaaaaagaaaaaagaaaactaccgaccagtatccctgattaacatagatgcaaaaatcctcatgaaaatattagctaactgaatcctaaaacatatcaaaacaataatccatcatgatcaagtgggtttcataccagggacgcagggatggtttaacatacaaaagtcaataaatgtaatacaccacataaacagaattaaaaatcacatgatcatctcgatagacccagaaagggatttgacaaattccagcatccctttatgattaaaactctcagtaaaatcggcctagaagggacataccttaaggtaataaaagccatttatgacaaactcacagccaatattatactaaatgtgtaaaattgaaagcattccccctgagaactggaataagacaagaatgtccactttcactacttctgttgaacatagtactggaagtcctagcaagggcaatcagacaagacaaagaagagacatccaaattgggaaagaggaagtcaaaaattgctgtttgctgatgacatgatggtatactagaaaaccctaaagactcatccaaaaagatgagttctttaactcattttttggaaccctaggagttctaaagattcctataactgattaatgaattcagcaaagtttcaggatacaagattaatgtacataaatcagtagccttgctatacaccaacagtgaccaagccgagaatcttgaactcaacctcctttatgatagctgcaaaaataaaatacttaggaacatagttaaccaaggtgaaagacctctacaaggaaaagtacaaaaccctgctgaaagaaatcatagatgacacaaaaaaatgaaaacacatcctatgctcatggatgggtagaatcaatattgtgaaaatgatgatactgccaagaacaatctacaaattcaatgcaattcccatgaaaatgccaccaacattctacacagaactagaaaaaacaatcctaaattttatatggaacccaaaaagaggccacagagccaaagcaagactaagaaaaaggaacaaatctggaggcattacattacccaacttcaaactataaggccatagtcaccaaaacaacatggtactgatataaaaacaggcatatagaccgaaggaacagaatagagaacctggaaataaagccaaatacctagagtcaactgatcttctacaaggcaaaccaaaacaaagtggggaaaggacattggcaagccacaagtggaagaataaaactggatcctcatctctcaccttatacaaaaactcaagatggatcaaagacttaaatctaagacctgaaaccataaaaattctagaagataacgtaacataagaaaaacccttctagacactggcttaggcaaagacttcatgaccaagaatacaacaaagatatatgggacttaattaaattacagagcatctgcacagcaaaataaatagcagaattaacagactacccatggagtgggagaaaatcttcacaatctatgtgtccaacaaagtactaaatccaaaggaactcaaatcatcaagaacaaaacaaacaattacatccaaaagtaagctaaggacatagacaattctcaaaagaagatataaaaatggccaaacatgaaaaaagtgcccaatataattatcagggaaatgcaaattaaaaccacaatgcaataccagcttcctctggcaagaatgacataataaaaaagacaataaataataaattttgggtggatgtggtgaaaagggaacacttttatactgctagtgggaatgtaaacctgtacaaccactatggaaaactgtgtggagatttcttaagtaactaaaagtagatctaccatttgatccagcaattccactcctgggtacctacccagcagaaaaaagtcattatacaaaaaagatatttgcactcacatatttttagtggcacaattcacaattgcaaaaatatggaaccagtccaaatgctcaactagtggataaagaaaatgtgatttatatatatatatatgtgtgtgtgtgtgtgtgtgtatgtgtgtatacatacacacatacacacccacacacatatacacacacaccatggaatactactcagtcacaaaaaggaatgacataatggcatttgcagcaatctggttggaattggataccattactctaaatggagtaactcaggaatggaaaaccaaacatcgtatgttcttactcataagtaggaggtaagctatgaggactcaagggaataagaatggtacaatggactttcgggattcagaggaaagggtgggaggggggtgagggataaaagactacacattgggtacagtgtacactgcttgggtggtgggggtaccaaaatctcaggtatcaccactgaagaacttattcatgtaaacaaacactacctgttccccaaaaacctaaatttaaaaatgttaaacaaattgacaaaactaactaaatcaactagattcccttggctattatcaatggcctggatagcaatcagatccactcctactgtaatattcaatttaacccctaataaaatagttactgagagactttcgtacctagtaatagaacctcatgtatctcttatgcttgtaatctctgcttatgactaaatactagaaggctttaacgcattatgccaaaatgtatttttaccaactaaaagccgccgcccactgggaacaatcagaactttcatcatctagtacccagagattgggccttttggaaacgacaccagagaaagactgcccttgagctctgttggaaggccatgccagattttcaccaccaataactgcagtaaaacgtcagggcctcaaatcttgggttcacatctctcaacccaagagggtaccttcagacttttggaactttacacccgttgcagatcaaggtaaaactgaccaggcaggtttctactcagaagcagatgacatccaagatgtggaaagctttcctaaaatcatggaccaagtcgtcttttctattttttgttttgttttcttcatgaaacacttgaccttttccctgtgtttcttttctgtttatacatggaaaaataatgtgataataaagatttcacaattgatagcatccatagggaacttaattgaatattggatatgttatgtcaaaactaaatcctacatgatctagatactctagttcaccatgtaacaaattgcatgtgatatccccagtgtgactatttgttccaattacacatgtaattctttctataaagttaggcttctcaatttagatgttcagattccttgcttaaatctaacagtagggaaaacctgtagtgaaattttcagttaaattatgccagaaattgaataataaaaccaaaacttacaggagagataatttgacagcttgtaggtaaatttataaccctcatatatttgagatatttgtcccctccaaatctgatgttgaaatgtaatctccagtgttgtaagtgggatctggtagatggtgtttgggtcatgggagcagatccatcatgaatggcttggtgccctccccatggtaatgagtgagttctcactctgttagttcatgtgagatgtggtggtttaaaagagcctggcatctttctatggcttcctctctcaccctgtgacatgcctgctcccccttttgccacctaccataattgggaacttcctgaagccctcaccagaagcagatgttgacaccattcttcttgcacagcctgcagaactatgagccaaataaacctttatcaattacccaggctcaggaattcctttatagcaacacaaaagagaccaacacaaaccctcattccttaattaccgtaccatctaacaatgcagtgattcaaataatggag

SEQ ID NO: 2473 - DNA, 768 bp, Homo sapiens
gtccagtccccaggggcacccccacacacttcctgccactgggtcctgccagggaggcaggggttcattccaatgcaggccagagcccggcacacggcctgcgtccctgcccccgggaaaggaaggagctgcccccagccctacacctcccagcatccctgttccaggccctccccacccagagtttttcctccaatggaggccccaccccagaggggagacggtcagtgaccctgcttcagttctgaccttggccaggcttaaagcctccccttccacccccgccccgaccggcagcagccagttctgggctctgctctgtgcttttgttcccggctgggtgaagggggcaggcgagagctaggttcctgctctcctgaaagcctcggaggcccagagcggggagcagcgggcctgcaaccagggaaccctgaaaggaagcgggtcctctgtaagatggggctgcatccctgccccgctcccagcagcatggggtcagatgcaaaaactgaggctcaggggagtgaagtgacccatccaaggtcccacagcttgtccgtggcagagctgggtttcaaccccaggtaacagacaccacggcaatggtccctgggactcagggcatcttgcaagggagggccttgtcctcatgcctgccataaagaagctgccagctactggtaacctaaaggattcttgtttccggccccaggctgggggttccctgcacagcaacttgggcctgccaaggtcacccagataattcag

SEQ ID NO: 2474 - DNA, 1321 bp, Homo sapiens
gttttcagaaggccttttgctttcttaaagatttcaaacgatgattgtagttaatctggctgcctgtttgaaaaaccatcagataaatgcccacaaggctctcatctttcagtagcttagctgctgcttgtcagattctaaactccaaagtgcttgactcttccagtgcccaaactaatccttgtttaaattatgtcttcagaagctataactcttatagtggcttgctaaatgataccctttggatctgggctgaagacttccagaatgcccaagtgaatttcaggagcgggctcaatgtttaaccaaattcacctttaccaagggctattcaatccatatctgggatgttttaaataaaactatccaggactgtgggcaatattcaaagttaatatttgttgccaatatgtttggagtgcaagataaagcattataatgtctagacatttttgaaataaaaaagtcttctggttaccaaaaggcattattgtcataggtcatgcaactcagaggtgaaacttgagaaaacagaaagtgactaccaacaggtgacacattgagaagataattaggaatttcctcaatcatacagccctcagcacccatttctcacatcaaaatagaatggtggagccgagtgcggtggcacagcctgtggtcccagctactctggaggctgaggaagatcatttgagcccaggagtactggtctggagcgaactatgcctattgggtatctgcagtaagctcggcatcaatatggtgacctttcgggagtggggaccaccaagttgcccaaggaggggtgaactggcttggtgggaaacagaacaggtaaaaactccatgctgatcagcagtgggactgcatctgtgcatagccactgccctccagcctgggcaacacacaagaccctgtctctaaaaataaataaataaatgaatggaatagaagagaatattgaagacaaggggatgaaggcatgattttaaatgactaaaatggtctgggcatgagccactgcactcagtctcttttgatgttttttaactgatcaactaggtgtgaacagaactggatttttttccccgaagagctgaggctgactggggtgtgacctccttagctgtgtagactgcattgactctactgtgcctagaatttggacaatggcctgagggaccagtatgtgatttaagcataattaaaaggttatacttgagggatagacctgaatctggaagacaactgctaattttctggggcactgaggggtttttgttttgttttgttttttgagacagggtcttgctgtcac

SEQ ID NO: 2475 - DNA, 5356 bp, Homo sapiens
ggaaaatcagacaagagcaaaagaatctgatttttcagatactctgagtccaagcaaggaaaaaagcagtgacgacactacagacgcccaaatggatgagcaagacctaaatgagcctcttgccaaagtgtcccttttaaaaggtactttaacatgtttttatgacatcgtaaaccagggtatcaaatcaccctttgccataaaatctgttctagatattatgtgaagttttaatttttagttaagagattaagataggttctgtaaagtagcagggactaaaaatttaaagttttggtgtttatacccaatatttcaaactattgttgaataatttggatcagtcaagattacgagggacaaagtgttaagtggtagaatatgaaatgcagctgtgttttttgtttacccttgtgtctctaataggaatttattagcgcttttaacataattagaataaggtgaaaatcttaactttcttgaaagactcaccggtttactctgttatcatatggtagcagttgtaaatttccttattttctggtcttcttcatcttctaataaatatccccaggttcttatgacactcttctagaaattttgggctaagaaactttaggtggatggccaggcatggtggctcacgcctgtaatctcagcactttgggaggctgaggcaggtggatcatctgaggtcaggagtttgagaccagcctgaccaacatggagaaaccctgtctctactaaaagtacaagattagccgggtgtggtggcgcgtgcctgtaatctcagctactcgggaggctgaggcaggagaattgcttgaatgcaggaggcagaggttgtggtaagaggtcatgccattgcactccagcctgggcaataagagcaaaactccatctcaaaaaaaaaaatgaaaaaaagaaagaaattttagatgttgataagataagtaatgcatgtaattaactctttgtctcacctctaaacaggaagtacatttcttgatatttacttgtttagaatgaagtgggtagaaaataaatcagcatttataaaaatgtttttaaaataaagttccttggggatagtttactggaaaattgtcaacattcagtctcttttatgttgccttattgtacacaagaaaaattgacatatgttgtaagttcagcccagtgggtttattaaaaatgttggtagtggtgtactaacaccagacagctctctgggatcagagtgacagtagcagcctgtggaaatttctctttgtggaagtgccgatttttctggctggactaatagggaatctccttgtccagaccccgagctttgggattatataaggaaggagcactcttactgatttgtactcttcttaggtgatctttggtgttgataagacatgctttttttctaatgtcataataataaatataagttaatgttggtatgatccagaactctcatctcagaaatgcaataccattattgtgtaaaatgtagttactgatactgaaagaatgtcagaccctatgggcctttatgggaacgtggagaaaaaagaagggaggtaaatgagtaatgaacacacccatacaaaagtagccctctttatggtcttttgcactacagaactctcttttttctttttctttttttctttttgtaggtacatagtaggtgtatatatttatagggtacatgagctgttttggtacaggcattcagtgttacagaaatcttttcaatagccaacttaagattgagtatagtgtttatgattgtgttaattgtattcaactattattagtgcttttgtgatttttgtcagtctgttttagatttgatttttatcccattgcctaccacaatgcaggtattcagtaaaactcagatatttgatgaattaattgataatggacttcttacattaaaattataaagacacaagagcattaggaaagtaacactagccacaaagctaagagccaaagaactctgggttcagtcataggtttgccatttatttgtaatatgtccttggcaaattgcttaactgctctgtgattcagggttttttcatgtattagactggcgaaaaccaactttataggtttattgtgaagattgaatgaaagggtgtgcatggaccacttaccatggtgttgggaacataaaatgttaaccaccataatgaagacactgatcatgatgatgatggtgattgataaaagcaggcctatctgttgaaggactctgagtaactccatattaattgaataagattgtggagttttaaaattatttcctatagtatttaggaacaaggatttgtttgtaatggattttttctaattagtaatgcatttatttgtttgttacttgccagataatcaggaaaaaatatttttaatccatgagtagcaccaaacagtatctataaaagtactcacaatatagcctgggaagtcagactcaaggaacagggaatgaaaggggaaagatgtaggaaaagattggaaaatacaagatgcatgtggagctggcggcctgtgtgcagatgctattagtaattgcttcaggtgccattgatgaagatgggtcagagtttccctaaccttgctttacgttaaggtgaaagaacttctaaaacttttctttacatttctgtatgattgccaacttttttgttaatgaagtagtatctttataaatacctgctgaaagattttgtggcttgattttatttttatgaatttttttacttattttgttttgttttgtttttagagacaggggtcttgctaagttggtcaggttggtcttgaacttctgagctcaagcgttcctctcacctcagcctcccacctcagcttcccaagtagctgggactacaggcatgcaccaccctacccgacttgtttactctttcactttgtttctctttctctctctgtctctctctctttttgcagcttgattttaagaacagactgtcaagtcagtcagtgattggatgtaaagaaaaatcatctaggtagaaggaggcatattttagaagagtctccaagagataattatcatagccctttatggtcattattatttttcttttgtaaagtttctcttgtaagagttttacaaattcttaaaagtgatgtattactggtactttttagaaacatttatgttatgcttgattatgtgtggttatggtttgtatctgtataattaggttcaatagactgacataattttctcttaaaagtataaattactagacaacagtgttgacctttacagctatataaggcagctacatataagtagcctctttattttcctcattcaaactttgtgcctgacttcccgaaccattattttcaagttttttttccccttttttaaaaaatagccaatctttttctttagatttattgtgtacgacttgtcacatttgtcagctaggacaaggaaaataataataaacattcattatgagataaaatgatgatagcagtagtaccttttccctgatatagtaatcatttctatctatttagttacttttaaatgagaaataagttgatcaaaccatgttttctgtatgcttgaaaccatctcccataaaacgttttttaaaattggaattcacttcaaatcatgtctgttgcaaatttgctctgtttggggaaccttgccagggactgcagtggttttaaagtctaataagactgtcgggccggacgtagtggctcatgcctgtattcccaacactatgggaggctgaggcggcctgatcacttgagcccaggagtttgagaccagcctgggcaacatggcaaaaccccatctctacaaaaattagccaggcatggtggtgcatgcctatagtctcagccactcagaaggctaaggtgggaggatcacttgagcccagacggcagaggttgcagtcagcccagatcgtgccactacactctagcctcggtgacagagcaagactctgtctcaaaaacaaaagcaaaaatctatcctctggatttaaggaatttcaaggcaaattagtgatagtacattttttaaaactttgtattttccttgtgcctcaacatccccacaaacaggccgtgaacactctgccctggcaaccagatgcaccagtatgataaggctggtccctgccacaagttccccttcataaccttccctggcagtgccctagtgaaatttaacgaaatcacctcatgccttttgtttgtgtatcctgacccccaatacaagcatttgcctacaggtcctcactctatcagttatacctatttggctgaacccattctttgggcttctcccatatggttccctgcatggtgtaccttgcctccctctctaggacctttgagtataataaatcctttaatttcatttacctctccaagtataattcccacagctatgttggagtgatccttgaggaccccacagggagacttactccctcccccatttaccacacagagagttatagatgataagctgattattggtggttgttgccatcagcagtcaaagaaaagagaatgcccagggtttttttgtttgtttgtttgtttcagaggatagagaagaaaggcattttgagtttcatgggacaagagtcatttgaaatgactctataaatagtgtgtcttaccatatgtgatatattcagtgattaagaaaaactaaacctaaatctgatcaagactctagctccaactgccagtttgcaggacatacaaagaactaggcacatattctaaatgatgtgatggggatacaaccagcaaaatccagaatgtggaagattctacaggacatacaacccagtttctttagcaattaaattagaaggggaaaaaaaggaaaggggatgggggaaatcctataaattaaaagagatttaagagttatgtcggccaggcgtggtggctcacacctgtaatcctagcattttgggaggccaaagtgggcagatcacttgaggtcaggagttcgaacctagcttggccatcatggtgaaaccctgtctctactaaaaatacaaaaaattagctgggcttggtggtgcacacctgtaatcccagctacttgggaggctgaggcaggaaaatcgcttgaacccgggaggcagaggttgcagtgaaccaagatcatgccaccacactccagcctgggtgacacagcgagactccatctcaaaaagaaaaaaagagagagagatgtcaactaaatataatgtatgaaccttgtatgaatcttcattcaaacaattcaactgtaaaataaatttggaacaatggaaaattttaa

SEQ ID NO: 2476 - DNA, 12475 bp, Homo sapiens
cccctgtcccgagcgccccctgccggcggagccctgccaggcctttccgaccccggccggttgaggacccccggaaagaatctggaatttccagaattaatgtgttgtccctaaattgggctccacgaggtgcccttcgctgtgttccccaggccaagcagggcagcccctcaaaaggggacgcgggaggcctccagagggccacaccgggggccctgcttcaaagctatctgcggagacaggcctgggccctccctggacagacagcggttgcccgcgcgaggtggggccccgcagttcctcgtctcctgactcctctcctagtgcgtttgcttgaagcagagcgcagagttgagcccacaggcgggggaccgcggcttcgcccaggccagcgcccacagactttcagcaggggctcccggggagcctggaggccggccaaccccagcctcacatccccaccggccgtctgtccttcgtggccccagtccggctccccttccccctgtgctcccaggagcttcctttctcccttctgccgtcactaaacatggccctgtaccgaccgtcttgtcctcgtgcggtcagcttcctccccttggttagtctttgtgtgccccctgccctctgaggcccgcacacctcctcattgtccaatctcctgggccctttcattcctggaagctcacttctggcttcctctccaccctcaacctgtctgtcctctagggaatttgtgtagtacagggtcacctacttcctccatctcatctccagtgactccacctcagccatcaggtctcagggccaaagcctgggctgtgtcatccctcagaactgctccatcttggaaatccgaagctcaggtgcccccctgtcagacccgactctgcagtcctttccaccttcacagtcccactatgtattgctcttcctccagtcccttgataccttcctcttcgcccaacctaccagcccctcctggcttcacctacttccctcccagctacatctactgcttgactcctggcccctacccaaccaccttgcatttcttccccactgcttacaccagctggtcttgctgctcagtgacatggacaattcagaccaccacatcctaccatgcacactgcatacaatgagcctttgtagctggcacccactcacttctccctccatctggacacagtgaaacaggtgccctccagcagtcagagacaatgcttccaccagggctctgtggctccctcccctcctgtctcctcaaaggtcctgctccaggtgtcccccgctttccttggtctccttgggttggtgaccgtcagtctaaaaacattcttgtcttcctcctattaaagatactgataatagctgggtatagtggcacaggcctgtagtcccagtgatactcaggaggctgaggagggaggattacttgaacccagaagttccaggccagtctgggagacatactgagacactgtctctagggaaaaacaaacaaacaaacaaaaagcaggcaaggtgcctcacacctataatctcaacactttgggaggctgaggtgggagggtcacttgagccccgagtttgggaccagcctgggcaacatagtgaaacaccgtctctacaaaaaaattaaaaattagcccagcatggtggcatatgcctgtgatcccagctatttggggggctgaggtgggaggatcacttgagtccaggagattgaggctgggccaggcctggccccaccaatgagcagtagccaagatcacgccactgcattccggcctgtgcaacaaagtgaggccctgtctcaaaaaaaacaaaaaaagtactgataatacccctccatggactgggtgtcccctctaattcccaccccacatatctgctccctgtcttagtcaaacttctccctcaaggttgtctagattcccccttttcccatttgtacctcaggctaagcctcttgtccccccatcttggtgtcaaagccaaattccttctccaccttgacctgcacagtgcattctagagataccctccctgttcacatacctccactctgccctcatcacctggcacatctcttcttcactccataagatcaagtatgcactgcagacccaggggacacagctgtgaacaggtggataaggtctctgtgagctcccactctggaggaggccatggacagcaagcaaatagacagatgtataaacaagaccagctacagagaggtgctttgaagaaaataaaaccggaagtgactagagtctactttccatggggtggtcagggaaggccttcctaaaaaggtgacatttaagctgtgataccagaatgacaaaaaggagccagtcatgtgaaggtgggcataaacttgttgtcctttcagacctaggctgtacgtcaccccttccagcacgtcccccctgacctcttaggttccccagagcaccctttgccatccccgagctcactagactgctattgtctggttatgggtctgtcaaccccgacacaccgtgagatgctaaggtcatgtcttggtctttgtgatccctgccaccagcacagcacagccctccctggccaacaccacaaactgcctccatgctgccaaggcccaacagtagattggaggcttttttgaaatgcagccttgtgagatctatgagggcagagaatctttattttgctctctaatgtgtcctaagtacttcgaacagtggctggcgtatactatgtgttcaatagctattttcaatatttaaataaatgttacatgattgatattccattatgtgcatatgccattatcctcatctcctactgaaggatatttagattgtttccaatctctttctggccatgtccatcccatgtgagtacatctttaggatgaagtccttgaactgagattgctgtcagaaatgtgtgtatttgtaactttgatagacaggtattgccaaattaaagacattatttttggtgggtcccttccaccccagtaaaattgcaaaatgatcgaaaatgccagtttaggttgcagatttctaaacaaggatgctcaaaaaagctccctcataagacagaactgggcggagtatgagctggccttgaaaatgtatgggatgattgacttggaaagggatgctgagctgccactgtgggcctgattagtcattgttctggaagccctggagacatggatgttttcaatctatccccattctctagagcactgcggccttccatggccacagctgccccacactgtaggggagaaatgccacaggaagagtcatgaaaattatccacattgagatttcagagccatcagttagctgatgggaaaaaggctcatgattggcttctactgcctttgagccgccacttgggcagtgagaatgatgatttgatggaggcaagttgagatagtgaaggaatgctctatcctatcttctgtcactgtgccttacacacaatgtctcatgtaatctttccaacatgaagcagatattattttcctcattttatggatgaagaaactggggcatggaaaggttaagtaacttgcccaacgtcccacatttggaagtgtcggggccaggactggcctaattccagtgcctggatttctaatcgctccatatcactgcctctccaaattaccaatttcggcttctatcattaaaggatctgtttcttcaggactcctccttttagagttgtttccggtcagacagctcgatatatgggaggctgccacatccccttcaccagagactcattgatgaacacctactaagtgctaattgccaagagccatgatgatttccaaagggacccttaatgatagctatcacgttctttcctgcagtcaaatcttatcttcttcacttctagctcatcaacaccaagagggtatgggccatgtctgatgggctggtgcttagtaggatctcagaaaactgctgtctgagagtctaaccagcactggaagtgtgagccagtgcaccctacctgacccttgtcctggcacaaacccaaccatctttgggtttctttaccaccttgatgctatagctattggcttggctgtttcttcttctttttaaaattgtatttttcttctttgttcacaccattgtttcagcaatggatgttccatatttttgtgtctggaaataatttgaaaacttttaatgcttttctattgtgtttactgaatatttaggatttatcttttattttttcatgcattttactaacttttgtaaagaaaatatttgttttcacatttaaaaatcagaatccctgctgacaataatagataaaatgaattacatggatcttctttctttttttaaatcaataagtcatttcactcttttatttatctaacaaatactcactcatttctgctgcctgccgtacagcttagacaagaaaaacagcatgagccttattttgaaactgctattgccaacataaaaagtgaagttggttatataattttggggttgggaagaatattttaaagatgaaatcaacagcaaaatctgtaggaaaacagtttatagatgtgcctgcatgaaaagtaaaaacttgtccatatcttaaaacttcataaatccaacatccaaaaaataggagacctagcaagatcagaggaaacagagggaagactatcaaataaataatacaagaattttctcagaactgaagcacatgaatttctaaatggttttactggcttccagcacacacacaaaaagacccacaccaagacatgatatcttggcgtaccgtaactcttggatattagagaaaattgtttccagattttccagagaaggaagaaaaatagtcccaaagactctgtaattggagtgcaaacagaattctcctccagcaatgctacagattagaggtaaacagagcaatgccttcaaaattctagggagaatggtttcccaactcccagagtcttgatcaagtgtaagaaggtggaataagaacactttaagacatacaagctctcaaaatatttgccttccatgcaccctttttccaaaagttactagaggttgtgctccaccaaaatgaagaagtaagtcaagaaagagaaaggctgaggacctaaggaacagatccaacacaaacataaggtgatgggagcccgcagaataatagtaaaggtagattctgggatcacagctggtgagtaggccagaagagacaccagtccagacagaaacaggaaggcagagacctaggagggaggcaagaaaggaacaaaacccaaagaaatagagattattggctctatgaacaggaacccacaaaggcttaattgcaaaccatctgaatgaccaattgtaacacctcgtggtagagacaagacccacaggcctggctcagctcagctgcctccctccaggctagattcaggatctggatgttcttaaggtgagctgcacataatgatggaatgggtggcaggctctggagttaaatgtagttgggttcaagtcccagctctgctatgtgttttttgtttgtttgtttttgagatggagtctcactctgtcaccaggctggagtgcaatggcgcaatctcagctcactgcaacctccgcctcctgggttcaagcaattctcttgcctcagcctcctgagtagctgggactacaggcgcttgccacaacacccagctaatttttgtatttttagtagagacggggtttcaccatgttggccaggatggtctcgatatcctgacctcgtgatccacctgcctcagcctcccaaggtgctgggattacaggcatgagcactgtgaccggccttttttttgtttttgtttttcagacagggtcttgctctgttgcccaggctggagtgcagtggcgtgatctcggcttattgcaacctccacctcccaggttcaagcgattctcctgcctcagaccccctagtagctgggattacaagcttgcaccaccatacccggctaatttttgtatttttagtagagacagggtttcactgtgttggccaggttggtctcaaacccctggcctcaagtaatccacctgccttagcctcccaaagtgctgggattacaggtgtgagccactgcacccaaccaatccttctgagtcttaaatccttactataaaaaaagagctggtggctgggtccagtggctcatgcctgtaatcccagcactttgagaggccaaggcaggaggatcacttgagcccaggagttcgaggctgcagtgagctatgatcacagcacttcactacagcctgggcataagagctagaccccaactcaaaagaaaagggcaggggattaaaataacgactcatgatataataatgattacagtaacaccctatgacattaaaataatgccccaaatgagatgatatatgtgaaagtactttgtaaactagtgtgagtcacagtggaagttccttagcaacctctgccaacctaactcactacaacaccaccaatctcccagtaaaacacagagactaatgcccagccatgctagcccattgctactagtacagtatcgtttccttccctacattaaatgtggccctttggaccaacagcagagcatcacctaggagtttgttagaaataaagcatctgggccaggcacggtggcccacacctgtaatcccaacaccttgggaggctgaggcaggcggatcatgaggtcaggagttcgagaccagcctggccaatatggtgaaacccatctctactgaaaatacaaaaattagcctggtgtggtggcacgcacctgtagtcccagatacttgagaggctgaggcagaaaaatcacttgaactcgggaggcagaggatgcagtgagctgagatcatgccactgcactccagcctaggtgacaaagtgagactccatctcaaaaaaaaaaaaaaatgaaaaagaaaagaaatacagcatctggctgggtgtggtggctcattcctgtaatcccagcactttgggaggctgaggccagaggattgcttgagaccaggagttcaagaccagcctgggcaacagagcgagaccctgtctctacacaaaatcaaaaattagccaggcgtagtggtgcatgcctgtagtcccaactacttgagaggctgaggcaggaggatcacttgaacctgggagctggaggttacagtgagctgtgattgtgctactgcactccagcctatgtgacagagtgtgatgctgtctcaaaaaacaaacatacatacatacaaacaaacaaacaacagatatactatgtccttctgaagggaggaaggaaaattaatagaatacaggccaggcacggtggctcacgcctatagtcctagcactttggaaggccaaggcgggtgtatcgcttgagctcaggagtttgagaccaaccttggcaacatggcaaaattccatcacttcaaaaaatacaaaaatgagccagggtgtcagggagaggcaagtggagatagtttgagcctgagaggcagaggttgcagtgagccaagatcgggccactacactccagcctgggtgacaaagcaagagcctgtctcaaaataaaataaaacaaaatacagcatttaaaaacattattttatttttcaatttttatttacttattttttttgataccaagttatgagactggctaattttttaatttttggtagagacagggtttcaccatgttgcattatgttaattttctagttaaaagttgagcaaccctatgaggtaaacttactacaggttgagcatccctaatccaaaaatccaaaatctgaaatgctccttttgagcactgacctcatgccacaggtgaaaattccatacccgacacctttgctttctaatggtttaatgtacctagacttggtttcatgcacaaaattattttaaaaatatttatttctgtaaactgtttgagtgcagagatgttcttcacaatctcaatacagtacaaatttcttccccgaaacaaaatgagcaaggaaaagaaaaagagctatataaaatgtgcccatgaagaaccaagccaatctcatctttctttaaaaacaaaacaaaacaatccttttgaatgtgtcgtgcaggcctaggattgaggccgcaggcttttggggcaccatgagcccagggctttgctcaactcacagctagtgtggcaggcggagtagccccctagccccagccatcctcactgcttgcgcagaagcttcctgaacctaagggatctgttcccagctctccttaaattcccagtccccaccctgtgcctcgcttcctaacaccctcgtcgttttaggagtcccagaattgaatcctgaaatactccctccgtcaactctgggctcagacctttgtccttctctgtgtcacaaggaaatttcagtcgagagggcgggaacgggtgttttcagaccgtgcagcaaagccattgccaggcaagttttaaggcaaattttatctcttcttatttgatctgagccagacctaaccttctcaccaccaagcaatcctgcctctgctggacctacaacttaggcaactctggatggaggtgggatgagggagcccaggacagatttcgagaggtctgggaatggatgtgtgcatgcacaaaattatttaaaataatgtatagactgggcatggtgggtcacgcctgtaatcccagcactttgggaggccgaggcgggcggattacctgaggtcaggagttcgagaccagcctggccaacatagtgaaaccctgtctctactaaaaatacaaaaattagccaggcatggtggtgcccatctatagtcccagctactcaggaggctgaggcaggagaattgcttgaacccaggaggcggaggttgcaatgtgccgagatcataccactgtactccagcctgggcgacagagggaaactccatctcaaaagaaaaaaataaataaataaaataaaacaatgtataaaattaccttcacgctatgtgtataaggcgtatataaaatataaatgcattccatgtttacacgtagactccatccccaagatttgcattatacatatgcaaatattccaaaatccaaaaaaatccaaaatctaaaacacttctgatcccaagcattttgaataagggaaacccaacctttatctccaatgtacagacaagaaaaaatggagattaagtcccttgccagtaactggcagagccaggacttgtaggtagatctgtctgcctccaggtgccaggccccacagccattaccctattccctggagggaaatgccaaaagtgtagagaaaatacagatggtgcagaaacatttgagaaatgtacagccttgccagaaattaaaggaatgcaaatccaagcaaccgtggagcatttaccacctatcaaatttgcgaaggtttttgtgcttttgctatttaatttgctttacatccaagtaatacatgttcatggtttaaaagagtcaagttgtattacagaaatacaagctgaaaaccagcccactctgccctagcccatcaaacacacacacaccacacacacacacacacgcacacacgcactcatgcagtgggaggaggggaaggcccctgagccaggcctgtctccctgccatggccttgacctactgtgcttccggacctccccacttcctctgggctctccagggactccgggaatactggcctgatatttctgtgatcttcccagtgcagcaaagcaaggggccgagtggcctattgtggagatgggaatggggaatcagagggattatgcagcaagacaccaaaacttgacacagtcacctataatctcatggtgggaagttttctcaagggaaaaatcaacactggccacataatttgtataaaactacatgtggaaatgctatattttcattgcagtaataatataaagatgtatccccaaattgtgaccctctctcaccaataactgtttctcttgggagactcccctggtgtgcagattttaggagtgttgtcagcagagcacctcagggaaaactggacaggctcttcagagggaggcttctgttcacctgctgggtgggcctttgggcaagtcccctctctgagcctgcttcctcctgtgtaagtcaggatcacattccttgtctcacagagcagtcatggggaccagatgagatgatccttataaaatgcctggcactgggcctggcacatagtaaatgcccagccaatgcaaagaagctgcagtgagctatgatcaggccattgcactccagcctgggtgacacagtaagaccttgtctctaaaaacactcttagaattagaaggtgtctcattttacaaatgagaaaacagaccagaatgggacagttacttcattttacacagagtgttagggcacagagactagaacccaggccacttgacattcagtgacaacttccattcaaggaagaaaaagtcccaggcatcaggccctgctggaaggaaaccctgggaaagcatgatctaattttgcaaactttcgatcagattcccagttcatccaggctctggcctagtctatgtcttggtaagtaggttaatctcccctttcctaaccgctggggagagaatgtcacttaactgcagattccctgtctcctgggcaagcaaggcagaggcctgggagtgatggggagcctctggtggtggtgattgattgagggcaggagacatgagggagatctgccctctagggactacctcccagctcctggtggcatgttgtgcctgtgttctttttttttttttttttgagacagagtctcactctgtcacccaggctggagtgcaatggcgtgatctttgctcactgcaagctctgcctcccaggttcacgccattctcctgcctcagcctcccaagtagctgggactacaggcgcccgccaccatgcccggctaattttttgtattttttagtagagacggggtttcaccatgttagccaggatggtctcgatctcctgacctcatgatccacccgcctcggcctcccaaagtgctaggattacaggcgtgagcccggcctgtgcctgtgttcttgatggaggtaggaaagaaggaaaaggtaagtgcacagtatgccagggttgacatacagtgggagctccagactaaagttggcagagaaggtccagagagggccttcagcaaaacgggaggtcactctagcctctcaataataatcacaagaagaagagttccgcaccaggcacagagctgaaggctttctctctggaggctggttaattctcctatgaccctgatgaggggttatcagcatcttcttttacagataggcaagattaattagttaacccccggccggaggtgatggctcacacctgtaatcccagcactttgggaggccgagatgggtggatcacctgaggtcaggagttcaagactagcctggacaacatggcaaaaccctgactctactaaaaaatacaaaaattagccaggcgtggtagcaggcacgtgtaatcccagctacttgggaggctgaggcatgagaattgcttgaacctgggaggcagagattgcaatgagctgagatcccgccactgcactccatcctgggtgacagagcaagactccatctcaaaaataaaataaaatatgaaaaataaaaactggttatccccaagacacatacctggtaagtggtataaaggggaccatggtctcctcctcccctgggaaccctcccatccctaaactcataccccttccttgagtctcctgccctgcccttcagtctctgtcttgttaccctgctttgtttcattgtcactctttcccccatgagttcatctcatttatttgtttgtctttatcccccagtagaagacacactgcaggctgcatcctgcgtgcttagcaaggtggttggcacataatgggcatgcaatgaatgcttttggaagtaaacagagtggtggcagagggaagtcttttcttaggaagtgatatttgggctgaggccagagtgctgagaaggagcagccacatggtaatctgggtgaagggcattcttggcagagggaacagcaaagacaaaggcctgaggcaggccagagtggtgtatttggggaagggcctgtgtgtctggagtgaagtgagcaaggctcggagtggtaggtgacaaggtctaggaggtgggcagagagaccacagacagaggacttgtcaaccctggcatacagtgggattgcctaggcacttttaaaaataccagggctggctgggcacggtgcctcacacctgtaaacccagcactttgggaggccgaagtgggtggatcagctgaggtcaggaattcaagaccagtctggccaacaaaatgaaacccc

SEQ ID NO: 2477 - DNA, 1286 bp, Homo sapiens
agctgcagaacggttgtgccactgaacagatcttacagggaggctgtgagggttctcagagttcaggcacacaagatcttagcactcagcgtgttgccaatgcccagaatgttctcattaacatgttagtcactggagtccaatctttgcatgccatagtgagctctcaaaccagactcctgatgggtcctccgccactgtgtcagtgacaaggtcacagttattggagctggaattactgtgtatgaagccttagcagctgctgatgagctttcgaaacaagatatttttatccgtgtcatcgacctgtttaccattaaacctctggatgtcgccaccatcgtctccagtgcaaaagccacagagggccggatcattacagtggaggatcactacccgcaaggtggcatcggggaagctgtctgcgcagccgtctccatggatcctgacattcaggttcattcgctggcagtgtcgggagtgccccagagtgggaagtccgaggaattgctggatatgtatggaattagtgccagacatatcatagtggccgtgaaatgcatgttgctgaactaaaatagctgttagctttggtcttttggcctctttaccctgtgtttatgtttgttccaaaaccatcatttaaatctctactgtcacattttgtttcttaaaagcaaagccagctaacaccttcattcatccctagttcggaaattcaagctaactacttaccctttaaactgtcactgcatatgcaagtaccgctctaatttttggatcattaaagggagttacacaacttttaagtgaaaaaaataggtaacaaaacaaccacctgatagtaagttttctgataagactatagataagtggtagaggtaatcaattcttccgaagtgtttccttcgtgaataactggtagaggtaatagttttttcaatgtatttccttcatgagtaaagaaaatgtggattgaagtatagattccagtagcctagtttccacagcacgataacaccatgacgcctactgctgttcccaccttgggattctgtgtgctgccatcccacctgcagctgccctggaattcccttcgctgtttgccttcatctccctccacgtttgagaggctgtcaggcagcagcgaaagcttgttaggatgtcctgtgctgcttgtgatgagagcctccacactgtactgttcaagtcaatgttaataaagcatttcaaaaccagctgctttattcagcacgtgccttctgtgtgaatcagtttctcagtgg

SEQ ID NO: 2478 - DNA, 18397 bp, Homo sapiens
gcgacagagcgagactctgtctcaaaaaaaaaaaaaaaaaagaaaatgttctgtatgactttagagcactttacttattttctttcaccaaaataggaatattttgcaataattttaatatttctcctaaaatataagtttatttggaacttataactactgaaaaaattaaatatgtattttaaataatatgagctagttagacatattattaaggataggtacagaattctgaaggtagagctatgctcatcatatttttttgttgttgttagcagaaggaaaagattaaaagtaggaactatactgaaatgcaatatagagactgaatttgggtaggcaaagaaatagtgtacccttaaaacacaaaatgttaagtagccaactatattattttaaattgggtaggaaattttaagaggaaataattttttaaaggcaaaagcaagttgtcctgtatcaaaaacacaaactcttaaacaaatatatattcaattaaaaagtatacaaataggcacataaatgcctacaatacactattagaaatgatgagtttgattatttagaggtggcaattgtagaggcatagaagtcagaaggatggaaaagaaggaaagcaatgtattattctgtaggcactcccacattgcaaggagagcagtgagatttccccaatccaacacctccttgctcccgagcaagctctcaaaaaggaagctcctgccctctattgcccacaaaccacttcaaatgcaagaaaaacaagcagtctcttttatcagatgattgtatattgaatcaaaataaagcaaagaaaaaaggaccacaacttcagctcccagtgatcagaagcacagtacccagaaggccgggataaattgtcagctatttgggtatctggtagtcaaatttacataatcccatgtaattctaagattaatactcttaagtaggcaatgtgagacatatttctaaatatagaaaagccaaaaatcaaacccagatctgtttgattaaaaaattgattatgtccgtctctttatgttacatttctgttcagcaaacaaaaaaaatgtcaaagtgatttttttcttactttttatttagatatgttgatattgggaagccatcaccaccaataacttttaagtgtctgtgtgtgtgtgtgtgtgtgtgtgtgtgtgtgtgtatacacctcattttccttctctagacttgggctctggtataaaatatcacaaatatttagaaactttgaaatcaggacagatgccaagttttgtttttgtttttgtttcagttgttcctgaaactgttattctctgatttttaaaaatattgttgagcttgaattgtagacagcttagaagtatttgaataatattttttaagtgtgccaagtgcttttgagcagaaaatgatggcatcttttctctaaatcaattgtggagagactagagaaatttagccaaagatgattcagttgtgtagaaggagactcacaaaggctgttaggcactgaagtgggagaaatccttgactggagaaatttaaaagtaaaagatactatttggccttttatgaacgatttttaaggtatggtcttaagaaaaacggcttacaaaaatgaacttcttaaatatcctcttgtgtctgaagttatttctttttttacacaatatctactatattatctagaagaggaaaaggcactcacatatgtggagtgggtacttttagacagaagctttacattatcacctcattagaatgttcaagtccacatgatgtttgtttaaacatatttttttttcagataaagaagtgaaaaagtaataactaaaccatttttcaaacacatgagatggtatttgatcactggtatatcttttttttctgaaataattttctttccataaatccatttttgttgtggctaatttgcttgtattaatttaatggctaagatgattagaaaaggatgaacattaaattcgattgagcccataatggaattttcaggtgcttttaaaaacaattagagcttactctttctcaataacctattctgcttatacttaactgttataagatcacgatttcgttctgctattttaaaacatcgctaaaatataatgtctaatatgattaaaaacagaagaagataagatagcctcataaggtaagaattggtgtgtttataggccttaatttcatgtattacccctttcttgtcactctttggaagtgaagaaagagaattagggggcttagaaaaagtaatggctaccatgtcagatcctcaggacttatggcttctgaaagcaaagtcattgcttgcctacctccaagcatggtgacacaaagaacaaagcaaaaaaggaagggcacagttttaagttccttgcctttgtgataatgccaatgaaatgtcacaattctacactagttaactgtaccaagaatgatgacctcattcagttcaacaattatcttactcaaattcaaagctaaaacatcttacttttacaatacatgcgaagtattataagtgaaaaacacttatgaattaaaaatgttgaacatttttacacaaaatcagtctaaaatattcttctatcctaaaatataaattaatcttataattagagtttttacccaagaaaatctgttgcttttgttttacatgcatcaaactcatgaagtttagtgttctgctttgcaaaatattttacaaaatgcctcaggaatttcagttgtggcaaatgaaacttacacaatttcttcattgaaactctattttatagataaacatgccgtcctcccgagagttaaactgcttttttttttagctttcttatttatttctttatttcttatctcgattacttaaaaattttgtacagtctttctggagtatgtgtttataagctgaatttattgtaccatggcttagaatcaactgaatattgaaacctgaacaaacacaaatataatcttctaagtaacttgtgagttttaattcatagattttaaaatcgtgtcaatattctgtaattttgaaccaagtgcatacttaaatagtattttactgcttttaaaatattttgaatttacaacctattttaaaatgttgaattacagtctgatgctcacagagtgaaaacaaatgccaacaatgtttgcctggttataatcatagaacatgtctccaaagtaaatctatattaacacaattcaatgtggtaattaagatagaaaaaagcagcactaagctgtgtgtcctatcagtttccttggggagaaaaaaaaaaccactgacgtgacttgaaatgtgtccaaggggtttagttagcctccaattagctgcaaagtcctgcaattaaaatgcacaacaaataccagcctccatgtccctgaaccctttattatttaagtcctaatttcagatggttccttcattagagcatatatcccaaaagctacctttgacttacaattacactgtacaatcagtgctgtcaggtgataagttggaaggacaacagactccagggcatatcttggtgaacctcaaaggcccaggtcttaaccagaggcaaacaacagaacaaaggcaaacattctaggaacaatctaccatgaaaataggccaaattgttgcccctgtttaaccttgcagtttatacctgtcatgaaatccatatagtaaattcaagaggccatgcagaaatatgaacacagcggatgtgtaaagagcgggaaattggaatctgtcttttctcaggttcagaaagcatatgccatgttttcatatcattttcaccttctgcatcattacttcctttcataatcatttggactcataagaaatgcttttttgcaatttaaatactaccttgacacttaatatccaggttggatgacaaaaaagtcggcttactaactgtttaatgaatacttctgagaccatagttagtttatttttggacagatatatttctattataaatagtctacttttaatttacttttttggaaattatggcccatttttctttataaaacatgtctcaaaatgttattcaattcccagacaggacaggtcagaaagtagtctaacccataatataactttaatggccttcagaattaaattttacccatttgtaacacactgaatatgtaagagttgtctcaacttccagttaacgtccaaataatattctgtgcctctgagcaaggatatttttaaaaagagccaattatttggtcataattacttccctgacaatatcagcacataaaagagagtgggcgaagggaaaactttttatatgaaaacaactttcaaaattaatatgattttataaataaagggatctttcaaaattttgttaagggaaaaatattaccaagagtcaatcatccctcagttgatctaaatgagagaaaaattgtatgtgaatgcatttttgaaagtgtgagttgacgtgtgtgagcatgtgtgcataatctatgagcatgtgtatcagcatgcgtgtgtgcttgaatttgtgtggatgtgagcatgtgtttgagtgtacaaacatgcataaatcaatatgtgtgtgtgatgtgtggaagagaaatgtggtattcataggctgagactggcaagcaatgcacgtggatacaagtggaatagttatcacctaagagaaactcacagcaattcaacaccatatggaggaattgctggaaaaagctggtggaggaatatgttaaacttgattgttgaaataatattcatctaaggcatgtaatttccatatgatctttttgcattgaaggtaaatcaaaagcaagctctcaataaccatatgaaaagaaatacaatttcataagtaaaaggatctttcaaaattttgttgagaaaaacactagtgagagctgataatccctcagttgctccaaattgcgttaaattggattgccttaaaatggcaccattaagaggataaaaagaagtcacagagtggaaaaaggtatttttaataaccaacaaagggcttatatccagaatatattaaaaacttgcataatttcattaaaaatcaggccttcccttaggaaaaaaagtgcaaaaacttgaatagctgcttctcaaaggagaatatcaaaaagaccaatgaatctggaaaaggtctcaacctcttctgtggaatgtcatacaaacccatggtgtggtatcactttcctctcaaagaatggctaaaatagcccagatgaaagtagaaccccacttgcaccatgttttaatggacgtcatattggggtgctttgtgtggctctgcacctgtcacagggcaaagcatccgtaggctaaaggcaaatgccccctaaggatctgccataaacccactaccagaccatgcttgagctaccagcaccccacattccctgtccagacagcctagaacctgttcccacaaagtgctctgggctttctcctgggtttttcatctgaagggagatgataccacctatgtgtgtagctctacatccaaggaatggttcacacccaggaagtagtagacagagccttagtgtatagatcggcttttctcaagtgtgtttctctttgtaagttcaccatttttttcactcatttaaacctatcaactttatttttaaatatttctggtatctttcaacttctgactctatctgaaatatcctttcagttatcattgattcctcattttcctgcctaaaataatccaatgctcagcactgctatggagataaagaaaaaagaaatctgtaacattacaagagcctacatttcctctgcctgaaaagtcaacaatcccttcttgtaaactctagacttcactctgattctcaactacaataccttgaaactcttcaatcttttcatttttctacctcaagtccatcttttccctctgcctagaacttcccctttcaagacactcacatttcacctcgtcgattcctatgaattattcatagctcaattcataaacattgttctcaaaaagcctatctatactccccaaattgtcagatcttctattataaaattctaatagcattctgcattactttcttagcatttacctagctctaataaaataattttattggctgttcaatatctgcctcccaatttatataaaaatttttagaacgaaactcttcatgtatgaatgctctatatgtagttgtttaataacaaaatataaacatttagctatgtaaattgggaaaatctgccatatttagattatacgaatgaaggttgaataatgtttaaagaatactttaaaatctcaatgatctgtccaagaattatttttaaaatggtgatattctacataatacattattttaaataaccctaagattatgcttctaggaaggataacagaataagcaaaataaataaagatacaaatctataaacttaattataataaggattattagttaaacaaaatatacatagatataaattcacaaaccataagttttcatattcaaacaattttagaacttatgtgtacattctcatataacatattatttatgatgcatattaacagctattaatgctgcatattaacatcatattaatagctatcacttttgagaattgagcaagtataagataattcaattatccctaatctcacaaaaagtccacaaagcagacattattcctgattcactggtgaggaaatgaggaataagtagctataaaacttgccaagattcctgagccagagcttgagtgtgtctgtctgacctcaaggcctggcccttcccctttcccctcaacaacaaaaaaatcatttttcttttgacagaattaagtttttcaatctctaagttcagtttttggatcagagcttaacttttccaaagaaaaattgcttaatcaaatctcttaaataggttagcatttagcatacatcgtgaatagtgcactaagcagaagaaaaataaggcaacagcaaactaagcaacctatcgaccaacccccagattagtttgttaagccatttgagggcaatttcaaacaaatcttttctttgtaaagtgggaacttctaataggctactttgcatttactaaaggagagtacaaacaaaatcaaaatataaaccaggaaggtactcatgatgcaatactaatgtacaagaaaataagcaaataatgctatgaaatgactgtaatctgctaagtatagaagtatattattttaatttgaatacacatattttctttccctgataagctaattgtcaatgattgaggctcaaatccaaagtaaaaatcaattattgaacactatggctcattttaagctagaatctcagtgtgcaatttattttaatccttgtcctttatctatggagaaaggatacacatgtgcatcataaaatgccagattgtttcttacattttcttaggaacatagccatattgaagacacaattaaccacatgatgttaattactgaagaaattatcattgctaaaataaagtgagaattgtcatatatatatatatctacagaattttgaaatggcatgtaatgtgttcatatatattcttacagtgtatgtatatattttagctatatataaattaactaaatatatgtataatatatacatacataccacgtgcacatgtacacacacatacatataaagtatgtcagtgatctaacttggatatatctaaactgtaaatttgaaaatcaaagaaactaccatattgcaatctatatgcaactgtatattttacatgaatttgtggttatcatatagcttaaattggaaagtgagtccctaaaagcatcattaattcagacaaagtaaatgccagaaaataaattaggtgcatataaaatgaggaactgcaaatatattacttacttttatattagtggaggcaagaagacaaaatgtaactgaagaaatgtttttcacagataacttacttcctgaaaaaaaagtattttccgttaacgctatagattttctttataattctcaacaacactacctaagcagtgttttgcaaaggtgtggaggcatctctgcttttctccataattggagatatagtcatggaaaacagaaatgctggacatgttggaaaatgtgtcctctgccattttctcatattcttgccagcattatgttgacatatctgtgtataatcacatgataataaaacatatttttacagcttgagccaccgcgcccggccctgagtcgacttttaagcataatatttcatcctgtgtgaaggtgaagtatttaactttgctgagtagatgacaatacttcaagggaacatgtgtttactaacctgtttggaggagagttaaataatatctagaatggtgtaaactgtgatactcactgtggaaaaatatgtaaaaaaattttcttaaaaatttccgttttatttacaccatcactataatgcatctcttttataaagaaatgatttacacagacttgcaatatttctacataatttaaagcaaatacttttacagcagtcctttgaaaactttaataggcctaaaattctgctgaatgtggacacatgtttcaaatgcttttggccatctgggaatgtggcgttcttcataggagctctactcccgaaactgccagtgcctttgctgcaccaggctccaaaaacctattgataactatatcatgttgtgcaggtggaaattgaccttgatcatattagacaaatacataaaaggaagactgaagaatacaggctacttaagacaaaaatatccattcctgaagatgggtgggaaaagtagatattttaatagaatgctctagatattttcttccgctttctggcaccaaagtaaaacttaggtgccaaagtggcacttatcttcaaagaaccacctttttttctcttattaccattgtatgagagaaagtcattggcattttcatcatgtctcaagatttgtaacatctacctagaggtatgaatttgcttttcatgcatttaaatgactataaacagcattcttttgaaatcacctaatgagttctatgatatgaaaacagatatgtatccccagaaataatatatataattctgattctataagagaactattggggcttttttgtgaacattattatagctcaatattatctttttgtttttcatggtattccaaagatcatttaaaggatgaggatatgtaaggttttcttcagtgcacttgtctttggtgataatgccctagttcactagttcagttgcctattatgcgacatccttttagggattattctgatgtacataaacatacccttgctaagtacatacacatatataccatatgcacacatgcacacccacctgcatacaaacacacacagacacacacacacacagacacacacacacacatacatttcttatcctggattggagttacatggtactggagggggggttatgtttctaaaaatccaatagtaattaatggaataaaaagtattcctttctttatattgtttggctattttaaaatgaattttaatactttggattatagtttaataaagatgatatggaaaagaaattatttacttaaaaaaatcaaaataatgcagaaaaaagttatttgtgagtatttatgtgaatgtgtgctgcactaaataatgaagggttttctatgtcctttcttccacctatcttgaaaatccacactcaaaacttcctttcttattaaaatgcccttggtaaaaatccatataactccactcacttattattttctatatatgtaaagaaatttttacatggtatatagatagcaaatacatattaatgttttatgtttttaatctcttacaatggactttgtgcaatgtccataatgatgaccacttttggtatgcaacaggatgataaaatgtttaactgatgcaccaaaatataaaaaaaaggtagatactaaagtaaattctgagaagaactatctagaacttgaaaattatcatagtgtgatcataaacaagtcagttaagactacaagagataataatgctgtacaaaagccaggagaaattattttcaaggacaatttattttagaggatctactagtgttttcagagttacatatcttcttcctgacccatttcttttaagttttagatctggaagaattttgttgttgtttgggtgtgcttttttggagatggggtaaaagtgcagactttaaaaatagaacttattaaatcctttaaattttaaaatttatctttaattgacacattgtaattgtgcctgtttgtggaatacatcgtgatgtttctaattttcattcaggaataatgaaaaaaaccttgagactgacttataattttattctatttgctacttgatcagaataaattatatgtgcatataggtaaagttacaagggttaaagaataggtacaaaacatcacgaaaccagcatgcctcgtttgatgcaaaattcctataatgactacaatagtaatgatagtgactatcatttaaaaatctctatgcccccaagaagtattcatatttcatgtcagtcttaatagtagacatttataaataataatattcatcatgaaatgaagaatagattgaaagaaagtaaggataaacataaaagcttcaaatcattgtattcttattcctctagattttcaacttatgtcagttatgttcacagaatatgaaaattctatgaccacacatgttcggtcagccctgccctttgacaggtaactgataatttctcctctgtgagaacactttcaggaattatttattcacagatttatttgtgtcagattcaaatgaatgttttttctatggtatattattttagcttctaaatttgtttttagaagtgatgacataatcttgacatacttttgttcatttataattatagaattcagtttttctttctttagcgtagctctggtttatgaattaagagaaaaaattagcaaaaatgatattcatgacttctcagagttaaaagaaataacttataatctaaaatatttaatatttgcaatatttcacttacaaaacaatcacactgctaataaaataagctacaatgccacttaccatgtattggtataaatttaatggctgtcacaataaagattgaagcctcctggtaggatatggaaagcagagtctattcatagagaaattagaaaatgtcagctgtgtggtttccatggaataacttggctttaattaaacatctattcattagtaacaaatgccaaataacattaagctgttagtagaatattaattacatgcttaaggactaatggtagcatattaacaattaatggtactttaagaaactagatatactatagtacataatttgtttaaattgaaagctattctacgagtgtgattttttatttcctaattgaaaaactccataattatatgcacaatatacatataattctatgtacaatatacatataattttgaagtttttttcccctgaatatcatggtatatatttgggtactatgtatatgtccaaatatacctctcttaactttaaaaagcattcattacaaattgttctctttctattcttgcctccctctggaaaaaggaaacctcactttatgcataaaatttctatttaagatgacatgatggttgagttaatatgaaaccttaaaaaagtaaagtcgaactatgaaaacacccattttaaagaactgtttctccgtcccagggtctctccttctgtctcaattttctcttctaacagaataggtatatttggtaaaaaatatagcaggacaggacccagattcaacgaaaagccagagacatcccactctggaatctgacacaaagactttctcattcaacacagacaggcactgaaatgcctgctagatctgctgccttgatactgtgaaaggacattttgaatattctttaatgtgaaggcagaggaaaagaaagtaattatattttaggattgggagctcttttatcgaaaactctgtggacctgtttgaactttgccaaaacatttctcttcaaatcaagtagaaccttgtccatatacttggaaacaaattaactctcaaatacagccagatgatgatagacagtgttgttgaccacacatatgaatccgtcttgatctttaccttataacatttcagttattcctacagatggaagggtgcactttcctgccccttgactttggaatcagcgaaagagatattagcaaaagtggtatgatgaaactgacactccatatgtgctttatggagttgtgttttcctgattcttcatggtccatgtagatgtgttgatgtctgtgcaactgaaggaacaatcacctcttccagtatttatagactgctttttgcaggtctgcaggcctgcctctgtgagtacagatgggtttgtctccagtgtgtgggtacacctgcctgtggactgagctgatcagggttgaagctaggtcacagagatgcttcaggagttgaagttggaactgcagtcagccagcctgttacccaagagacaagcagaatacattatcttttgttttatgctgaagtagagtgcagcaagcaaaaagcagcaaaagacacataatcaaagtacttggaatgctgactgtaaaattatgctgagaactggctgcatgataagatgcttttccttcctctttgttatttgtattattttgtaaagataggccagtgtgagtatgtccaaataagctaataatctatttcccttaaaatttcagcaaatattcaagagaataaaaatgtaagttattgtccacacagctaatgttaatttttcattaacataatttaagtctcggtgatagtttgaaaatgttcataatgttcattatctaataaaatagataattgtggaattatctaactcgtagaagattaattgtggaagagttgtttgtatatttgtaactgtctcgtttttagtaaaaccaatttttttttctgagttaaaatattaaacaatgaaaaagtaaactcaataaatgtaattcagtgccttgcataatagaaaaatgttaacaaggtaaaagctgttaaaattgggatggtttcaaattttaatgtgaaaatttctgtgataatttaatctgctaatataatgtttaactctagatctctttcttgtgacatggctcgatgcaatttaggttgctgtcattaaaattctacaagcacatcatacaggcctatctgcagtgtacccatttctgctctacctatgtacatacctaaacctgaaaacagggttggagctcacttcttatgttcatctccttgccctcccatgctcatttgcagcatagtcagatgaagtatagttaacaaacttatagcaaagacaaagcctcgggcttcagtttgagctttgactttaccattcagtagctttgatacctgagctaaattgctgattttgtttaagtcttgctttcccttcgcgtaagatgagctgaaagttattagcttcttcacaatgttaagaattaaagggaaaatataaaaagtacttagtacaatgcctggtgcctactaagtgttcaaattcattatcaccatcaagattatcctcctctttctccccctcttccttattatctcatgttttaaagaagtcttggatggggaagaaataatgaaggatgtgtgggaagtattatatgatagtacatccagagagctctgcttcagaaataaacatgtagatttttctctttgttttggccaaatatggctaacacaaatatatttacaaaaactaaaaagcaaagaaaattggtgtaatttcagggaatttagtacatggtaagaattattatgtctgaaagacaaaagaaaaacaatataactatataaattataaattgaaaatttatatgaaaagtagatatacttttataaaattaatatatatatttaaatctgagaatttaaatgttctctttaattattaacatcttttttaatttgtttgttttgtagacaccatgtcattaataagtaagaacctgggtattagacagagattttagggatttccattttctcatgtgctacggtttgatagtaactgagcattactttccctctctgacacccaaattcatcatctattgttttaaactaactcacagaattataaaaatagaataagtaattattaggtgtaatttttgaaacttttgatgcctaaaatccacattcgttttctaggattattgtaaaaacagtatcactaattgggtagattaaaaacagcagtaatttatcctctcacagtattggaggctgtgactctgaaatcaaggtgtgggcagtgcctgctccttctgaagctctgggtagaatccttccttgtctcttcctagctcatggttttggccatcaatccttggtattccgtggtttgcagctgcatcactacaatccttgcctctgtcgtcacgtgctgtctctctgggggtctccgtcttcacgtggtcttcttaaacagacaacagtcacgctagacgaggacccacctcagtgacctcaccttaattttattacatctgtagaccctgtttccaaatagggtcacactcacaggaaccaaagatgataatatttttttttggagggagggagttcaacctataaaagtcttgagcttgaatataaacttaattcaatatttcaaggctttgtactaaagccctggatttatacttaaactgtttctgagatgactgacagctttagtgacagggatctccaatcttctggagcaatctcatgaccaaggatctttaatttttgtgtcttgaatcttgcagttctacacacattagtgtacatgcttcatcagagaagaatgggaaaatgagcaggaaatcctgtttttgtgatttctagattcaacctatggtttgatgcagtagaaacatataagtggagatcctactctgaaaatgcctaaaaaatgcaggtttcatcgaacatattttccacttatggtgtagatttaaaaacctccatttttggcagtctctataattctttatgttaatacctcaagtgaaaatacattatggtctattagtcacacaatattcaccatcagagataatcatgatagccatgactctgtttcctttttctgaataagtaacccccaaaatgtgacccatcaaattttcaagttatgtaacaccttacaattcctatgtcgagacaatgttacccaacaagaaaatacaccaatattcagactacgtcatatgcagcacttaatatcaggccagagttaatacggaatcagagcaaagctggaggcatcacattatctgacctgaaactatacttcaaggctatagtagccaaaacatcatggtattgatacaaaaacgaacacatagatcaatggagcagaatacagaagacagaaacaaattcatatattgaaagccaactgatttttgacaaaagcatcaaaaacatacattagaaaatggagagattcgtcaataaattgtgctggaaaaactggatataatataccaaagaatgaaactagacttcaacctctcaccatatacaaaaatcagatcaaaatagattaaagacttggatatatgaccacaaactataaaactgctagagaaaaacctagggtaaatgcctcaggacattgatctaggtgaagtttttatggctaaaacttcaaaagcagagacaaaaagaaatagagaaatggtactataggaaaataaaatacttctgcacagcaaaataaattattaatagaataaagacatgacctgtagaatgggacagaatagttgcaaaatattcaattgacaagggacaaatatccagaatatgcaaagaactcaatcaactcaacaaaaacagaaggaaaaaaaacactgagaaatgggcaaagaattttaatagacatttctcaaaagaagatatccaaatggccaacaggtatgtgaacaaatcttcaatgccaagaatcatcagggaaatggaagttaaaactacaatgagattgcatctcatctcagatagaatggccaattattcaaagacaaaaagtatcaaatgctggtgaggatgtggagaaaagagaactctcatatacagctggtgggaatgtaaattagtacacccgttatgaaaaagaatatgagggtttcttaaataactaaaaataaaactaccatatgatccagctattctgccacttggtatccgaaagaaaggaaatcagtttataaccaggaaaaactgcatctctgtgtttattgtagcactattcacagtagccaagacatggaatccatctaaatgcccactaacagatgagtggataaggaaaatgtgatacatgcctatctctaatgttgtcattgtacatacacatatatacaataggatattaatcagtcataaaaatagaataaaatcatatcactttcaacagcatggatggaactggagatcattgttttaagtgaaataagccaagcacagaaagacaaatatttcttgctctcactcataggcgggagctaaaaagggttgacctcatggaagtagagggtggaatgatggttacttgagtccggcaagggtgaccagcattaattaataatacgtgagcctggtaagggtgggcggtaaagagagattggttaatggatacaaacatacagttagaagaaataagctctaggatttaatagcacagtaaggtaactatcgttaacaataatttactgtatatttcaaagtagctaaaagagaagatatgaagtgctcctaacataaagaaatcataaatgctcaaggtaatgaatatcccaattaccctgatttgatcatcacacattttatgcatgtataaaaacatcacacattcctcataagtatgtacaattattattcaactttttaaaatatcgatttaattgttaatcatttcagaggctactgaagccaaaatacaaaatgccaaatatattaattaaaatcactctattggacacactctttttccccctgctaactcccttaaagaatctatttctgttctcatccttgaaggtcctgttgttatatgaatcccttccttctttcacacgtaactggtcaaaagtagacaactgaactaaagtaaattcattaatttcttagaagttaagatttttttcttaaacatacgagctaagaaaaactagttacatttgtagttgaatttcattatttgatattgtagacaagatctctgcaccactctctgttgataagaaatcaacatatatgtaccaacaacatatgataaaaacctatttagataaggttttttgttcgtttttttttttttttttttaatgactgaatctcactccattgcccaagctggagtgcagtgacgcgatcttggctcactgcaagctccgcctcctgggttcgcacaattctcctccctcagcctcccaagtagctgggactacaggcacccgccaccatgcccggctaattttttgtatttttagtagagatggggtttcaccatgcgcagtggctcacgcctataatcccagaactttgggaagccgaggcgggcgaatcatgaggtcaggagatcgagaccatcctggatacagttgttttattactatgtctatatctacagaatggtacgcttaaagaagacataattacttcagtacaaattttgtagtctgttttgacatttggatcagaagattgaggctcatggactacacatttgtaagtgtgtgatgtttatcagttgcataaccaaactcaaatattgctgatcaatatgcatgtggcaacccagagcatggtctctagaaaggtgtgctctgctacctgacttcaaactatactacaaggctacagtaaccaaaacagtatggtactggtaccaaaacagagatatagaccaatggaacagaacagagccctcagaaataatgctgcatatctacaaccatctgatctttgacaaacctgacaaaaaccagaaatggggaaaggattccctatttaataaatggttctgggaaaactggttagccatatgcagaaagctgaaactggatcccttccttacaccttatacaaaaattaattcaagatggattcaagacttaaatgttagacctaaaaccataaaaaccctagaagaaaacctaggcaataccattcagg

SEQ ID NO: 2479 - DNA, 2993 bp, Homo sapiens
gggtgggttagtgggtggagatgatcaaattagagttttatacccatcacaagcatcttttaaaaatacaattgaaataaacatattttttcagttatacacaagatgaatggattaaccactggaagacctgcactactacaaatgttaaagaaagtccttccaagaaagaaaaaaggcaacttaatggaaacttgtgtctaccaaatggaaagaagagcaatgggaatcctaactacgagtgtgagaaaaaaagttgaatgtggtgatggggaaaacactgaagttcaaaagaagcgaagacaagaagctactcatggcagcagcttttcccataaatcaagaaatgctacagattataaatgagatgagactatcaagaagagacctaataggagtgtgaagaccaaaaatttaaaagacgtggttatatactttgagtaaactctatatataggacaatgttattgtttggttctgtgttcctcactcaaatctcacctcaaattataatccccatgtgtcaagggcaggaccaggtggaagtaactggatcatgggggaagttttcctcatgcttttctcatagtaagtgagttctcataagatctgatttttttataagcatatggcatttcccctcctagcattttgcctcctgctgccttgcaaagacggcagttgcttcccctttgccttccgccatgactgtaagttccctgagtcctctccagccatgtggaactgtgggttaattaaatctctttccttataaattacccagtcttgggcagttctttatagcagtgtgaaactggactaaaatagaaaattggtaccaggagagtgaggcactgctgtaaagacatcactataaaggcacctgaaaatggaagcaactttggaactagctaatgggcagaggttggaaccatttgcagggttcagaagaagacatgaagatgtgggaaagtttggaaattcctggagacttgttgaatgctttgacgaaaatgctgatactgatatggacaataaatttcaggctgagatgctctcagatacaaataaagaacttgttgggaactggaataaaggtgactatttgctatatatgctttagcaaagagactggtggcattttgcctctgtcctagagatctgtggagctttgaacatgagaaagatgatttagaatatctggtggaagaaatttatatgcagcaaagtgttcaagaagtgactcgggtgctcttaaaaccattcagttgtatgcattcacaaagatatggtttggaattggaacttatgtttaaaagggaagcagagaataagagttcagaaaatttgcagcctgatgatgcaatagaaaagaaaaatctcattttctggggagaaattcaagcctgctgcagaaatttgcgtaagtaacaaggagacaaatgttagtcaccaagacaatggagaatatggcctcagtcaatgtcggatgtcttcactgcaagccctccaatcacaggcctgaaggattggagagaaaaaataattttgtgggcaaggcccagggacttgctgctttgtgcagtctctgaacttggtgccctgcatcccagctgtgtctaatagtggccaacatacagctcaggccattgctttagagggtgaaagccccaagccatggtgtcttacatgtggttttgggcctgcagatgcacagatgtcaagaattgaggtttgagaacctccacctagatttcagaggatgtatggaaactcttggatgtccaggcagaagagtactacaggggcagagctctccatggagaacatctgctagggcagtgcagagtccccactggggcgctgactagtggagctgtgagaagaaggccaccaacctccagaccccagaatggtagatccaccaacatcttgcatcgtacacctagaaaagtcacagacgctcaacaacacctcatgaaagtagccaggagaggcgctgtatcctgcaaagccacagaggcagagctgcccaaggctgtggtatcccacctcctacatcagtgtgattggatgtgagacatgtagtcaaatgaggtcattttggaacttttaagacttaatgactgctttattgtattttggacttgcatgaggcttgtagcccctttgttttagccagtttatctcatttggaatgggactatttatccaaagcctgtaccccattgtatctaggaagtaactgacttgctttggattttacaagctcataggcagaagggacttcccttgtctcagatgagactttggactgtggccttttgagttaatgttaaaatgagttaagactttgaggaactgttggggaggcatgattagttttgaaatgtaaaaagacatgagatttgggaggggccaaggacagaataatacggtttggctctgtgtccccttccaaatttcacctttaattgtaatcgccataacccccacatgtcaatggtggaaacaggtagaggtaattggatcgtggaggcagtttcttctatgctgttattcatgatagcgaatgagttttcatgagatctgatggttttataagcatctggcatttcttctgcttgcacttctcattcctgccaccttgtgaagaaggtgcttttcttcccatttgcgttcaaccattattataagtttccagaggcaaacccagccacacagaagtgtgagtcaattaaacctcttttttaataaattaccactctcaaacagttctttatggcagtatgaagacagactaacacagaaagatatagctgttttggaaacatcagaagtacagttgtagcaataaataaaatatgaatagattaactttcgtacacctatttgtgttgaaagcaccaggagtcatagccaacaatcactttaatatttctccagctaattcttctgatttatttttatgtttggttagccagtgacttccc

SEQ ID NO: 2480 - DNA, 3638 bp, Homo sapiens
cagaaatatctctgtctttgttcagatagaatagatatctgaacagagatagttcagatagttcacatatctgaacagagatagagatatctctgaatatatccacatatagatatatttatatctatcttccctttctaactaccagagctatgaactcaagatttagtataaatgtgatgaaaacagtcttacagaaactgcctaaccagatcagctccacaattgttctatacagtcaaatccctacaataaatcattttacaaatctttctttttttgtagattttacaaaatcgtacaacaaatctttagatttatagatcctacaacaaatccttttagatctatagatcttgtagtggttttgcttctctaattgaaccctgatataatgtattccaaatgcggagccaatagaatttgctaacatattggatttagggtacaagagaaagaaagaggtcaaaaatgacttcaaggtgtcatttggaaaccagaaactagaagactgagaaaccagagagtgagagggctgaaattgaatgggtctaagggagaaaattaaaaatgtgtagcaatgttatatttaaaatacctactagacatctagatgggggtgtcaggtaagcacctgggtttacaagtctagaggcttcagtgaagagcacttaactaaagaaaaaatgggaagtcaccccaatatcatagataatgctaaggttgtggaaatggatgtgggcacctaggaagtgaatatagaaaaagaaagaaaataatctaagaatgaaaaaatgaaagaagaaaaagaattagaaaaatgaataggattcatcagagattaagaaggagtagccaatacggtagataaaacggtacctagctatgtcaaatgttcctgatagatgaagactaaaaatataacattgaatttagcaatggagaggtcacttctgactttgagtggaacaactttaagtagagtgatggaggcgaaagcttaactagagctgactcattagaaaatgagaggagaggaaagtggagactaaaaatgcagtccacttttctcagaaattctagtgtcaagagtagcagggaaacggtagaagctggtgggagatatgggatataaaacacctatatttttaggtgggaaatgttacagtatgtttatatgctgatgtatcaggccgttcttgcattgctataaggaaataactgagacagggttatttataagaaaaggggtttaatcagcttatggttctgcagactgtacaggaagcatagtactgtcatctcctaagtttctaaggaggcctcaggaagcttacaatcatggcagaagatgaagggagaccaggcacatcacacagcaaaaggaggagcaagtgagagagccagtgggtcaagagaggtgccacacacttttaaatgaccagacctcctgagagttcactatcacaagaacagcacaaaaaggatggtgctaaaccattcatgagaaatctgcccctgtgaccacctccggctggccccacttccaacactggggattacaattcaacatgaaatgtgggcagggatgaatgtacaaagtatatcagctgatataaatgattaagtagatcaataaaagaaattaatgattggggaaaactgctaaagcaatgcccttggaaagatgaatgggatctagagcacaagtagataggtcttggattggaatgtaggctgtttacgtgtaaatgaaagaaaggcagttatatgagtttaggtatagatggattagtagatttggtaatgggaatctgtggaagttctttgctgattacttctattttctcagtgaagaaaggaacaaggtgttcagctaataacgtggtttgggaagggagtttgaaaagagaagataaagaaatactcatctaggagagtaggagtgtggatggactagaaaaaaggtaagatcgctgggaagcacttgagtttggtagacatggatttaaggacaaagcctatctcagtacatttcactgtggagagaagcaggacacaactccttcgtgcaaagtctgatctgaaaaaaaaaaaaaaaaaaagagagagaacagaaggagtagagccaaccatattcaatttcttcttcaaagaaagtggtcagataagtcaacctacttccagtacagagaagaaagccaaaggacagggaaaagctggaagtatctcttttctgggctttttctccttgggaatgaaatagttgaaaatgtccttccttctatgaaaacatgaaaaggaggggtaggtgtccccctaacgtgtggcatcgtttaataaggccccaatgggatatgcattctgcacactgtactacaggatttctttaaaatacttcttaaagaacccatccaattttatgcaagtattcaaaagtctctaatgggattcattttaattattgtaacagaaaaagaaattcttggtccccaacatggaaatccaagatgcaaggaaatcataggctctgaatcacctggggaagaaaccgctgcagaccaaattgcatcttagatccattaaatcagaaacttggattgctggattcaggtacaagtatttttaaagctccctaagtgattataatgtatagccaaagttgagaactactgctttggagccactggtctaatggaacaaattgcattgatttacttcccttaatattactatgtataactaactaaataagatgtattattttatgtttcttcttaatattggcataaaccaataaattagtgtatgtatgtttcattgttagaagaatatatgaatattatttttgtaccagatattccatcaggagcagaaacgttcacagaaaaggggcacaaattttaggggcagagtaagatgtgaaccatacaatcagctctgagcatcctcctctgcccatttgcctcatatggttttaaggatggtaagtgcagataaagctgtgaatgagaagaggaacagagcagtcatcatggaacatgagagagaagctatgtattcaaggccccagaaccacaagtagaaggagcctggatcccagataattttgtgggtcccatagtcctgaattgcctgcccaggctttaacatgaaagagaacaatttctctatttcatttaaaccacagttattacagggtctctttcaacagccaaacctattacctaactaacacaagtcatgaccaggtagtcttgctaacagaatatctcatattcaattaagtgttttaaatatataccattgttactgcacctgaacaaccgaaaacttctgtgagaagaccaaaaatctatacttagtagaaattttccttcttaattttagcatctacagaaatgtgccccatattttgtcctgtgaatgactttcaaaagttcagacttgtgtaatgccctataagttgaaccaaatattaatttctttgcaatatataaagattttatttaacatagtgtaatataaagataatatatgtctaatgtagtagatgtcaagtacagtatgtgtttggtatttagaccttataaaaaaaatttttctagctcttgtctaccatgtaggtaacatattcc

SEQ ID NO: 2481 - DNA, 4521 bp, Homo sapiens
atttattgatgctcaagataatgtgttatggtactagtaaccccaatcccaaagatgctgaaagtgtcttttgttttgagttttaaaattatcctaatgaatgcatagagttttatatatgtgatgtgttttaatcgattgcagttttgtttttatactaaaactctcccatcttaggctggtggaatcctcttcaagttgtctcccatgtccctttgacatgattgaatttctttttaatacatttctagtttcttccagcctcatcttatatatttccttgacctactatcagccatttctctaagaaaccccggttcttattagtgggaaatctgaccaccaaaatttgatttttctaagaaatattgcccttgagtcatgggcataaacatggcacgtagtatcattctctcttttttttttttttttcaaatttcccaaagtgtttgaaaatgctggacattgtagaaccttcaaatagaactttcaaagtttagcaagccaatctgttacctctgtaataacttgaaatttttacataatgtgtggatagcatgcacaagtgttttcatcttatgtttttacaaattttatttaaaaaataatacttcagttttctgaaacaggaaccatgtacaccagtgttcatccatcaatctcaaaatcacctggtcctctacaaattattatctacaaaagtggatgtcactgaagtcaaaatagaaagtcaacagatctgaaaccatggtgatgcaggaaaatgatgagtcgttccccataatcctgtgccttcttgaggtcaaggtaatattgctcccaaatgtcattcagttctgtggcatcaaaaggtacctgctatgcactaggcagagaccaccaacctctggatgggcttggaacccaagtctctaaaggtgaaaggtcacagcctcacctcacaacactgccttgggcctgtttcttattaccaaataatttccagaaggagatcaggcttgagcctgattttccagtagctgtgcaggggagaaaaagagtttggaaaggaggactgctgttctcagtgactgattgtgagaacaagagtagtgtcaggaaaaaaggccactctcccccggccctagtcacaggataaattgcagtgctcctggctgctcctcagaggaaagaggcttattggcaggagataggaggcaatgaggatccaccaactgacggaccagcaaattcccaggaccccgttcaataaagccactgacaggcacagtccccaaagaagagaggtgaaaaccacattcgtgtacctgaggtgaaagaccaccattaaaaataagtaagaaactccaaatgtgtaaatcctatataagccaaaccatatggtataaaatgaatacattttctccctctacctttggcaaaatggtttcttactggattttatatacaggaaagtattaacccaccttttgccatgtagtttctccctgatatatggcattgataatataagtagttcaatgatacttccactgtttgtgtagctctgcgtataaaaagaatgctgtgcacatagtagaagtgctaaaatcctggggtaacacctcatacattagtggccttccatggtgaacaaagtcatttttcaagcaagtcataaagtagcctaaaacacaagtgtttcagtgtttgctccaaatgaggcagtggtccggggactgccgttcatctgacatcatttctgacacagccagcgctggtttggtatctgattaggactccccgccacagtggtgccagacttactactttaagtgaggtggctgagggaaattaatgtgtcagagttaccaggaggcgagagtgtttgcttcaagtttcctttggaaagcttcagctggaattgcctttgattctttccaagagaatcttttgaagctatttatggagcttggtaataggtgaagatgagctaccaacaggaaactcagctagcatcaaaagtcaagcgtgcagatgtgcaacgatatttctagacaaaagtggtcaaattactgacttgtttagaggatgccttggggtctcctggcaagtgaagtagccattttcctcaaggctgaattttcatgatgcaccctgcacccgctgctttgttctggagaatcgtatatgccctcttgatgtcaatgtatttcccttaaaatataagtgaaatgctgcgtacttcactgatgcatgagaatattggatagaaatacccataatgtgctttgaaactttttgatgaaaagatgaggtatacttaaaagtattaactctgtaatgtgttcctttccatcccttctcaccctcttggcctaggtatacacataaaacttatcccaattcccagccctcttcacttccactttctgggaaaactatgggaactgtggatggaagattctgtggtgcatattttctttcttcaactgaagcaatgtacacaaaagaaatctataaatcttaaagtcagccagaaatatcagttgctattatctttttttgttttagaaaatatagcataagaatacatgctttggatcagacagatctggtctcaaatcctggctctgccatttactcacacatatgtacagctcaagcatgcatgtatgcattcacatacacagacattgacacatgcatgcatgagtacagtcacacactcctcatgcatatgttcaaatagatgctcactcatacatgctcacacacatgtatattcatggacactcattatatacctgaagcttaaacacacaattcacttattctttgcagttacgtatgaccagcagttctgcagctatacttgagcatgattctgtgctctccagaaggacactttattttaaatcttttatatagcacaggaagctttttctcttagtttaaaggccaacaacatcaatttgcagctagaagattgagtttaaatcccacctccactacacagtagctgtgtgaccttggataaattactaagcttgtgtatctctctctcctcatttgtaaatcgggaatttatctcacaagattgagatagatactattattattcccgacttacaaatcaggaataagccattcagaaaagtgcttggcacatagtaagtgcatgtatttatttgctattaatattaaggaatgaaactcagcacagctagaaggaagatttctgttccaacacagccttgaatgcaatttctatgtgtaaatgaaatgtatttcatgtgaaataacaaacattcagatcaggtcatcttaatactacacatgacaaagatgtatagtttaataaattttgggctttgctggtttatccacagagagggtcaggtctgtgctcaagtgtctttcagaagacatgagcatcttaggctcaaactcttcaggagatgagagtctgcagccctattaacagcctctaattgcctcaaggttcattttaagctctaattctaaaagtacaatgataggcaagtatctgccctctcagaaatcttagagactgggtggggcactaaacctgaaaggatatagagtccatgtttaatatctattctcttgagtgatatacatactcatcatacttgttagtactctatttccctcctaccaaaaactcttacatagctatatcattttgttttataattagagttgctttgagttaataaaaactatactaaaatgtttattttcttgcacgttctttttatacaattatgatgcactttagagagataaatagtgcctgaatttggaattctgggactgaacaatcagccttatgggatgtgaaaagaagagaaaggcatgagttgagtaacataagtaagcaagatttaaagaaatactaactcccaaattaacatttttggttattaattctgaattactcagcattacagcctactgtaaccttgatttccagcaggcttgaaaagagatctttcatcaactcgagtgaaactttcttttgtaaaaaataccctttgacctaggttacttcaggtctacatgacagttgaataagtacatccttgcagctttacatcttagatagaaaactatatctgtgtcttcgctcttctaaaacctgctattgaagcagtttcataagagttcataccccttcactcttcctagggagccatggagagcctgcagctgaggtactggctttcccgcagctagaagtctctagtcactttagcaactcatcacctgcttcccatttttttaaaagagtgtgaactgcttgaagttttcagataaatataataatgcctatatttacccaattaaccatttctttctttgagataccctgcctccaaaaatatttgatataaattatttttggaaaaggtttagagttttgaataaattacaattaaacagttatatttaaacaaaacttaacaaagtatataaataggaataaatgataagaatggaaataattttttaaat

SEQ ID NO: 2482 - DNA, 699 bp, Homo sapiens
gggaggggtcagctgcggccacgtgagggccaggcccctctctgactgcccaggctgcatccacacagaagattccatggctttccataaaagagagtgggagaatgtcctctctaaaggcctggggagtgcctggggagaggagacagcctcagctggggctcaccagccagcagctgccagccaggccagcaatgccaaggcacccggcgttcctggaagccaagccctgtttgatctaatggggcagctgtgggtgcagacccagataaagagataaacccagacccagaaacctgggggaggaggtgggagcaacaacctctcttccgcctccttcaccgtgagaggaaaggaagcgggatgacatagttgtggctgggactgctggaccccgcatgccagccctgggaggtatgtgggtcatgaaatccacccactggtgacctcccccatggtgagggagggagagagcttctcccctccttggctaagaggacagagggaggatcctacaaattctgtcaggaagcagaaatttggtctgagagcagtgaaggtgggagcagacaccccccaaatcacctgcaggatgagcatttctcaggctctagagagcatgtgtgggacacagccgccagcccacctggtgcgggggtccagcagccacagccatgggaactcctgggcctgttgttc

SEQ ID NO: 2483 - DNA, 304 bp, Homo sapiens
gctctgacagtgcatcaggatcatcttggtccttaaacagaagaatgccagggcccaccgcaggccagcgactgagaattccctgcagtgcaccctggcacgtgtctttcctgaaatctccacgtgtcctcacatcctacttggatagccaatggacatctcaagccctggaagctgtgcgtttgtacccgccctcttgtctgttggttccagtcttctgtgtttctatgtcatcagcctgaagaatggcaaaggagtcatgttgttcccactggtctttttattccacttgcagctgaagtca

SEQ ID NO: 2484 - DNA, 1245 bp, Homo sapiens
ggccccggtggaagttatcgggtggcagcagagttggaatgggataggtagttccccgtttccaggaccccagacggcctgctgggacagtgtatatgagtccggaatgggctggaccagggtcaggctagcccagacttcaggtacgggctgtgatgacgaggagtgggctagtctcccgggtcggtcaccgctgaactctcagagacaatcaagctttcgatgatcatgtgatgaggtttccagtcagttccaggtgaagacaccactggccatcaagaagctaccctctccccaccagacagagcaggatgagagttctataatcctcaataggaggaagcactcaattgaacaagtgcaggaaccagctggctgcctcagcactgacagaagcaaattccatttgcttggacccactgcattccatcccttgtggaagagagcatgtaagcaagacaggaccttcaggcctctgaaaaaaaaaggatcaaagaactgaaactcaccagatcacctcaccagatgctggacccctcattcaccatgtttgcttccttgcctctccctagttcttattttcttacacattgttacatttcttccctgctatatcaacccctagttctagtcagtcatggagatggatttgagactgatctcccatcccctcagctacaccacctgattaaagccttcttccttggcaataatcattgtctcagtcattggctttctgtgcagggagcagcaggacctagactaaacccctggtgttttggtaacaaaataaggccaggcacagaaagacaaacatcacatgttcacacttatttgtgggatctaaataccagaacaattgaactcatagagatagagagtagaaggattattaccagaggctgggaagtgtggttgaaggagttggtgggcagtggggatgtagaatgtgtccaaaaaaaggaatagaatgaagaagtcctagtatttgatagcacaacagggtgactatagtcaataatcatttaactgtacattttaaaataacttaaaaggtgtaattgggttgtttgtaacacaaatgataaatgcttgaaggaattgctactccattttccatgatgtgattattgtgcattgcatgcctgtatcaaaatgcctcatgtacctcataaatatatatacctactatgtacccacaaaaattttttaagaaaatataccactgcttttccatttgtcaag

SEQ ID NO: 2485 - DNA, 1866 bp, Homo sapiens
caaagctttattcagagccatgttgttatgggttgaattgcatctccctaaaattcatatgtttaagtcctagcccccagtacctcagaatgtgaccctatttgggaatgagtttgttgcagacataattagttaagatgaggtcatagtggaatagggtgtgtcctacttcggtatgactggtgttcttataaaaaggggaagtttggacatagagacacaaatacacaaggaaagctccatggaagataaaggcagagatttacaagccaaggaatgtcaaagacggccagcacaccaccagaagctagcagagaggtatggaacagattcttcttcacaacctcagagggaaaaccctgctgatacctggatttcaaactcctggcctccagaacgacaaagtcttgcttgctctgtcgctcaggatggagtgtagtggtatgatcttagctcactacaacctctgcctcccaggttcaagtgattctcctgccttacgctcccaagtaactgggactacaggcacacaccaccacacccagctaatttttgtattttttgtagagacggggttttaccacgttagccgggctggtcttgaactcctgacctcaggtgatccacccgcctcgatcgcccattattaacaatcaaatggctgttcttcatggtactggtacaaaaacagatatatacaccaatggaacagaacagaggcctcagaaacaacaccacacatctacaaccatctgatctttgacaaacctgacaaaaacaagcaatgaagaaaggattccctatttaataaatggtgttgggaaaactggctagccatatgcagaaaactgaaactggaccccttccttacaccttatacaaaaattaactcaagatggactaaagatttaaacataagacctaaaacaataaaaaccctagaagaaaacctaggcattaccattcaggacatagacatgggcaaagacttaatgactaaaacaccaaaagcaatggcaacaaaagccaaaactgacaaatgagatctaattaaactaaagagctcctgcatagcaaaagaaactatcatcagagtgaacaggcaacctacagaatggaagaaaatttttgcaatctatccatctaacaaagggctaatatccagaatctacaaggaacttaaacaaatttacaagaaaaaacaaccccatcaaaaagtgggcaaaggatatgaacagacacttttcaaaagaagacatttatgcagccaacaaacatgaaaaaaagctcatcatcacgtcattagagaaatgcaaatcaaaaccacaatgagataccatctcacgccagttagaatggcgatcattaaaatgtcaggaaacaacagatgctggagaggatgtggagaaataggaatgcttttacactgctggtgggactgtaaactagttcaaccattgtggaagagagtgtggcagttcctcaaggatctagaactagaaataccatttgacccagaaatcccattactgggtatataccataaggattataaacgattctactataaagacacacgcacaagtatgtttattgcagcactattcacaatagcaaataattggaaccaaccgaaatgcccatcaatgatagactagataaagaaaatgtggtacatatacaccatggaatactatgtagccacaaaaaagagtgagtttatgtcctttgcagggacattgatgaagctggaagccatcattctcagcaaactaacacaagaacagaaaaccaaacactgcatgttctcactcgtaagtgggaattgaataatgagaacatatgggcacagggaagggaacatca

SEQ ID NO: 2486 - DNA, 10743 bp, Homo sapiens
agaaaacagtttagatagtagacaataacttttagttggtttttgtattccttgatattttttaaatttgtttggcattactccaagttgtagttgcttggaggtatataaatttattgctatttagtaaaagctacagagttaaattagcaaaatcctctgagttcgttaggatactcaatgttgtactgctaaggtaaaacatacatcacatttcactgaaataagacagaatacaatatgggaattgaattctgcatggctaaaaggcctccgtagaattctgctaggggaagaatttttttctaaccaatatctgtttaaaatgcatttaaattttaatttttttatggtttcattaggacatttgagctatattttacctaaaatatgtagatattaaattggcctttttgcttttgacctttgaagctgagtgagtgctaattcttgttactaaagttttagtttataatattattagtcaattaactaacatagtctcaggtcatcccattcctatggtcatgtgttataggtgatctcttagtcttattgctatctctttatatgttgtataatatgctgccttttaggtcagttcaaagctctcttcccttccagcatttgtttgccttgtttccagagtctcctaagaaaagctgctttgatttgattgggtctagtcttcagaggaaactgaaacatattttcaattacatgaacattataaatgtatttggcttattaaatgtaattggcttaatagctccttcttctcctttctattctaccttttttttcctttttctctcctttagaatagacaatctagagccacactgtccagtaagggaggcaatagcaccctttggtgtgagcgcttgaaacctgaggagcctgagttaggatgggctgtagctgtaaaatacacaccggattccagaggcagcaaagaatattgaactgctcactgcagattgttgtatgcattggcagttgaaaggtcattgtgagtaaatgttgggttaaataaaacatattatttcattaatttcacatattcttattttttaatggagctactaaaaatttaaattgcatttgagatctcacgatatattttttggacagtgccgatcttgagggaaaagatatagctgctaagacttgaacctaacaaatatgccctcattgttctagttccctcagcatcatggttcattgtgagataataaagaattatacaccaagtgagttattccaaggtacctcctttccacgtggatattgaaaacctgtgtcatgatttgacaatttgtagaagattgtgagatctagaatcctagccaaatatgatctcatcatgttatcataaatccacaaaaagtttgtgacaattcttacaagttttctacttaatgcacggaagttgaaataaatagaactaataatttctgggaaaccaaacacattcagtgcattatttaaacttttattcagtgtcaatagctctgacactattaaagactctattaaaagtacaatatgtcttctgtaatcatgtaagtctcaatggtctctcacaatttcaatcatagagcttttccaatctaataatggtggcacataaaaataattctctgtaattatggatttatgccttatcagtaaaaataagcagctaattacccaatactgatatcagccctagcttcctacaagactgcgaattagattacttgctaggaaataaaccagaaactagaaggacacggttatctttccctgtatttatagaaatatcagtcatagagaccaaacgaaggttgtcttccttttcgtcctttcttagaagtgcatggaggcagaaggtgtctccttttcttacattcccatctagaatcttggcataaattctgtttctagtgttgtttgctaacgttcccagcttcacaattttcctagaactctactgagaagatgtattataagttcaattagtgctttgacatctttgagcctcacaggttcccaaaagcctaacagtttccctgctgttgcctgctatagcccccagcacccagcaggaaagctgcctcaacaggctgccaccttcagcttggccagctgcaccctacccagccctcaacctaatgggctgcagctccctgtgaatctgaggcatttttcaaacaaatgtcctcttgggggaacacaagcatctcatccttctattactgtaaatcctgcctccccagtcagtccctgctagttcactctcttcctgagtgaaacctccacgtggccctgtgtggcgtgtggcgccccctcacggggttgtgagtctttgtgcctcatcactgcagtccatctcctctgtccaacatgggcatcatgtgtttggccgtcttcagaacctagaatgggactctctccctcaccaaggggtaaagaggagacgagcaaaacaaccgccggcactaacagaggggcctggccatggtggaggacacttaacagctttaattgactgttcctttgctcactaactggttcccgctttggggagacccctgagactgagctgcccattgctggctggctcccacggcagttcttgtctctcttggaggctgccatctctttcctttctgaaatgctcctcttgcctccttcgaaatgagaactattattaactggctatctcctggcatgaggttctgttagctgggacctatgtctgccaggttgtcgctgagacccttgccaccaagtctgagatggggggatttaaaaagccccctgaagggatgatgggaggctgctccagtagaggacgggggtggtgacgacatagtgtctgaactggtgggcacttgcgagtggtcaggctggagccctggcggatactgacttccgtgtattacactcagcctggtgactggagacggatttcttgggcgatcaccgggtcatctttccagtaagaacttaggaaaggaggagtcccaggctgtcaacatgggaagtattaagactgacaccccagctgcctggcaggagtcagtgcttctcaggtgagggtagtggcctttcccttcccctgggccgctgcttcccttgctgctgtcatgtgctctcctcaaccccagggatgtcaaattccacatgcatggtggccgacggctccagcactgatgaggaaaagtagggagcctttggaactctcctggcctcctcatgcagaagtcccagcccatgtgcctgtgctttgcttgtgctgctgcttaccagctgcctaaggactcaactgctgatcatggggcttgaatgcctccgcctgggacacagacaaaatgactgtgggatagggactccatcccagaaaagctgactggcattccccagaggctgcggaagatcaccacccccccctcctttccccataaccattcagaaggtccacactatgaataatctcatggaaatgaaaccccaaaaccacaactatatggctagaaaccctaaaaggaaaaaaaaggtaggggaggccctcctggaagaacaagatggggccgtagcagaggacagtttcagtccactgacctctgaactgtgggctgattgcgccgcatcactctgcaacttatggttccacttcaacaaaaacctgatcccagggttatagggaaagatacctgcggtacccctgaggcacagagaagggagaaatccaaacctgacttgagtccagggttcttaaaccacacaactactctgaaggaagaccttaactctgatgataccaattttgggttgtttgaaagaaaaaaatgtacaaacatgagtgggtaaaaagaacaaccttccctaagtatatccagttacaaaaataatggaggaaagggaagaaagaaagaaggaaggaaggaaggaaggaaggaaggaaggaaagagagaactacaaaacaggaaaaagggatgaaagaaagaataaacccagacatggacaaaatcaaaattcatactaaaacagaggtcttataatctgacctaattggaaattcactacttactaaaataatgtataccaccacaagataaaaaggtactgattggtgtttgcacctctacagcatatattctgaactaaccttaacatctgctgaaatgtgccaattagcatcccttcacagactatcagtagcagggatcagactttgttatacccgggatccactaaatttaaacattgcactctctataatccttgcagagtaactgcatttagaatagaggactcatagttatgcctcacctttattaccttgcctaaatttcccttagtcatagaaacctctgtccatagtggacctggatgctctggcctaatgagcaataaattgaaattaaaccatttgcacttacatattgacctcataaaatgtgatcttgtggaactcctcttctgtttattgttttaaaactttatttatttttaaattttttctttttaggaatggtgtcttgctccaccgcccaggtctaagttaagtggcataatcatagctcactgatgcctcaaactcctgagctcaagcagtccttccatcttaacctcccaagtagctaagattgcagccatgtgccaccacacttagctaatttattaaaaaaattacagagatggggtcttgttatgttttccaggctggtctctaattcctagcctcaagcaatcctcccacctcagcctcccaaagtgctgggattacaggcatgagccactgtgctcgccctccccttcctgttaaattagcaaatattgcccaacataaattacaacatgacttcgaaggatccaaacttatcctaaaagacctaattacttagtgaaggggtgattatcctcactgcttcaacatttagcagtgcagtttggcctgttcttaaacctggaaataataaatagtgtttcacagtgaattgcagcaaccttattgctgtcctcctgcccattaaggccccatacccaatccctgacagtattgaaattactgacaccatctatgatggttaattttatttgtcaacttgagttgcccaggtatttggttaaacatgattccggatgtgtctgtgagggtgtttcttgatgagattaacatttgaaaaggtagattaaataaagcagtcaccctccctaatgtgagtgggatgcatccgatacactgaaaacccaaatagaacacaaaggtggaggaagagagaattcactccgtctgatgatctttgagctgagacatagatcttgtcatgcctctgaagtctgacttggactgtaatggaagccatcatctctcctggttctcaggactttagactttgactggaactccactgttggaagtcctgggtctctagcttgctgactgcagatcctggaacttctcagccttcatagcctctgtattagtcatggttctccagagggacagaactaataggatagatgtatatatgaaggggagtttattaggagtattgactcacgatcacaagttgaagtcccacaataggccatctgcaacctgaggagcccagaagccagtccaaatcctcagaacctcaaaagtagggaagctgataattcagtcttcagtctgtggccaaaggcttgagagcccctggcaaatcactggtgcaggtccaagagtccaaaagctgaagaacttggagtcttatgttcgggggcaggaggcatccagcatgggagaaagatggaggccagaagactcagcaagtctgctgtttccatgcctgctttttatgctggcagctgattagatggtgcccacccagattgagggtgagtctgcctctcccagtccactaactcaaatattaatctcctttagcaacaccctcacagacacacgcaagaacaatactttgcatccttcaacccaatcaagttgacactcaatattcaccatcacaaccacatgagccaattccttacaataaacatatatattcatgcaactggtaaatattttcttgttacagatttggctaccatgttctttttgggcctattttaacagagtctcagtcacagcctgccttcgtctctgaagggaccgggcgacccacggagtgtctcggcagcctcgtcactgcacacaatcttcacagacaagatctcactgcagccacctttctacaggagcacaggtgtgacattatactgatgacatcattctcagagaaaattcattttacacactaaggacacacagatacaaggaggcttacacaaagggaatggacctttccccaacacagtagtgcaaggccctgccactttggctaaattcctgaaaattctttggtaaactgagggctgatgtatccctgacactttcaagaagtggttattgaccctttcagtatccacaatgttaatacaagtccaatattctttatttatgtatgtattttttgagacacagtcttgctctgtcacccaggcaggaatacagtgtctcaatctcagcttactgcatccttgacttcctgagctcaagcaatcctcccacctcagcttcccacatagctgggactacaggtgtgtgctaccatacccagctaattttatttattgtagagacgaggtctggctacattgcccaagctggtatcaaactccttggctcaaccaatcctcctgcctcagcttcccaaagtgctaggattacagatgtgagccactgtgcccagccctttaattatttatttggggtacaggtgacaacatattcctcatttacaaattttacttaatctcactgatgctgtcgcttgaaagctgacccaccttgaatgaagcctcctccaacaagtctggaatctgtccaaatttaaattaacaggtgctcctatgaattccatcagagatcacactgtagttgcttgagcaacctcttcctgtgcctcctgaagtatctgggttgcatatggtggccataagctgtccatgggcttctgatgtgaaaaacaaacctgccccccttttgaccctgtgctgtacagcatcagggcagtgattgctgaccacatagtggaccctctggaaacagagggctccgcgtccatgtccatgagccttcatgcccatctggccatcaggccttgggaagcagcaccccatagccttgacacagttacagagatgtccttgccttagaatggagtcaaatatgtaccccctgcaagtctcatctgctggaagcactggccttgttcatcctcaggctgtggtgctggcactgccctccttcatcctcaggctgtggtgctggtactggcctccttcatcctcaggctgtggtgctggtactggcctccttcatcctcaggctgtggtgctggtactggtctccttcatcctcaggctgtggtgctggtactggcctccttcatcctcaggctgtggtgctagaagtcatccctctcccaggccccttgggatcgactgagtgacgagcagtgaagtttgtcctccgtctgaatggatgccatcattggacgtgatggagctcagtggaatgctgctgccttccctcccttagctaggctgtccctgataaaggatgacatccaagcctcagcacgaccggccaaacttgagatggtcgtctcagcactgatgctgggccaacaattagccccatttgtacatttttacaaaccttttggcaatttccaagaattgtccacctcccctccccattgaactaaagaaacttcttgtctcatggatactcagaataccaatcaaggcaacagatgcttttattttaactaagtacacagtacggatctcacagggacactccttatcccctgcagagttccagacactactgatggtgaccaaggcaacatttcatcagaaaacacagtgctgggcttgtgaagaaggtgtccagtagagcttccactgcccctataggctgcaggcagctgctttagttgagagactgagctcctcaaagaattcctatttaagttacaaagcagcgagtggatgccctgctgggttccactgttgccacagcctttgattactctaagttcatgctccttaggaaagtgcactttttacaccaatgctacacagttctctcagttgcctttactggtcatcaaggagttcacatttttgacaaccattcagtcctggactgtccaaggggtggaggtagctctgtacaggaagctgcctgctgcctgtggatcactaatatcagacttgcccaaaaactcactgaaaccactcatgaaaaccaatgcatggggaatgtgtgacgttacccagatatttacgaacacgcttgtgctgccagagaccccagatctctaaaccaatgcatggggaatgcatgacgtcacccagatatttacgaacacgcttgtgctgccagaaccaatacatggagaatgcatgacatcacccaaatatttacgaacacgcttgtactgtcagaggcctcctatcttgccttctgctaaacaaatgggggcagtagctttgcatcggcttccgcatttcattactcgtaactgtggtcttcctaatttctcatgcccaagcacttattacagtgtctctacagccttctctcagcctcttaaaatattagtcatcattaaaataaatacccaatgttaaagcatcagatgtcaatttgtattgtgacacctaaaatttcatgctgcaccccaccagttcctcagcctaatggctttcaccccctgcccgactgcaaaactcttcaaataagtcaagcactttcccccaagggactaggggccacccaccctctgatgactcccaagcctgcctcccacaccctctgcttgttctttctgttcctgagtgcaacccccacatagatctggagagatgcagcagcatcctcccctgggctgagtatgagtaactaatcaattactgtcagtttcatcgtctcagtgtttgttgtgtctgtagccacccccagaactctagggcaagaccagcttcttcaccaactaggaattcacaggaaggaacccaactaggaattgccttttttaaaaaaatcccttcccaccctcttaattacgtaatgcatgcatttttatagctcttttgctcattccattatctgaggtcagccactgatatttaacccatccttagccttggaggagggcagaggaacactggtcatattgatttccctagcagcaacgacatggtttcctcctgtgccactcaagttctcttcttcttcaacttgatggtcagtaggttgtgtttcacttatctttgcagattgttaggaagatgagaatcagtcttcatttttgatggtgccatagagaagactctatggtaatgtttatttgcacaaacaactttctcttcttttcccccagaaattacaaactcttatgtgagaaacagctttctggattctgcaaacatagtttatcctccctcttttgaaggcaaatttcatatattcccacaacaataatacactcacatataattgtggcatgtcatatttactggccactataatgagaaaattctccaattttaaatccaggttaattgtgaaactttgggtagtcacagaaaaaaatctctgtgtacaaatttatagacctcttattaggattaagtgaggtatgaataactaatatttatattagttagcgtatggcagaagcttcttgtgtattattttatttcatacttaaaacaatattctatgcaaaatgctataatttccccttgcctccaatttacacatgataaaactgagcctagtaaaattaagtatcatgccccaaagttctctgcttagtaagaagtagaggcaagcccaaacctaagtcatctgatttcagagcccatacagttaaatgctctaaatgcagcttcccgtgatgatggtgactatgagagcctgtcacatatgatgtaggacagtgcttccctgtaacatgcacaagattcccacgatgatggtgactctgagaccctgtcgcatacgatgtaggacagtgcttccctgcaacatgcacaagattcccgtgatgatggtgattatgagagcctgtcacctacgatgtaggacagtccttccctgtaacatgcacaagattcctgtgatgatggtgactatgagagcctgtcacatatgatgtaggacagtgcttccctgtaacatgtgcaagattcccgtgatgacggtgactatgagagcctgtcagatacgatgtaggactgtgcttccctgtaacatgcacaagattcccgtgatgatggtgactctgagaccctgtcacctacgatgtaggacagtgcttccctgtaacatgtgcaagatcccatgatgatggtgattatgagagcctgtcacctacgatgtaggacagtccttccctgtaacatgcacaagattcctgtgatgatggtgactatgagagcctgtcacatatgatgtaggacagtgcttccctgtaacgtgcaagattcccttgatgatggtgactatgagagtctgtcacatacgatgtaggacagtggttccctgtaacatgcacaagattcccgtgatgacggtgactatgagagcctgtcagatacgatgtaggacagtgcttccctgtaacatg

SEQ ID NO: 2487 - DNA, 786 bp, Homo sapiens
attttcctgcccggaaggatgcatggcccggggtctcctgcacctgagggtgggcgggaggcggccccgcgggttgtgttgctggaaaaaggggtctcgatccagaccccaagagagggttcttgggtctacttcagggaagaattggaggcgagtcacagagcgcagtgaaggaagcaagtttattggaatctactccgttagagagtgcaagtcctcagactgcaggaggaggaactcccgtccttcggtagtgtcactacttagaggcagctgtgaggagctgtgattaatcgtggaatgtgctgatgtgcccactaaagcatcgctgtccttgtcggtgagaccctggctttagggcagacaggaccacgtttcataagttcatgctgtcccagcagaggaataacgccagaaagtgttccagtacaaccagagaaagagagtccatgagaaatctgcccttgtgaagttggaatcccctcaacctcaccccgctgacttgaatgaagcgactgagacgggctatgatggagcagatccggttgctcgaccttctcccttgcaccaacacatgtagttaatagttactggacatgcatattcagtgggttccaggtaccaaacttgtattgaatggtatgtgccagacaccgtcttgagatctggagaataaaaaaataaaaaaataaaaacgagacatccagagcacagtagccttgcggtcttcctggaactagagaaaattcagcccttctgctccttgggaagctatgtttgggaaaa

SEQ ID NO: 2488 - DNA, 1171 bp, Homo sapiens
gggcaacgtgggggcctatccgtagctttcagcgtttcctggaccctaccaggacaagaatcgcggggagaggtgcgaagaaggtctggagaggaggaggcttgggacaatgcagagtcctggaagtgaggctgaccgctgaccgctgtcaggagggacatggaccgctgccggggaatcatgggatttcccaccggcccagtcatctcccacgtcgggaaaagggaagagctgcttccccatggcgtgtgcgcgtgggaagggtctcgggcagagaagaggcactttttctgtcctccaggctgtttccgccaaatgaagacctgggctggaagagccaggaacaaagaggagagtcgagtgctgagcacccagcgggagaggatgcagcccggtcatctcacacctgctgaccacacaacatcgtctgcgagttccccccacctacttcgcctgcagctgccatttgggaagatgactcttgcctctttcaccgtctgttttttagattaggactcacgggcctagggcaggagtcagctcttccagatctttatcgaaaagtaacatcacacttgtgcccaggggttcgagaccagcctgggcaacaggacaaacccccttctctacaaaaaaacccacaaaatctgtgtggaaggtgtgtgaacccttgggaaacagagttgctgtacacgtgtatcaggccctgagccagctgcagggtgggcattactgcttggtgccctccgccctcactcttcctccctggatgttgaggatggccccgtaaaccttgttcataggggtccctcgttttctgagacacctcatctgagcactgacgaggggacacaactcttggctgggaagcaggagactgagcattgccttcaagccatccccacacatgtgacctcagtcagcattctgccctttcatgggtgtcagttgtctcgtccataaaatgggatgatgttcttgttccagccggcatactggatgactaaatgagggaacagttcaaccccaccgccacatcccaccacgaccacaggcatggatccagacaccaccaccaacatcctctgctgattccacgtacctaccattgcccaggccgtgaagaagcgtttgggaggaagggaaacctgaaagagtcacaggaccacag

SEQ ID NO: 2489 - DNA, 38129 bp, Homo sapiens
gcatgttttactaaagtcatgtacacagctgtgatttgaatggcaatatttatcttacatctgtgaaggctgattttcctgacctttgcttcagcataattgagttaaacactcaggggactgtgttactatatttaagacaatatgcataacgggtgttatttagctaagtggtgcctgcccagtaggtgctcaggatccagggagagaggcagactcaacatgcaaacaactcttctatgagggtaagtgtaattgagggccctaggagaactttagtagtggagggtttcttgtgtttctccctttggactgcctaactcaagcagtgttcttgacccatataagctatgtagtgtttcccctctcttatctactgtactaatttctgtgtctctcttggaaattactgccctgatctcgaaacttaacttcacccattgcttggtgagtggtgtggaaaacttctctcgggtctatgtcttatccctgaaaaatcttgccacagctgctcaggaagagtgtacaaactcatttccccaacatgaaagtcacaaaaattttgaaaaagttttccctaaaattgctgtgagaaggtcttgctgattatttttgttctcaattatatattctttggggggaaagcctgtagcttgctcactcatgggacagatctttcgtgggttacatgaagagcagatctgtgaatgttgtcatcccctgcttgttcctgctttcttgtggttaccatctttgtctttaacctttagtttttggctgagtgaaaaatttccagactcctgaaatcaccacaatcagatacaggagacatagtagagctcacttgtagaaagtgtcttttttctggtacagagaagaatggtttagagacacccttctctagtatatgccataaaatagcctatctaaaccttggaatattattgtgttaaagtacatgtagcatgtgtagcatgtttaaatgtccttttatgaagaatttaaagcaaaaaggaaagaaagaaagaaatttacatgcaatgactaggattaaaattattgctgtaattgattaacaaaatttactgtatattctggaagtcagtactcaaaacaaaattatagaaagtaataaatatgttaagtaccaaagagatatattgtagtcctggccatatgttaaattctttcccatgtgaaacattacataggggacaagggtcattcacaattttattacaaatataaaaacagtttacacgtggcaatttctggataaaagtttatggcagcaagaataacacattcaaagtgctcttagaacaaaagtaaaattatcagaaccatgaaatcccacagtttttgctaaattcgtttctcaagaaagactatttgaaaacaaaataaagaatgcatttgtataatcttctttcaccatcaaacacacatacttctaaaatacaaaaactttcaaattatcatctgtgatcattggataattcacctgtcttaaagtttctaaatcaataaatttagtgaatcattgttattctgaagagtaaggaaactgagtaattatcctcaatcattgtgcatttgctactgttacaatgattcctttagtgcttttaaactttacatcaaaacccaattgctcacagtggatacctgcccatttgcacaccatatactgacttattttcttttcctgtcttaagttcccattctcccaccagtgattcttgggttcgtctcccaaataaactactcactcaaatcctactcatagggtctgcttttgggacaaacaaccctaacaatatttaaagaaagtttaaatattatttgtcaaaatatgttctgtgcaaggaaggatatgtggaataatcttattgagaacaattatttttcacaataaaattcaaaaggaatttgaggtatcaactaattgagatttattttctatgtatatcaagctgtcatatattatgtcttggttttgatattttacttttgaagctggcttctgtgtattttctctctctagttatctcagctgtggtaaaagtagtctgcattgctatcaccattgcttagagcaaggtggctggataaagtgatgtgactatcaaagggtaggataaaaatttcatcttaaatattccttctcataatcacataatcctttaaaccaaggatagcctgaaagaaaaaataatgatcctaatttgaagaagtctcaagaatccaaactttaacattagaatgtatgagatttagaaaagaaggcatcatcaactatgagaataccaaaaggaaaacatggtcccataactaccacatatcagtcagcaaacagaatttctcccaagcaaacacagttggaattgcccatggggcaggtcagcaaagagtggggctctttgtttttttttttttttcctgtgggttccgctatgtcagtaatggaaattgtgagtcatctctgtgtccattgggaaagcatgtcatctcttgtgcctggcaagcagctcatcgcatgagagagcctaccaggctcaaccatgaattacataatctgccttcaaaggaatcagaggattaaccaggtgttcctaagatattacataacttgtgtatcttggagagatacacagatagtttcaacagctgccttgataaggagcataatttctcaggagagtaaaaatatatgttcttttttctctaaaattgaaatatatatattttttcactaaatgctaaatgtggttttgatttggttggttagaaattaacttgttttggtatttttcctatttaaaccatcaaaattgtttttaaataattttaattcttttgctggcaggtgaaatggaataacagggattgggcttacccctttactgaacaacaaagaaaagtgaaattataagagaaatattatttatgatattgagtattgggcaataaacaggggtaattttgatgagacagaaaacaaatgaggtgagaccctgtgattgcctgttgggaagattttcagagaaaataaaattgagggtctggggagaccaaagcagttagagttagaccaaagtcagttaatattagcagatagaaaaaaagcagcatgaagagagatttctagagaaatgaggagactcgtcgtcaagtatgcagctaaatactgatcagtgcatgcctgtgagaaaactacctagaaaaactatctgaaaagattggcataacaatgcccagaagtcatacctattccaggaccaggaatactgcctattagcaccagccagactggaagacttcaagacttataaggcattggatagaatagaatagatagaacagttttccttcagtagataaagcaagttttaagttgttttaacttaagcaaaagcacaaaggaagaaactgtttctaagtaacttgcctgcatataagaataatgctcaagaatatttatagtaatataacaatatccattattcagcaaggtggaattcacaatgtctggtattcaacaaaaattaacaaacatacaaagaagcaagaaagcatgactgataattacaagaaaaattaattaaaaccaacccagacttaacacatatgttagaattagtagacagggacattgaaacaatcatcattttatatttcatatgttaaaaaaagttagtagtattaaaaatgcacccctccaaacttctaaagatgaaaactgcaatgtatgagatggaaaagaaactgcataggattagtggtagagtacatatttcagaatgaagaatagtgaacttgatgctatagcaatagaaactattcagaaagttacatagagagaaaagaaaattaaaacaaatagagcataaatgagctgcagcacaactttgagaggcccacttatatatgtaattgtagtccccaaaggagatagggctaaaaattatttgaagaagcaatggctgaacattttctgaatatgataacaaattcaagaaactcaacaaataccaagcataagaaatatggaaacaatatgccaagaaacatgacaatcaaattgctaacatctagtgataaagagaacattttaaagcagccacatggagaatatttcacagatgagaacaaagataagtttggcagcatatttctcatcagaagagatatgttttaagtattgtattaatatacttaataaaaagtgccataagagcttacatacacttaagtaccttaaggtgcttaattagaaaatcttaactgaaaattttagaccagtaaaaatatcttgcaaaaatataagtgaaataatgacttttttgaaattacaaaagctaaaatcatttattattagcagacctgtactgtaaataagcctttcagacagaagaaaagtgacatcagatggaaataaagttctccacaaagaaatgaagagcacaagaaatgatataacaccagaaaatacaaaacatgtatcttattatttaaatatctttgaaaaaaattgaccataaacaaaaaaaatgtaatgtggagtttataatcaatgtgcaattgaaatgtaagacagtgatagcacaatgattggaaagagaaattggaaatatattactttaaatgtcttatactttatgtaaagtgatataatcattttaaggcacattgtaattattttaaaatatatactacaagccactcaactaatagaacaaaaatttgtaattaatagctcctcaatgcagataaaatgaaatcatagaaactattcaattaatccaaaagaaggaaggaaaaagaagaaaaaaatcaagaaaaacaaatggtaaataaagaaaacagttaaagttgttagactaaaacataataaaatcactaatcacactaaatttaaataattcatgtatctttataaaaaggcaaaaaattggcagattgaatttaaaaaatcaagacaacaaatgtgctacatacaaaaactcatttcatatacaaaaacacaaatatgtaaaagtaatgctgaaggaaagaatactgcattaacataatatatcaaaaaaactatattaatgttagagttgatttcaaagcaaataatattaaaagggataagtacagtaattataaaactataatgaggtcaatttatcaaaaaatagtagcttgtaaacattcatgcacccaataatagtttcaaaatacatgaattaaaaatctcacagaattattaaaagaaaagtaaaagttcaccattgtagtaggatttttaactttcttctataaataagttatagaaaattagaaaatcagtaagaatataaaacatttgaacaacactaccaagtagcttgatgtagtagacatttatagaatactccatccagcattattataatgaccattattttcgaaggcacaccaaatatttaccaaaaattattgtgggctacaagtcagaccttaagaattttaaaataattccagttaaagtgttttctctgaccataatacaattaaattagaaagaataacaaaaattcttgggtaattcccaagtacttggaaactaaataatataattctaaataacatataggccaaagcaaaatgaaaggaaacactgaataaaaatgaaaatatatcaaaatttatgagatgccaattaaatattatttagaggaaaatttatacactaaacctttatattagaaaaaaattgactcaataacttcaacttccactctaaaactggaagaaagaaaaaattaaacccaaagtaattacacaaaaggaaacaacaagaatcagagtggatagcaatgaaatagaaaagagtgagatgatagctacatcagtgaagcaaaaatctgattatttgagaagatccataaaattgatatacttccagcatgactgatcagaaaaagaaagttaaaaattaacaataccagaactaagaaaactgacaacattacaaaagttacagacattagaatactgttaaataaatattatagagaactttttccaataatttgacaccttattaggctggtgcaaaataattgcatttttgacattacttttaatgaattaaatagatgaacagatttcttaaaacttacaagttatcaaagcacacacccaagaagaaacagaaattctgaatatctttgtaaatgtttaagacctggaatgtgtagttaagaattaaaaacaaaaacaaacaaacaaacaaaaactcaagtcctaaatggcctcactgatgaattctaccaaacatttaagagagaagtgttaataattttattcagatattcttggaaaattgaagaagtggaaatgttttccaaaagcatttccctgataacaaaccagaaaaaaacataagaaaagaaaacttaagaccaacattccttgtgaacataaatgcaaaaattataaatgaaattttggcaagtcaaatctaattagatataaaacattatgatatcatagccaagtatagtttttcccaaggatgctaggttaaatgtttaaaaaattttcaacataaattactaaattaacaaaacaaaaaagaaaaccatatgattatctcaataaattaagaaaaagattttgataaagaccaatatttattactaataaaagtgttcagccaagtagaaatagaaaggatcttcctcagcctggtaaagcacatctattaaaaagtggcagttaaaacagtacttaatctggaattatcagacttaagacaaaaatattcactctcactacttctattaaatatggtattacatattccagacaacttaatagttaaaataattttaaagtattcagaatggaaataaataaaacactatttacagatgccatcattgctatgtagaaaatccaatgacatttacacaaaagatactagaattcatacagtacatgcattcattaaggctacagaatacaaggtaaatgtacagaagcaaatcgggctttatgtactagtaatgacaatttggaaattaaatttaaaatacctccaataatagcatcgttataaaatatatacagataaatttgataaaataaataaaagtcatatactgaaaattacagcattacctagagaatgagagaggacctaaataatagagagataagccatcttcatgggtcacaagatgatattattaaattatcaattctataagtcaaaccctggaataaatttttggtgaaaattataaattgattataaaattcgtatggaaactcaatgaacctagaaaacttagaacctgtgaaaacaattttgagaaaaaaaaagaacgaagttgaggattaacaatttggggctcttatactgatttaggggcattataaaactacagtaatcaaaacaatgtatatttgaatcatgatagaaaaatagatcaataaatcagaatggagagttcaaaaatagaatattatatatgtggacgatttatttttcatcaatgtgaaataagcaattcagtggagaaagaaagtcttccatcaaacagtactggaacattcagatagccataggaaatgatgtgaactttgtttcatatctcacaacatatataaaaaagactcaaaattcatcatagatctaaatgtaaaatctaaaattataaaatttctagaagaaaacataggatgagctttgcaaccttgggttaggcaacgattttttaaatatgaaatcaaaagcacgatcatttaaacaacttgataaaatgaacttcatcaaaattaaaaacatctcctctgtgggagatatcattaaggaaatggaaagagaagttaccaactgggagaaatcatttgcaaatgatgtacctaatagtggactggtattcagaatatacaaagaactcttaaaacacaacaataagaaattaaacaaaccaataaaaaacaggcaacagactttagcaaataattcataaaaatacaaaaagtgatctataggtacaagaaaagatgcactcagcatcattaatcattagaaagatgaaaattaaaatcacaattagcactacatgccaactagaatagctaaaatttgttaaaagatataccatactaggtctttgtgaggatatggaagactggaatggtcatacactgttagtggaatgttaaatgaaacaaccactttaaaaagcagatgacttttttaaaaagttgatacactgactatattatctaactatttcattcctattttaaaaaaaaacgaatgtttatgtcctcagatgttacacaaatgtttttatatatatataatattattattcataatagccaaaaactggaaacaatggccatcaacatgtggatggataaactaactatggtgtattcatataatgggatgggatgcttctcagcaacaaaaaaatgaattgctgacccatgctttactcagataagcctcaatataattatgttgaataaaagaatttcgacaaaaaaaaccccacatactgagtggtctccatttatataaaattttaggaaatgcaaatttacatgtggtgacagcagatcagtggctgaatggggatagaggaacacgggaaacatcacaaactttttagagcaatggatatattcattgtcttgataaaaagtggcagcacatcagaaacttcctttttgtctctctgggtaatgagtactatttgcataatttgcttcactctgtttcattggttccccaaaatggatgttgctaaagaaagaaatattgttacatttgctaatggctggaccctacccacttatattttgagtttcttcatgacacaattgtcaactaaactttgtagtagatattggtcacaggatttgaggtttgtctcttttcatgaaggaaaaaaggaagattcaaaaagctatgctgtcactgcttctatttttttcaaattatcttagcaatattttgtagttttcagtgtaaaggacttgtacatctctaatagatgtgcatattctaatgaaaagtattctaaatacttttccattagttatttgatttataaatgctcttttgatatcactttaggatgtcattttctaatattcctttataaacatagaaaataaacacatttgattttcatatgttaattatgcatccagagttgtatttatcaactagtaatttatctagttttctatgtgcacaagtctagcatcatcgtgggactgcagtatttcttcttttaaatccttaaagcttttacttattttgtgtgactcattacaatgactatgccctctagcacaatggtgaataaattaatgtagtaggcactctttttgtgttcctaatggtaccacaacaatgatgtttgctgtaggtagaatgtaccctttcaatactaattttctgaggatttatcatcttgaaaaaattttgtattgtatgttggtttttattgtttatcactaaatggacacacttgtttattgtgtttatgtgctgaattaagactgatattaaacagcttttatgtcctgaaataaatgcaaaatatatattgctggatttgatttccagttcatgatgtgtttagagtttttgtgactaggttcatgtgaaagattattctgtaatattattttattaataatcttgtaccattttgatttcaagataatgattgtctcatcaaataaatatggtgggtagtgttttttatatcctataattattttttggttggggggatagagtctgaccttgtctcccaggctggagtgcagggttatgatctcggctcactgcaatctccacctcccaggttcaagcaattctgcctctgcctgtaatgtagctaggattacaggtgtgcaccaggatgcttgactgatttttttgtattttcagtagagacagggtttgctttcaccatgttggccaggctgatcttgaactccaaacctcaagtgatcttcctgccttggcctcccaaagtgctgggattacaggcgtgagcaactgtacccttttgtatgatttttttttaacacgcacatttatcaattaagtgggcacagtttgtggtccaccaaaacaattacaacagtaacataaaaaatcacactgaacacagatcactataacagataaaatagtaataaaaaattttttaatattgcaagaattatcaaaatgtgacaaaaagactattgacatcatttttccacatcatgttttgtctgaaaattttaatataagtttggttttattccttatgtatttggtaaagtagtataggcttacttgttgggtattttgaatgataaatttaatttctttaatagatttaagatgattcatatttctttttgtgtccattttacaaatctgttttttcttgaaatgcatacatttcgtctgaaatttttgattgatgtgcacaaatacattggtatttgatggataacttgattgatgtattagtccgttttcatgctgctgataaagacatacccgagactgggaagaaatagatgtttaatggacatacagttccacatggctacggaggcctcacaatcatggtggaaggcaaggaggagcaagtcacatcttatatggatggcagcagacaaagagagaacttgtgcagggaaatttctctttttaaaaccatcagatcttatgtgatttattcactatcatgagaaagtcccatcccatgattcaattacctcccactgggtccctcccacgacacatgggaattgtgggagttacaattcaagatgagatttgggtggggacatagtcaatccgtatcaattggcattgtttaatttcctcttaacttttaaatatctataacaatgacccttttaaaaatttatgtcgttggtttttgtacctccttcctatcctctctcttctttctctcttcctccttttctttctttctctgctctctgtctctttgtctctctctgtcttgcaaggggtttatcaatagtatcaatctggggttttcaggtttttctcctttgtatttcttctttctatttcactattttataccttctataattttagggcttaatgtgctgctatttttgtttcttcttaagattgatactattaatactctttcattattatgaaattaccctttttatcttttggagtatattttttctttcagtgtgccctcaccatagctgtaccagagtatcttttaaccttattttgctttttaaacttccactatctatttttatatttaaaatatgtctcctttaagtagaaatgggtttctgtatgtagcccaacaatctttttctgacaactaaagtatttaaatatatatagcaattacttatattttggggtttatgtaatcttgccatttattttctgtttcgtctgttctttgctccatattacattatttagtttttaaataacattattattatttgttttttagacaggttctcactctgtcactcaagctggagttcagtggtgtgatcactgctcactgcagcctcaacctcctggactcaagcaatcctcctgcttcagcctcccaagtaactaaaactacagaagtgtttcaccacactcagctaattttttaattcttttgcagcaatggggtcccactatgttgcccagtatggtcttcaacctctgggctcaggcaattctccacctaggcctgtcaaagtgttgggattacaggtgtgagcccctctgcctggccttttagtcttttattgtttttaatgtttaccatatatattataatatgcatccttcactgattagaatatacttttattactttcacacttcctgatcaatgaaagtgcctgaaaagttccactctgatttcttgcactatcaataatatggatattaattttacatataatttgaacatgtattattattgttgttattattatgttctaacatttaatatttggttttgatatgctctgatgtttctccttccttgtgctttgtatccttcctttattattatgctttgttcagggattattttctttctgcctagataattatctttggcattttatttagaaaaagtattatgacctcagcttctctgaacttcttgtttcaccccccaaaaagaaaaacaaataaaaaaaggcctttatttagccttcatttttgaaggagatcattttctaaatatagattcaggcattttctttcagcgctgtaagtgttctctgtctcccattgttttatttcaaaagtcagctcttaatcatattattactcatttgaaactaatgtgtcttttatttgcatgcttttaagattgtcatttggctttagtttttagcagttttatataataggtgttattattttgtttttagctgggctgtgattcatagagcttcttgaatggctccaaagacttgatgcttttcattagttttgggaaattcttagccaacatttcttctcatacttctatttttttcctctgtcatttctcctttttggaatccagttacaaatacatgaacctttttttcaattatgttccacatagctcttattttatatttcatttaatttacttgcttgcttcaaactgtatattttgtatgtgtataagtatgtgaatctattggtaaatactttatttcttctactgtggttaatcattaatctactattaaagtcatctatatcttaatttcagtattttgtaagatccctgatttctatttgatttttaaattaaattccaattctctgatgaaaatattccatctttgtatttatttttggaacatattaagtttagtcctgatacctcagatattttgattttctgctgctctacttttaagtttttctcttacatttctcagtcatttggttctattctctggcatatctgataaattttgactgaatcccaaatgtatatgaaaaattgctggcattctcaatgatatctttcttcttgggggctactaaaatacatgcagattaccttgtttcagcagaggatattctgtttctagtttgcttctcactctatagttgttgccttttcagggatccaactaaaggcctgagatttttgtaagtccatctttttcctcttttttttttttttttttgtagaaatggggtttcactatgttgctatgttgcccaggctggttttaaactcctgggctccagcaatcctcccgctttggcctcccaaagtgctaggatctcaggcatgagccactgcaccctaagtcccttgttttgtaatgatcctacattctaattttcatcttccccgcaccaaaatactgccaaactatctgcctaaacttttagtatctcagcagttgatttctgcttgaattcttagacatatgttcttcaaatgcaaattttagcattcagctagtgcctcaaggggaaattttccacagaatgttatgcccatttctctaaagttcccttttactttggagatcttgatccttcaaactcttactgatttgcttgccatgcctgccaataattgttttcttagcctactcagatagtcctaaactccagagactctctttttgatatctatgcactgtttttatttttttacttattagacatttttccctatttcacagctgtaccctcttccacaatttgtttagacaaaaataatatttttttcaagataagactatcaaatggagtttatgtaaggtaacattaaaagtggaccaacgatcttattttctttttactcattaatttatcttatccatgaacaaatacatttaggctatagattggctctatcaattattttctttaacttttgtagtagattttctttctcttttctagtttcatgcttagagagccttagtgcataaaggtctctaaaaggaattaagaccttctggaaatatgattaaaaggtcttccttttgttttacaccatgtatcattcccaatataacataatgttcgctctgcttagaccttgtgctttacatttctcagaatgagataatccacagcctaaatgcatatagctataaagtattatgtgaattgtcaaaggaggtatgcattttttcatgatattctgaattaatcaccaaatacgtttataaaaggctatgggaattacagttaccctaatgcttctgaattgcaaatattccttatttctgttttgattactgttgtctttaattgagtatgactattttatgtgtacggtttagtaacatagctgtttgggctctctttgtctcttttgcaatgaacattgcaaagcagctgttacaagcatatatttagagccaaagggtactctggcttacatatgggaggggtgagggaaggataattgaatcacaaaatgcttgtgttaaaatatgctctgagaaacaatggaaacaggaaaacaatgccagaatggtgtccacagtgaagagaacaaagcctgactctaaacagaggttgctaaacaaatcagtccctatgcaattagatggaaaagcacttagcaacaatataaaaatgacagactagctgaaaatcagcacaatagaagatgactcagactctctaaagtttacatactttagaacattactttcaattccacatagagttagttcacttgcgacttcatgatatggaaatgaaagtgatgataaaaaagaaataatttctgcattacaaacataaagtcaatactaatttgacttttattaaagaaactcaaatccttcataattaattcctactgaaattttgcccaaaatcatacagactttatagtttagctttttttgtaggtataaaattgacatattaagatttctgaacttttgcccagcatttctagttctcttattctttttaaaacttcatattttagatagcaggcctccctggcatctgaaacagcatgattaagtatgaatatacatgtctttacctccctataaaagactattctgtatgacctgtacatttctcttggtgtaacactattgcttcaattttataggctcacacctatgagttttcagtctgccaaaccctcctggtgtgtgtgtgtgtgtgtgtgcgcgcgtgtgtgtgtgtactgtcatactctaaggagaatgtgtcttaacaactggagggtttgtttaatctgacctctttgaagatttgaatatgaaagtttgggatcaaagtttaaagtggagcaaattactctgcataaaattggaagttaatgaattgggggtaagagtcagtgagagagattgagagaagccattaaggctggatgctacataagagaacttgtatgtgagctctgggttacactaaagaaaaatacagaagtatatcaaggaaatagaagtaacataaaatcacagattgcaatcttcatatcagccaagtaaaattcaattaaaaaatgatgaaacctaaaatttaggccatgtttaaacactaaaagtcataatttacaataaagacataaagatttaataattatgtatatgtaagttatttgtctctttatctctatttattatctatctatctatctatctatctatcatctatcatcgatctatgccaagtagcaaaatacccacttttataaagtggaaactacagaggataaagaagacatagacagggacaaagaaatgcaagggagtgcaataatcactgaaagtcaattttttcagatacgtggtaggacttttcaatatagaaattaaagttctctgttattttttacattttctttgtttgggttaaaggagactttcattcattgctctatgtacaagtcacatcaagaggaaaagaaaataaagttatagggggaaaaatcaccttttcagtactctctaaactcttaaaatgtactgtctgctatggtttgaatgttttccccaatgcaacagtgttgggaggtggagcctcatgggaggtgtttaggtcatgaggtctctgatcttatagatgaatttatgcccctataaaaagggcttgctggagtggatttgctctctcttgctcttctgccacgtgaggacacaaagttcctctcttccagagaattcagggttaaaggcaccactttggaagtggagaccaggccctcaccagacaccaaaatctgctggtgctttgttcttagacttcccagctccagaactgttagaaataaatttctggcccggtgtggtggctcatgcctgtaatcccagcactttgggaggctgaggcgggtggatcacgaggtcaggagttcgagatcaggctggccaacatggtgaaaccccgtctctactaaatacaaaaaaaattagctgggcgtggtggtgcacccctgtaatcctagctactcaggaggctgaggcaggataattgcttgaacccagaaggcggaggttgcagtgagctgagatcgcgccactacactccagcctgggggagggagtaagactctgtctcaggaaaaaaaaaaaaagaaagaaattcctattcggtataatttaccagtctgtgatagtctgttatagctgcgagaatagactaaaacagtgtctttccataatctagtacttattgtttcttgcctgtctttccctcctaacaacatgtacttcctgccatatccctagcacttacaacagcatctggcatacaatatttgctgaataaacatctgttgagagactgaacaactgaaggaatgaatcctgtctggcactcaagttttagtctccatccaaaataaatatgttttttgatttattatttcttcaattcttgtttattttccataagtttttttctttctcaaaacttcttttaaaaaaacttcttttttaaaaaaaaaattggaaaaaagaaccattcgtgctgcatcttctctctcttacttcccaggaggaagagaagaatgatcatcaatggcaaaaagcagttgcagcaaagcaaaaccaagagccagctttaagctcaggagagagcgctacatctcctcctcttggtttctggtgctctccaggttcagagacacttttctagtaataaactgaaaaaagatcactgaaagtatcatctttctgagacttctttaatcagatattttgtctggtcattctattcccaaattatcttccatttctcataatttaaaactttgttttattttttactctatattataatacccagattatatttcatcttctaaagctctaattaccttttttattcttgtacaatttaaattcataaagtataatttgtttggtttatttatgtgcttgactctacctagttgctgtgtatgtgtagtttatctcctacatattctatgacagttttattaaaagtttcttcatattatttcattagctgtgcatctgtgggataacatatcctggtaattttattttgttaattttctttaaaacataaaatattatgcattacacactgatttatttaaaagaaaaagattaagatcagtttgacaattttaggaagatcattttggcaatctagaatttttgtttattattagtttttttaaaatttagtaataatttattacaaagcactttgctactaccggggtgacactacaacagtaaataaaaagtttgacttctactagaggatgtacatcatacattacatggaaatcagttcccactatgtctggtccatgcagggtgagcctcaacaagaattagcaattgcagaatttataattgcagaatttataatgttcagcaataacaaattaaaaggtgttgtgtttgagggcaaagacttaagcatttagatttagtaaagctgaattcccaaattaggaaaaaaaatctgattttaagagtttggactcctgaagagatttgtcccacttccggtcacactgatttgctcactttattttgtgacttactggcttagcttgttttcttctatattgctttccttataacaacaatagagagaaaatgggatacattccatatttgttattgtcagaaccccagtggtttagatgtgattgatgaataagatacacgaagttacaacaaagcattgaataatgtgtagttaaaatccagcaggctttataaacaggcacatgtaaatcatttcagcaattttccctcttgtttatgccaattagttcccacataaatgtctacatgtttgaagctattttaaattgattcagcatttttctctcaaaattgcagatatcaaatatctagcatttaaatgctgctttagcctgagactagaagtgagctgcaatgcaactgtaaacacattttgaatgagtggttttgattttatctaccttcatagtttattagttttataatgacatgaagacacagaatacttatcaaaataaggattattttttctgttaaccaaaatgtaaacaattaggtgagttaagttctgggtgcactagctgtgcttctgctttactagtgtctttaaaaagacagaatactgataattttgtacctgtgctactattacagcctgctaaagaagaatagtggacatgatgttctgaaatcactttctggtcattaggttactgagattatatcactcagtgagagccttttcttaacaaggagaaagaactatgtccagagtttatagtgtcttccaaccatgcactgagacaattttcaatgactaattatagcttgagggagcaggaaaaggctaccagaaaaaaaaaaaaaatccatcagaggagttaatttgtagaaagaaggaggagtgcagtttcaaagcaattttgtaaattccaagtgtaactacttgcattcttcaaaacaatttccatcctactgactttaatgataggtcattggtatagaagagataaaacgttcatttcataactgcagtgcctatgtttgtataaggtgtgcccaggaaaaagtcaactagtttttttagaaatttattggaggaatatttgaaatattaaaggctatagtctatatagtcaattcatattataactaaagtctcactccctagttaggcttcagtgttctcacattggcaatcttttattgattattctgaaactttgaaaaaaaaaaaacaactagatagcccccactctaatttttaaatactttcttgaaattataaaattttgctgcatgtttcttgtagtaaaatacattttatagatttgtttaacttacagattttagtggcaccaaaaatttaaaaatataaagtagacttaatcttgccaaatgatgactgaggaatggaatgaaaacaagtgtatacctaaatcctttggctacatttaagttacttttagtaataaagatgtaatgaaaatgaagcaacagccaggcacagtggctcatgcctgcaataccagaactttgggaggctgaggcgggtggatcacctgaggtcaggagttcgagaccatcttgaccaacatggagataccccatctctactaaaaacacaaaattagccatgtatggtgacgcatgcctgtaatcccggctactcaggaggctgaggcagaagaatcgcttgaacctgggaggcggaggttgcggtgagctgagatcatgccattgcactccagcctgggcaacaagagcgaaactccatctcaaaacaaatacataaataagaaaatgaagcaacatatatatcattccaaagctgaagccaaaatcttatcctgaaattagataattattgtcagcaaaattagccataatgatctcatctaataacttacctgatttacatgcaaagccagaataatatcaagaattcagtcacctatcacacagagcacttcatgtgttttacttgaatagcttggtctttctctttcagccatgagtgccagagtgatattttatgcttgtatgaaagaaatacttcaaaaataagaaaaaaactataggataatatgaacacttatggaatagaaagaaggatgacatcacaacaaaataaagcaaaataaatggaggaacacatttggggcagtgaaaaattagaattttctgtggttgaggaagcaggagctgtagagtaaagttgggttgcccagtgagattaaaaaataaaagggctcaaaaaactggtgaagacttgaagaagaaccatccagggattttaagagtgaataaagagataaaatcaatatttaaaaacagttggtgtgataaacagatggaaaggttagaattaaacctggaaaattaaatggctcttaaagaattcaaagtaaatagtggtggggcttctatccagagtgatggcataactaattggaaataagctagagaaaaaaaactttaaaagaaaaaaaaggtaaatatttgatgtctactgcctcagaaacgactgtgatatccatggcactgaagcctggagggagtatgataccatgataaccacaggaaaatgtaggggttaggaggaatggcttaggctgaagtcatgttaaggacaatgagcagttgttaagtcagagatgtgggattcatttatagagaatatacacaagagcagaaaggtaaaaaggtggatattctatactgcattcaattgtttattgattatcaatctattaaccaggcatagtctgaaatactgatacatgtttttttttcaaaacacatattgcaaaagttagttttctattccaagatctctcagttcttttctctaataataacacatttatgtagccaataccgattttttaaaaggacaaacattcaaattttaacctagtccaatttttctaattcatgtgtgaagattttatgaagctctgagttaaaattttcaaaaactagattatttatataaaaattgaaaaactgcctaatggttatcattttacctgtaactcaatcaaagtgttaaccaaatttggactgtggtgaagaattgccagtgaacagtgggtgggatgagaaaggtagctaatttgttttcaaatcacttagattaaaattaatattgctttgccagcataggcctaaacatatgagaattcatttaggaattcagcaattgcaaataagtataatttgctgaacagttctatttacccctgaattctaataagacccattatcataatttatcatttaggaaagcatagtgaagttaaaaaaaaaaaacctttctgactagtcagtgactttacagaaagaagtgttagaatgattatatgtgggagaaggtatccttgcatcagtgcatggttccctttaagggagtaatcattaattatttatataagacaagaagttactctaatagcttgtcaaagtgttgctggtcagaatcatagtgtcttgaaatagcagtttaaaaacaattattattattgttattactatttttacctctgggagcctttattgaatcaaagtgcattttgaaacagacaacattcttgctgctgttaagacaacattctggtgtgcttatagcttggtttctttgatgctcccacccatttttccctccccctcttcttttaggactcagttacttctggactttctaacagaaggaccattctaatatgaaaacatttcattttaggaatacccacattgtaggagtgacacttttttgtgtccattgattgatagaccaattatcaagaggtttcaggctagaaacctcttactactctagggaaaggccctgctggtgaatgttttcatgaacagtaactagctgcatccatctgatttcttatccatgaagatacttggctacacgtgatcgtcctgtaataattgtggtagactgaataatggccccaaagacatctacaggcataccctgtttcattgcacttcacttttttgtgctttgcaggtactgtgatttttacaaactgaaggtttgtggcaaccctacattgtgcaagtctattgatgcactttttccaacagcaagtgctccctttgtgtctttgtgtcacttggtaattattacaatatatcaactttgaaaattattattattatatttgctatggtgatatgtgatcagtgatctttgttgttaccactgaaatcattctggggaaccacaaacaatgctgatataagatggcagactcgatcaacaagtggtgtgtgtgttctgacagctccactgactggtcatttctccatctctctccctctgcttgggtctctctatttcctgaggcacagcaatattgaaattaggccaatttataatactacaatggcttttaagtgtttcagtaaaagaaagggtttcacatctctcactttaaatcgaaagctagaaatgattaaacttagtgaggaaggcatgtcaaaagctgagataggcagaaatctaagcctcttgtgccagttagccaagatgtgaatgcaaaggtaagtccttgaaaaaaatgcaaagtgctactccagtggacacacgaatggtaagaaggtgaaagaccctcattgctgacatggagaaagtttcagtggtctggatagaagattaaaccaactgcaacattgccttaagccaaagcttcatctagagaatggccttaatgctcttctattctatgaagagagggaaggaagctgcgaagaaaagtttaaagctagaagaggttggatcatgaggtttaaggaaagaagtcttttctataaagtcttctttcactttgcacataaaattgcaaggtgaagcaccaagtgctgatgtagatgttgcagcaagatctagctaagatgattaatgaatgtggctacactcaataacaaattttcaacgtagattaaacagccttctactgtgttggaagaaaatgccatctagaactttcatagctaaagaggaggcaccaattcctggtttcagagcttaaaatgtaagctgattctcttgtgaggggctaatacagctggtgactttaggttgaagccaatgctcatttaccgttctaaaaatattaagatgcttaaggtttatcttaaatctactctgcctgtgctatataaatgaaacaacaaagcctgatgacagcacatctgtttacagcagggtttactgaatattttaagctccctgtggagagctactgctcagaaaagaggtttctttcaaaatatactgctcattgacaatgcacctagtcacccaagagctttgatggagatgtgcaagattactcttgttgtcatgcttgctgacacaacatacattaggtagcccgtggatgaaggagtcattctgactttcaagtcttatatttaaaaaatacattttgtaaggctacagctgccatagatagttatttctctcatggatctggcaaagtaaattgaggaaaggagtcgctcttctaggtgccattaagagcattcataattcatgaaaggagatcaaaatattaacattaacaggagtttggaagaaattgattctaaccctcatggatgacttcgaggagttcaagacttcagcagaagaagtaactgctaataaacattagcagaatggaaacagcaagagaactagaattagaagcagaggctgaagatgtgactgaattgctacgattacatgagaaaaaaattaatgtaaaaggagttgctttttatgaatgagagtaaaaaagtgtttttttgagatggagtctactcctggtgaagataatttaagcattgttgaaatgacaaaaaaaattataatattacataaacttagttgataaagtagtggtggggtttgaaaggattgactctaattttgaaagaagttccactgtgggtgaaattctatcaaacagcatggtatgctacagagaaatattttgtgaaaggaagagtcaattgatgtggtaatctccattgaagtcttattttaagaaattgccacagccaccttagccttcatcaaccaccaccctgatcagtcatcagccatcaacatctgaggcaggactctccaccagcaaaaacgctacaacctgctgaagactcagaagatttttggcatttttttgcaataaagtatttttaattaagatatgtacattgttcttttagacataatgctattacacatttaatagactacaatatattgtatatatgttttataattactgggaaacaaaaatatatgtgatttgctttgttgtgacgttattgttattgtctggaagctaacccaaaatatatttggggtatgcctgtacaatcctattctctggaacctgtaaatgttgacttacatgacaaaagggattttttcagatgtgattaagttgaagatcttgagagaaagagattatcatggataatcagggaaggacctaaatataatgactgtcttctatgaaaagggagacagtaaaatacatgattagagagaggagagagaggcaatgtaattatagaagcaaaaggttgcacaggtgcaaaaaaggcgtcatgggcgatggaatgtaggtagcctccagaagctaaaaaaaggcaaggggagaaatcttctcttagttcctccagaaggagctaacctctcaaacaccttcacattagctcaatgaagataatttcagcctcctgaactgaaagagaatacatttatgttgttctaagccatgaaggtgttggtagctggttatagcagccataggaaactaatgcatatgctaatcatgtaatgataaaactagtaagcatgcaatgtttatacaggaaaaagccttcctataaggaatggtagtatatttcactagtagagtactttacagattttagagttcttttaaattattactcccatttgattctcaaaacaattctataagtaagcaggaaagatattattataatacctattttactaatgaagaaattgaagctaagggagcttacatgtcttgtggtaaaaaaaagttatttgactctttgcctagtaatttcttctctatagggtcctgtttctttaaaaaggagctcagaaaagcatctgtaaccagctatatagaccacatttctttaaggaaggcaaatacttttctggtccatagtcagacgcattatccattgcaacactggcctgtgcttgcaaatgttttcttaaactggataaatagaaaattcatcatggaaagacaaccttctaccttaaattcatgttaagcagaagtttattgattggtagatgcaagatcctctctacacaagaaagaattaagcagaatattcatatgaatttatattacttaatatggggtatgccattgaaaggagttagcaagcttgctttaggcaaacagtaaggaaagggtcctggagagcctttgacctgccctgtaggtgcttgcaccagatgttttgtgcagataaaggaacttgcaaagggggcttgcctaaacgtacagactaagggcccacatacaactaggggaatgggatggagccaccagcaattcatgccttatataaatagggaacccaccttcatcagcttgtatgtaaaggcccttgtattcaactctgaagggggcaaccagcaacctgctattagaacccctctttttgctgagagctttccttttcacttaataaattctactccactcattttttcaatgtccgcatgcttattcttcctggtcatgagacaagaacctggacgtagctgagctaaggcacaaaaaacctgcatcattttgggggctcatctgggatacctggtgggtgagtaaatgcagtcccacagcctttcactttcatttctgagccttcttgtcctcagacttttcctgaaggcagatgcagcactgaacctctggtgagccaattaggaatgaatggcacagctacagaggacaggatgcaggagaggaccatgacacgcccacccccgtcatcctctggggttgggaatgtcggtctcgtcccaatccagtcttttctatggcgttttacttctttttttcagtactgtcacggcacctatctcttcttttgtaatgttaagggtgttgctgcaaactgcggagatattactaggtagaatgagcctttgacccagccatcagacatgcaattcagaataatgcgatttccttctgttcttagaggtgtcgcccacccccatcctgatggacatgtggggtgggaatgagctgtggctgccacctgggcccgggccccaggacagcctcggtagccaagggccccatgtggccagctggccagtgtttcctgcttaccatccccccgacgccatgcaccaacagagtctttcctcccgtggccaagccaggaagagggtacaatgattgaaagtttctctccctgttggaggaacccatttgcatagagctagaggattttccctcaggcatcttccctgccctgcccttaagctgttttttttttttttcttttccccacactgtcaggagttaccttttatgcaagaggtttttttttttcctttggaagacatcttattaggccagtaccccaattcacaagacatccttttctctcccttgtttgaggaggactcagctccatagctttaccttagcatgactaagtcctgctgaatttcatggatagaggaggtcatggtagcattcatggatagaggatgctcccacttcatggatagaggtcatgctagcattcatggcatagacaaggtctagggaactcaaaggctactgacagcattgggaaaaggccacatgtggataagtgtggataattcccaccccctcggccccctgttaatgtgggtgaaaacctctgttttccttatgaaaccccaggaattgaaagcagaaagatccctctcaaaacctttagggttcctaacctgtggtaagtaaagaatgttactttctaataggcccaggagacccatgttcttgagacctcaagaaaagaggaatttactcaactcataggtatttgaggctaccaacccatggctggcctcagctgtaaaaggtcttatctgagattccgtggggaacagggtgtcattaaagccgatttaaaggcctgtgtgaaaaacaattactcatgctgcactttacgcaaataatcaggccaagtataagactaaggtttattttacaagcaacttagtcctatcatgatttgtttttgacaaaaatggggactagagagagaaaaattatgtttcaatgcttaccatatacttgttattaaattctcgtctcatctgttgtttttaggtttttgcctacattctagactaaccctgtttatccccgtgaaccaaccagtgatctctggctgtatctcagaagaaacagacagatgggtaatataaagatctagatcaatagtctagttctggacaattatcctgcaaagcctgcaaggtggtaagaataaatggggtgcccataacccagaagtttctttgttatggaaaataagaccaagggagctaaccagagccaagccccatgcccccacatcttggcaggcataactatagccaccagttttctgggcatttcagcagccttggggtttttttgagctgcccttacccccttgtttcattttgatgtgcatcttctaataaccctaattgtttattcttgcttagcggccattaaacttcaaatggtgttgctaatggaaccagatctgccctagtacgtcactgaagagagactaaagaaaaaattgtctaatttcataggacattatagatcctgtgagtcttctaaggtacctccctgcttgctagggcataggaatttgcacatgggaatctacagtcttttatgccaagaaacaattcccagaaatcatttccttctcaagtggctttctggcctccctggagctcaacacagtttttagggctcaaggtccctctttctatttattttctgctcccatcatttctttatttttccttcctgaccaagatgtttttttttttcttttttattacaggaacaaaaagacatattattttctgcctgttccttgtgggaaaaaattcaaattttctaaattttataagggctgcaatttccgaaatattcttccattcattcaggaagtacttgaatatctactaaatgccaaccactcttttctggatgtttagcagtaagcaaaaacaaagttatgcttgtggaaagaaacaaaaaaaataagcaatttaaaaaataaatataaaccatattctgagaatgctaatttttgcattttgtaaggggataaatggagaaatgctcactaaaaaagtgacatttgaggagatacatgagtgaaatacagaatttggaaagaaaaattagtaactgcaacatccttgatacaggctggagttggctagctttattcaggattatcaagaaggccaatataattggagccgagagggcaaagggaggaaggaatagttatataataaaaaccaatgtggacttccagccttttttgtctaccttcacccctttccagagtcagcacagaggtggctatggaaaaagagaaaaaaaatcttcaataaaaacggaaagtaaaaagagtggaaactaatatctcaaatgttttctaaactaacaaagattccacagaatttcagactttggacaaatgttatcattcttattagatggtcattcttggaattgtttctgcttagaattatctgaaaatggcactgcttgcagttccctcccagttgattcatatcatgtacttgttgcaatgttagtcatccaggaattttatcctaattatatctgctgctcctttgattgcaatgaatttaattcaccttacctattaacttacttaaactcttttagtattgttaagccattcacaataagctaaaaggaagctaaaggtttgtttatgttctttagtctatgcttaaaataacacatagacttttgcagggtccacaaaactattgtacaaaagtgcacaatataaaattctttaagaatttgggcagtgtttatccaaatatttgtgaaatgcaaagacattatactttcttgtctttcagtgaattcacataaacattattaggccacccctttaattcatgcattattgacaatgtggttgatactggttgaagaaacagtcattgaggaatactaaaaattgtcctttgatctaaaacctaaaatatcagtcattgtcaaagcttattttaaaatttcttgctattactggtgataaagttctacatttaagaaaaattatttgtacctcacttgaaaagaaataacttttgtaagtgtaaatttaggatggttaccaaaaaataaacttcacatactctaatagtggaataagcttcagaaccatttataaaaatgactaatgcagcattatcaagacttagctacatgttcacttgttattgtataactctcaggagcatgcatggagctttgtctggcatttaattaagcccattttatgtctgtcatgaaagaatactggcttgaaaaaatgattatgaaaagtcatgctcaaccctacgttcaaagaatgatgcacgcaaagctacaaacaaatgtatgcccagaaatggccagaaaatgttattggggttgtacagaaatgagttgaactgacataaaaaattaacaatagtcactgatatgttaacagatgctaaaagccacatttgcttgggtagtttacccatagttttaaaatgtttaaataaaatgttttataaatgcaaattatacatttattgagaacttggagcttaatcagcagtttgaaactttgatcactccaaattatcagaatagaataaggaacagaagctagtctctgcttctttataacctggtcagctgtgtaaacatatagaaaaaagaatagtatgaaccgagtgagagataatatttatcaactctacatttttcagagctccaacaaattccagcaggcccagtgtagagccagagccaaggacaccatagaaaatagttggcagcaaagacaccaaagaaaatagttggcagcaaagacaccaaagaaaatagttggcagcaaagccaggcaaaggaaacaaattagaaaatggtagcctaccttatttgaaaccagggtaagcctgacacagaatattgtatacaaattataatttttccacctcaggaaggatatgtttaaaaattcaaacaggtggagaagcttctatcaagtaataaaagattaacacctttagattttagtgacagattaagatgaactagtgagctttcagtcttctctttactcactttctcatcgctgactagagctctctttccaaaccacaaatctgcttttgcccatctattagccatttaggaacttttgaattcctatgagataaagcctactttcttcaacatgccatgtcaggtccaccacaattaagctgcaaggtaaggttttacctgtaattccactcatattcgatcccctcacgtttagtctattcaggaatatccattattcccccaaaactccttgaaattttactatgctattattccctctcgcagaacaccttctttctccgttcccttcccttcccttcccttcccttcccttcccttcccttcccttcccttcccttcccttcccttcccttcccttcccttcctttcccttccctttctccctttctctctctctttctctctttctctttctttctttgctgtctttctctctttctttcttagacggagtctcggtctatctcccaggctcaagtgcagtcatgccatctcagctcactgcaacctctgccccctgggttcaagcaattctcctgcctcagcctcccgagtagctgggattacaggtgtgcgccactatacccggctaatttttgtacttttagtagagacagggtttccccatgttaaccaggctggtctcgaactcctgacctcaagttatctgcctgcctcggcctcccaagttgctggaattacaggagtgagctactgcgcccagccccttttctaccagttagactttagcacctcattcaacaccaaatgacattgtgtcaggagagtaagtgttctccctagtcttcacctatattaacaaccttactttttctgtagcaatatttattctctgcgttgtccatattaacaggaccacacttttcccatagtagccatgtacccctcttaagaaaaaagagacattgcccagactcttttataattatgtgtggcccagaatagacaatgagatataagtggaagtcatctggggggactttcagggtctttttacctttcctttcctttgtgacttaccttaccttaccttacctttcctttgtgactacaaagcaaggtcacatgctgaggagagtaggataaaaatacatagaatctagttccctggtgtcattttaagatgctgcacttctagatttcttgttacatattaaagttaattctctcatttgtttgagatgtttctcagttatattttgtgttactccagaattataattatttgtttgcattttagtctcctccacaggagcataaattcatagaaatgtgttcatctttgtttccacaaagtataatatctagcacaaagtaggtggtaatttatgagtagtggcaatttgattgctgctattaaaaactttattgcatgaaaaggacatttatgtctctgaccagaaatagactggtaaaagttttaataaatgtatggaacatgggttaataacaggtgattgatggtagaactgttgctgtagggcattataggcaacttttgtaacatcataaggaagtcaactgctaactgtcattggagccattataagtctcagaataaggaatagaaagtacaacttttacatgacctagtatgacatgttctctttttaatgaaaaaaaaatccatggaaagaaaactgtgatgttgaaagactctcaaaagagaatctttcagaagtaaaagacagaaaataattttgcagcaaaaaacatttcatgccaagaatcacaatcacattcataatttggagtctgggtcttccaagaagctggagaacctgtgcttccctctttcttctgctaatttcaactaataaccctggatattatgtgcaaaataagaagacaaaaaccctgctattatatagataagaagactgtgaaatatagcaagaagaaggcagacaggttgatgacacccaaagaatgacacgatgggcttatttttacctcatatatcccacacatggagctaaagaagctggcaacctcaagataccagtcggcacagacaactcctccctcccctccaaaaaaattttgctctcttaagccaaaggataaggaaagtggaagcctaacaagacagaagattttagaaaataacagctatatggctgggcgtggtggctcacgcctgtaatcccagcactttgggaggctgaggtgggtggatcatgaagtcaggagttcgagaccatcctggccaacatggtgaaaccctgtctctactaaaaatataaaaagtagctgggcatggtggtgtgtgcctgtagtcccagctactcaggaggcagaggcaggagaatcacttgaacccaggaggcggaggttgcagtgagctgagatcgtgccattgcactccagcctgggtgacagagtgagactctgtctcgaaaaataaaataacagctacattttagttatttatcacataaattactgtggcctgagtccagcccacaccagccaaccaagccagaatcctgggctttcaccatcaccaggtggtaatgacaaacgccccccatttcccccaccctccacaaaagtcatatcaaagaaagacatctttcctctctgagtaacagcaagtccctgtagtgtcagtggagaccaggtgggaaagctggatgtccactccaactcaacagtaataaggcatcctcccacatgttcgagtgatgtcagaagaccaggggagagtcaggacttttaacacttctcagtggtaatgagatcaaccccctaccccaagtgtcagtggggaccacatgggaaacaggaaataggcactcctacgcctcccagcgagggaggtatcatacgtttctagtgggggctggtcatcccaactccatccgtctccaaacattttatatatatatatatatatatttaaattttcattttagatttgagggtacatgtgaaggttagttacatagataaacatgtgacatgagggttggttgtgcatattagcatatcacccaggtattcaactcagtaaccagtagttatcttttctgcttcccctcttcctcccacccttccccctgaggtaaatcccagtgtctgttgtttccttctttgtgttcataagttcttatcatttagctctcttccaaacactttaaaacctaaccacatgcttctaaataatctatgcataaaacagatagcctcaagaaaaataaaaaaatatacattgccttgctagaaggaatataaaaatgtagtccaaaaaattgtaggacatacctaaagtagtgctgagataaaatttatagcagtagatgcatacgtaaaagaagaaaagtctcagccgggcgcggtggctcaagcctgtaatcccagcagtttgggagcctaacgcgggcagatcacctgaggtcaggagttcgagaccagccaggccagcatggtgaaaccctgtctctactaaaaaaatacaaaaattagccggtctacgtggcataagcctgtaatcgcagctactcgggaagctgaggtaggagaattgcttgaacccaggaggtggaggttacggtgacctgagactgtgacactgcactccagcctgggcaacagcgtgagactccatctcaaaaaaaataataaaagtctgaaattaataatttaaacttccaccacaagaagatataaaaagaaaagcaaaataaacataagacacatataaaaagtaagtaggaatgtgggctggaagaaaatgggtatgcctgtagaagagaaaataataaagataagagcagaaatcaacgaaattgataatggaaaaataatagagaaaatcagtgaaccaaacatctggttcttcaaaatgattgatgaagctgaaaaacctaacacaagactgtaaaagaaaaaaagagaagacacaaattatcaatacaaaaaataaaatagatcctgccaaaatcaaaatgataacaagagaatatggcaaacaactctacaaacataaattttaaaactttgaagaaatgtgtcaattcctcaaaattaaactaccacaattcacccaatatgaaatagataatttgaatagacttatatttctatatctcttaagtaatttaattcataatttaaaacttccccaaaatagtttccaggcccagattatttcactgaagaactcaattcaacatttaaagaataacttacatcaattctacactccatcttccagaaaatagaaaaggaaggaaaacttgtcattcatttttgaagctagtattgccctgatgccaaaaccaaagaaaagcaatataaaataaaaaacgatagaccaaaatctatcattaatatagatacaaaatgttttagcaagatgttagcaaatagaattctacagtatattaagaaaaatacatcattaccaactaaggtttattccgtgaatgcaagactggtgccataattgaatatcagtcaatataacctattatttcagcaagctaaagtagaaaatcacataatatctaccagcagagtaaaaggatttcataaattttaacatcaataataatttaaataatttcagaaaaatagaactatttgggaatagaaaggaacttcctcaacttggtaaaaagcattaatcgtaaaacttacaactgacattatacttaatggtgaaacactgaatgcttttttacaaagggtgagaacaagacaaagatgtttgcttcactgctcattcggcatgctgctgcaagttctagccagtgcagtaaggcaaaaagaaaagatagaagaaaatagaaagcatacagataataaaggaagaaataaaactatccctctttgaagaagacgtgatggattgtctatatagggaatcccaagtaatctaccaaaaaacacctacaactaataaattaattcaataaacatgcaaaaggtaactttatttctaaatattagcaatgtctacatgaatataagaattaaaaatacaataccatttagagttgttgaaaatataagaagcactcaagtgtaaatctatcaatgcatataaggagattgtatgctgaaaattacaaaatgctgatgaaagaaaaggagatcaaaattaatttagatatatgccattttcatggactagaagactaaataaacatagtaaagatattgatcgcattaaattgatgtagaggtttaacataacacctctcaaaacccaagcaagaattttgtagatatagaaaaacatcactctaaaatttgcatggaaaatcaaaggaatcagaacagccaagataattttgtggaagaataatgaagtgggaactactctagttcataatttatatagctacagtaataaagattgtgttgtcttgtcatagagatacatacgtagatcaatggaaaagaatgaacccacacaaatatgaccaactgattctgtaaaagtgcaagagttattcactagaaaagagataaccatttaaataaatgaataattggtgctagagcaactggacatccatagacagaaaaataaaatctcacactcttaagaatattaactcaaaatccttcatggacttcaaagtaaaacataaagctataaaacttttagagaaaaacatatgagaaaatcttggcatctagattgaaaacaagttcattagaatttacaaaaataacacactacattaaaaaaatgataaactgaacttcatcaaaacaaaacaaaaacttttgatttgtaagagatcaagaggatacaaatacaagcccaagcaacaaagtgagagaaaatattatcaactatttatcccaaaaaggactaatgtctagaatatataaagaactctcaaaacttgacattataaatcaaataatccaattagaaaattggcaaaagccaagaactatttcattaaagagaatatagagatggccgataagcatatgaaaagttgtttggcattattagctattaaggaaatgcaaattaataccacactgtggtatgactatatacctgtcaggatgattcattaaaataaaaagtagcgacaacaccaaatgccaaatcactcatacattacaggcaaagcaaattttgtctatttcttacaaaactaaacatacctttgccatatgacccagcaattgcactcttgggcatccatcccagagaaataaaaacttatgttcatacaacaacctatacacaaatatttatagaatccttattcataatagtccaaaactgggaacaacccagatgccttaaacaaactgtgatatgttcatataatggaatacatctcaacactaaaaatgagccaactatttttacaagcaacaacttgaataaatctttagaaaactaagctgaattagaaatgacaatcccccatgcaatacatattttatgagtccatttataaaatatttttgaaaggataaaattatagaaagggagaacaaattagttattgcctatgattttagaaggggtgtgggctggaaggatcttgtattctgtaaaacaacaacatgagaggtctttgtcttgatagacatgttctatgttaactctattaatgtcaacatccttgtcataatattttaccatagttttgcaaaatgttacccatgggacaaatgaggtaaagattacaatgagattgctctatattatttcttacaactacatatgaattttcaattacctcaagaagtttagttcgaaaaaggagaaagaaaagcattcagacaaacaaaattacttgtctcccatatttttaaaacttgaattcaatccaaatgactttgaggctttgcctgatagccacatgcaaacagtaacatataaccaacagctgatttttaattgtgcaggacaactatactgtgatagactgaatatttatttatctgagtcagggacttaagagttcaactgctcaggtcctgaagttttagcaaattattttctgccagaatttgttcatcagtaatgattatttctttgtttttctcagcatctgattcaataagattttcaccttagaaatgtaaatgtcaacaattgtgtgatagaacttgcatctataaaaaagaacaatatatgttttccagtaagagctatcatctatatttagttttcttgagtattttcaaaataaataaaataagaaataaacaaaaacaaaagatacttgagtcaggcataggtatatttggttaatggagagtcatttaactattcctctgtacatgagtagacaattctcaaaagaagatatacaaatggtcaacaaacatttaaaaacatgctcaacatcactaatgatcaggaaaatgcaaatcaaaaccacaatgcaatactacctactcctgcaagaatggccataataaaaaaaaaatagatgttggagtggatgcggtgaaaagggaacacttctacactgctggagggaatgtaagctagtacaacactatgaaaaacagtgtggagattccttaaagaactaaaagtagaactaccatttgatccagcaatcccactactggtatctacccagaggaaaagaagtcattacaggaaaaagatatttgaacacacatgtgggt

SEQ ID NO: 2490 - DNA, 428 bp, Homo sapiens
gaaagtgcaacgttctgtggggtggcgctggcgaccctttccttgacggaatgccagaggacttggatctgagctaaaggacagtattccagttactgaactttcagcaagtggaccttttgaaagtcatgatcttcttcggaaaggtttttcttgtgtgaaaaatgaacttttgcctagtcatccccttgaattatcagaaaaaaatttccagctcaaccaagataaaatgaatttttccacactgagaaacattcagggtctatttgctccgctaaaattacagatggaattcaaggcagtgcagcaggttcagcgtcttccatttctttcaagctcaaatctttcactggatgttttgaggggtaatgatgagactattggatttgaggatattcttaatgatccatcacaaagcgaagtcatgg

SEQ ID NO: 2491 - DNA, 399 bp, Homo sapiens
gaggtcttctccacttatctctctctggggtccagactgctgaggtggcagctactcagaagacagttttatcaggatgattgcagaggtacaagaaagcaagtctcaaggcataaatacatttcaagcccattgcttgtctcttgtctacccacctgccattggccaaagtcagtcgtgtagccaagtccaaagcagttttgtgggatgaactgcacatttacatggcagatatacaggaaaatgttacttatcatggaacaaatatctcgtgtttactgaaataaaagttctattacattgcttcatgtcagagtatacagagggtttatgtgcttctctgggaagaaaaggaaatacagctgttttgcagccctactctatgtgaaaacaatgagg

SEQ ID NO: 2492 - DNA, 12345 bp, Homo sapiens
cctgaggtcaggagttcaagaccagcctggccaacatggtgaaaccccatctctactaaaaatacaaaaattagctgggtgtggtggcagaagcctgtaattccagctatttgggaggctaaggcacgagaatcgcttgaatctgggaggcggagattgtcccgtgccaagatcacatgactgcactccagcctgggcgacagagtgagactccatcccgaaaaaaaaaagtgttaaaaaatttgtaaagcaaaaattgacagaattggaagaagaagtcagacaattccacagagttacggattttaacacccctttctcagcaactgatagaaaagttggggggaagtcaacaaagacataaaagatctgaataatgatcatcctccatacctaactggcaagtataggagactatacccaacaagtgccaaatatatgcatatttcaactcagcggttcaaaagcagggaaattttgctgccagaggacatttgacactgtctggaaacattttttattttcacatcttggaagatgtcgcatctagtaggcagaagccagtggttcttataatgcacagggcagctccccacaacaaagaacgacctagctcgaaatgtccagagtgctgacgctgacaaccctgcactgaaaaagtgaaaatactacaaatgcatcacatccctagactttcatagctttagagggtccccagctctccttcccctaccagcagcaatcctacatcctactgctgaattactcttttgtattctgtgttgctttgacgtaagaggaagtctcccttgctcagatgtcacttatctactgtgcttcctctggacccttttggttttttaaaaaggactatatgaataatgaaagcttacttcagggacaagaacctttgatcttccaggcctttgcctatttcctgcaggactttgctctctctccttcctcctctttggcataattctaaagccatatagccagtccttaatcaaactctctttgtaatgttagtagactgtagcttcaggaaaccagaccatatcttaaattgatgttacccccgttaaggttcaaatttacagtcggctctgcgtttgtggaaacataacatcttaacaatgagggtggccctcattcgtcattccagttaaactttatttttctagaatttcctttcaagatggtagattattgtacattctgggggcagaaagtgagaaaagagagtctgtccatgatagaaaaggaaacatagcagatttgatctctatgaggtaaaatgagaggttgagtcagatcatctaattctatgatttgctggattaacttggaattgtttattaagtgacctccaagtcttgaaacttttaagtaatgagagatgagaggttactcctccaaaataagcaatgctagcctgggccttgaaggattatgtagttgtggtgccagaaggtcaaaatttggagcttcacttttatgttccataaaatggaaagcaacttctgtaactatgacctcagatcttacagtgatttagaatttcccaaagagatttcacccacattgtgataccatttgttcctcatcacagtgaccctgtgtagcaggcaggtcaagtattgctatccacactgggctaaggaagaatgcaaagctataaaggttaagtgacttgcttaagataaacaaaacttagagctgtattaattcactgagagatgcatgacttttgaatataaccaaatgtttctgatttccccaggacaattaagatttaaaactacctgttctttgtcctcaatatgttcctttgtcagataacgagtcaatctttttagtcagaatatacagtcactagaacattgagctggagtggccaagtaggaattctttcatttattcattaagcagcctgattatttggcatgtgctatgtatgaagttttatactaggggttgaagggaagggagacagtgatgaatataaaatgtggtctttgccctcaaattgcttataatcttttagaggacacagacaggtaagctaccaacagtcacataaggcagcagggcttgaaaggagcagaagccagtttgaggactacagtgagagaagcaattccttctgcctgtgagggagtggggaagtctgcgtcaaggaggaatctgcatataaactgggcctggaaggagcagggttcggagaaacagaaaagatgaagtttaccgtagagaagaaagaaacattcacttcaaactcttaatattcctgatgaagctctgcccaaagttttcagtgtaacatcaacttaggtgctctcaattccttattagacagcatcttagactgcacaactgctgccagtttttgattctctatgaggcagtctcattctgttgcccaggctagagtgcagtggtgcgatcaaggctcactgcagccttggacttcctaggctcaggtgatccttctacttcagcctcctgaacagctggcaccacaagcacacaccaccatgcctgggtaatttttgtattttttgtagagatggggtttgccatgttgcccaggctggtctccaactcctgagctcaagtgatttgcccaccttggcctcccacagtgctggggttactgtttgctgccttattaatagaagggaagcattttgcctttccttctctgaaatgagtgtgtcctctagttaagcacacagaacaaatggaatttttacaagggaaagttatttttcatttcagttttcaaggtcaatgcaaccttgatcattaatcttttctctgtctccttcctttcagtataacctggtaaaagtcatatacagacacacacatacactttttttccctaagtatcaggcactgtgaacatatataacaatgatttaatctccataggcctattttacagttaggaaaactgaagtttattgaggtagagtaatatgttcaaattacacacatttaagtgagctacacaggaatgagaggtttctggttcactcaaaagcccatgctctttctaggatgctctactgcctcgggctaattctatcaaagagaatcacactgtggtacagtgattctctgaagatgaaggcttctcctaggataatgcatagaacaggatcaaagaagtactagtagtgtgttggtgattcttttcctggcattaactggcatgggcagttttggcatgttggatatttaactatctcatatcaaccatgatccttcttccccagaatccactctccttttaaaaattctaataatagagtgcgctccttcctacccctggacagtttcagcagagcacatggctatgacttccatctctaagcttgttttgcagctaggtgtgatcttgtgctgttctccaggatggaatgtgagcagagtactgtgagctgcccgggtatcacatccttaaagagagagtacctgccctgtacattctctcttttccccttcctggaagctggattgaggtgctgctgctggtggtctttcctgatactatggagcaacaagggagaaagagcctgggtccctggacaatttggtagagtgctgtttggaccacccatctaccactgagcagttagcaagaaactactatctcatttgagtcactgtagttttttggtaacctaaattatttactaactaatgtaacttccataattcaagagcactagtcaacatttcctagagtgtctgagctgccccattccagatatataaaaactgcacattgtgatgggttgccccctaaagcactctggaaaaaagctggtttgccttctggcattatgaggcttaatctctaaacagtgtgatctggctgtccctgctgctttaaaagtctgctgcagccgtcagatgcagactgcattctgcatatacctaaaatcacatggttagagtccttaatcactcttacatcccaactgctaatctcatgagaataaatctgctttcccatggctgagcaaaatgggtcctatcaccatgacatgtgccctgcaaccttccaatcaaatgaaggaaatacacaaaacaaatgtgagaaatctcatcacccatattctcaaacacacggattttattgttcgttatccgggctcattgaccttggctactgaaagatacctaagtagatgtggtgtactacctgtttgaacttgggcttctgaattttgctctaattgcccctgtcgttcactgtagccctcaccaggacacagcagaagtcacacttaggatatgagactgctacaggaggcctgtgcaaagatgccttggatttatatggaaaatggatgtccctggattggcattggctgctcatttgggtgactacaagccatcttagatgaaagtcagacatgttatttaggtatgacttgttctaagagaatgtgttgtttggtagagctactctataattaagacccagctcattctaatgctccaaggcctgctattttgctttgcttcttgtccagcttatccctctggctctggatggctggcaaatttcccctcaccaccagtttctaggacactgggacttcagcatgaatggaccacagcatatgtattatctctagacaatcagaagttaaactatgaatgcaaaacatttataattgttggagagtcccagactcctttgagcaactgacaaaattgacagaaaaaaatatgtttgcaccacaattttgtacaccatttcaggaatgtctgtacaacttcatgaagcccatccattaatcttcagattaataactgatgcatctgtgtgtggttggtactattgcatttgcataaaaatatatcacaatatttaatattatcatggactaagttgaaaattccttgaggacaagaattatagtatgttgacttggtacagtcctgtgtagtaggtgttttaggagatgtatagaaaaccaagtctcatagcctagatttttccatttggcctaaatatttccattcaaatgttttatttttagaaatattgagaaaatgaggtgagagggagagtgaggaaagtggtaggaacccaatgtctgggaactctcaattccgtccatatgtaaatcatttaacagcttgcaaatgatttagcagctcatcaatggtctgagaataaatctttctataggcaaaaagcctgcctcttttacactatttaggaaattcagcctaaaactgatgtaatactttgagctgtttaattaattttgcttactggcataaagatccttaacttgattcaattaaaaaaataattccccaccattttcttgccttctgtggcagagactattagttgtcctctagtacccattttctcctttctcagtagagaactccaggatgttggctggacacaggattgcccagaataaagacatttcccagcctcccttgcagctgggtgtggccatctgactaaattctggccaatgggatgcaattgtgttctgtaacaattagaaactgtacttaaactgtggtgtggaatgaaggcttcccttttcttgttacttcccttgtctctgttagtgagaatgtagggtataaaaaagagccatcctggactataaggtccagatgcatttcaagatagcagaccaaaaggtggcagcagtcggggtgcctgtcattgtggagctgccatactggtcctaaactatttcaggctccccaagaccacccccacattcaaagttttgctagaaggactcagaatgtcatgcactcatgcctaagatttatacagcaatgtggtaaggatacatggctgagatcatgttagataccctctgtctagccatgtaccaaaattccagactgccacaaggaaagcagtcttggcactgtgtttaatgtttgatctcaatttttaaaaaatcacctcgtctattagaaaatagtgcatgttgtggcagactgctagttgtttcccaatatcagctaattgttgactagggtcaccccaagagctatattcccagatgccagtcaaggctgaccttcaagcaatctttctaaggagaacagcctcaggcctgctatgttaactcttctgcacatggactgtctctatttacctgaaagagaaatatactttaatcttctttaaggcaacgcttgtgtgtgtgtgtgtgtgtgttgcagggggggggatgtcttttgaccacacctaattctaatgaatacccttccctcttcatatatttgacacctaggtagaacttaatcttggtgtccagcttaacaatggaggtgggcgttgcagtctggtgaggatgtgctgattcaggaacacaggttttcataactccaaattcagcagagagcatcaatttataaaataacctgcattcccaaggctcatttgtaaactgaccaacacatcagctcatgaagtaaacctaagatgactacatgaggccgagtctaaggtggaattggaggaaccagattccagtcaggaacttgcaacttaacttcttcctacttctataaaccctatagtggaacaggcaatgaccatgcccagtgaatgcttggcaatgacatttctccagcttattgtagatcagatgagtcacaaaatctctgtatcatttcagcttcactatggtagttcacacagataaacaatgctctttacagatctttctatatcaacattcaagctccagagaacagaatcataagttctttttttttatgttagtttgctttttaagtggagggaccctaaccaattttctcatttgatagaggaaaactgtaatatatctcacaagacccagcatggtagcaaaagtggaaatagaaatctgtcctcttggtccccattcacacaccaccttgactaatcatctgtgattatctactcattcacctgaactgggaaaactggagcctctgtgaagacagatctgggcacatggccagtccctaaacattggctcattgacagaactctcacgttgtgtggtaccttcaggagtaagaagaaaagtcttctagtagagctgtgcggatggatagaaggcaaatcattatatgacattacatatgcttcatgagtattttaaatagtgcccccaggatagtaaaaattaccctgcaacacaggaagcggctcaatccctctgtgctgattataaccccaggacttcctcttgaatcaatctcagacatttatttggcatattcttttgaggtactcctaagatatttattaacatttaagccactaattaattttcatgcatattaaacaatactgcagttttcacaggcttgtgtgggcacctgataaatgtgatctgaggacactaatatctacttatcaaaccaaaaaacattttccagttcccgaataacaacctcttttaaagaaaagtgtatatagagtgtggaaactagtactaagaagccaatggctcagtgggttttctggatcttatttggacctggtggtgggcatgtgctttcttcccacttatccaagattgtgtgcagcttcataactgagtacagcataaccatcacattgaagagggatgcttttttttttttatttaatggtaatgctgagcaaagaataggagttttatgagtacaaagaaaaaaatttttttttaatcaccgaagatcaagtcactttacctaggagcaagagggataatcatgaaggcatgaaatggggtgtcacattgcagcactatttacaatagtaaagacttggaaccaacccaaatgtccatcaatgatagactggataaagaaactgtggcatatatacaccatggaatactatgcagccataaaaaagaatgagttcatgtcctttgcagggacatggatgaagctggaagccataattctcagcaaactaacacgggaacagaaaaccaaacaccacatgttctcactcatgagtgggagttgaacatggacacagggaggggaatatcacacatgggggcctgctggggagtggggggcaaggggagggagagcgttaggatagatacctaatggatgcacggcttaaaacccagatgaagggtggtgtagcaaaccaccatgccacacgtatacttatgtaacaaacctgcacattctgcacatgtatcctggaacttaaatttttttttttttttttttttttttttttgagacggagtctcgctctttcacccaggccggactgcagtggcgctatctcggctcactgcaagctccgcttcccgggttcacgccattctcctgcctcagcctcccgagtagctgggactacaggcgcccgccaccgcgcctggctaatttttcatatttttagtagagacagagtttcaccgtgttagccaggatggtcttgatctcctgacctcatgatcctccggcctcggcctcccaaagtgctgggattataggcgtgagccaccacgcccggcctaattttttaaaaaaagaaatggggagtcacagatgaatctcagataagtggtcgctggctgttacttactttatctctaagatcctcagatctctgtaagagtggggtagtattactcacgtcttagagctgttgtgaggataaaagtgagaatatttatgtaaacatctgtggagagtaggggaggacacaaagagacccgagcatgcttttaccaacttcccagaggaaaaacatttttgaaagtataggaaatcagccacataaattgggagacatatgtcaagatattggttttattttttagttttttttttttttttccagatcggaaagaaatacagcacttttgcatttccacaaatgacaacatctaagtcacaccaccacttcccagacggccttctgaagccaaacaaataatcactgatcaagtaaagcttaagggaaaacaaggacattctgaaatgtccctttaaacaagaatcttgaattgttgaaaataaaaaatgtatttggatctgatgaccttgtttcattttctgagcaaagagaagtagaacagcagcaagatgacatggctttgccctttcagaagccaacagagatatttattacccaagtctcacaaatgctgaaattgtgattggaagcctttcagcttcctgcataaccccaggagcctcaggttgcaggtcaatggcctgatgaagtgacagcctctagccccaactatctgtacaccagtggagattagaagcatgtcctgggactggtttggagaaataagttatttttctttggtaggaaacaggggcaaggctggtgagaagacactgccctaaatatgatataatccagctgtccaaacatggacaactgagttcagccagtcatccattcccccaaatccagatgtttgccattacacaatctcagactatcttttcttctactgagtgtaacttgtactaattatgtttgtcagagtagcatttgtttttaattagaagacatctattttgaatcagctgggactccttagctgtatcacagagacacagcctatgttattaataatctttaaatcataactgccttttgctttgtggcaaattgttgaggttttcattccatctcagagttcaaatataagaaacatcgagactgcactaaaattggagtcgattattattaatagtatttgttaaaatgcaggtaattctattctatctaaacattctgcaaacacaaaattcccacgatggcagtgggcttttaatatttgcacatctttgtgtgtggaagtctccaactattatgtttcatagttagacctgctttcaaattccatcctaacatgtggtcttgctaaggtcacgaacaatgtctatgagcttaacttcctcatctgaaaattagaggattataaatgtcattgtaagaattaaatatcataaaatattttaaacacacagcagagtgcttaaaatgtagtctatgtgtaaatatatgctgattccttccattcctttaaaaatctatagacaggagtctgacttttctaaatggccatctggtcttacctccaggagactgaagcacattttccacgggtttagatgtagagctttagttcttccacctgagagacagttagcaagaaaagtaagggagaaatgctataggaacactcttgagtatgctggaagcaagtgaggactgttttgtaatctcactatgcttccttatgaaacacaattctagaccattctctgacctgatgttttgcttgctgagagcattctctgatgggaaacaccaagagagacacaaggcctgctgagataacagagagcctgttctccttcttgtccactgtcctgtcagtgcctactgccttccctgtcttctggttcttttccttcctctcttggctcttttcaggttctctgctttgctctgatctgctttgcatggctcctgctttcccctcaccatcaccaccttgcaccacctccttgcttcaacttccagtggttttgtctagtctatgagtccaacttaaggcagcatcaaggtgagacacacagcaaatatttgcaggacagaatatgagaggtccagcagtgggtatcgttctccagagcatgcctgaggactccccgagaccacccgaaggctggccaccacccagaagctggccctcacctggaggctggccctcacttgcaggccagccctcacctggagcctggcccttacccggaggctggggctcacctgcaggctgactctcacctggaggctgcccctcacccagaggctggccctcacctggaggctgaccctcacctggagggtcctcacctggaacctagacctcacctggatactggccctcacctggtttctggcctgcacaggtgcagcgtatcccccacttggtttcctgacccttctcaggccaggcagaagccaaacctagtctctgctttctctagtccctactggctctgctgtcatattctgttcctaagagctccaagcatgtatattcacatgaacagaaagtagcttgcaaaaacagttaacaggtactgaccctgtacaccaggtattctgccaactgccctacgtccattatgcactgagggtttgtgtttcctcaggactcatatgttgaagctctggtgcctagtgtggctatatttggaggtggggcttctgaggaagtaattaaggttaaatgaggccataaggaggaggattctgatccaacaggattagtgtccttataagaagagacagcaaagcgctcacacaccacgaaaagcaagcaggtggctatctgcaaacctaggccagaacactcaccaagcacccactctactgccaccttaagtttggaattccactctccagaactgtgagaaaataaatttctattgtttaagccatccagtcttttttttgttatgatattttttatggcatcctcagaagactaatacatgcactagttaatttaatctgctcaataatcacattaggtgttatgttatttccatttaaaagactgagaaaatggaggcacagggagggcaagtcatctacccccaaacacccaattattaaatggtaaaaggatttgaacccagataatctcagtcaagaacccaagttcttagcaactccagctttgcttgggcctataccatcaaaccaaaaaaaaatacaccctgcttaagttatggaggaagcaaacttctttcaaagtgtaaacgtggcaaagataattttgcaaaaaaaattgttttccattcagaagtattgaatttgacttaagacacaatgacagtgaaaatgaatgaattaatagtgggttaaatcatcggcatttatgtaatttttattgaactcaaaatctttttgatttacataattacatttaatattcactaattttcaatttcacaaatgtattttcaaattgtcattcattgctagtaagccttaaatcactctgccatgcagtctcggctgaaaagacacaggccctgctttgaggaggtcactcatggtgggaaaacaaacatgtacacaagggcatggcctgacacatttacacaataaatattttttcaaggctctaccatgggccaagtgctataagaatgatggtaagaggactaggagtttgcaagagtgtatgtgtgtgtgagtgtgtgtgtgagagagtatgtgtgtgagagtctggtgaacatgggtgtgagagggccctcagagagggaaaacgtgaaaaggct

SEQ ID NO: 2493 - DNA, 1918 bp, Homo sapiens
gggagagaaagatgcttacaatccggttcctgccctcaaataactcaaaaatctgccaagactaggagggtaacccagaggaaaccgtcttcagggcctgtttgctggctatgccttcgagaacctggggatcccgaaaaattaggggaatttcttcagaaagacaatatcagcgtgcattatttctgtcttgctgggtgcagtggctcacgcctgtaatcccagcactctgggaggccgaggcaggaggatctcttgaacccaggagttcaagaccagcctgggcaaccttgtctctacaaaaaaattaaaaaaaaaaaaaaaaaagctgggtatagtgacaaatgccactccggaggctaaggcaagaggatcgcttgaaccctggaggtggaggctgcagtgagcagtgatcacaccaccacactccagcctgggtgacagaggaagaccttgcctcaaaaaaagaaaaatatatgtgtctggtataaaatcttgacagtataaagtaagttcagtaaaaaagtctcttccctaaacaatgttcccaatccttctccctctccccagaaacaaatgctgtcaaagttgtaacatccttccaattgctttttcccagtatttttttattaggtataactttcatactgtaaaaatcaccaatttttttctttttttgagaacggagtctcactctcttgcccaggctagagtgcagtggcgtgatcccggctcactgcaacctctgcctccctggttcaagtgattctcctgcctcagcctcccaagtagctgggattacagacacctaccaccatgcctggctaattttgtatttttagtagagacaggtttcaccgtgttagccaggctggtcttgaacaaaattcactaattttaagggtccagtttgataagttttgataaatgtatgtccccaaataaccaccaccccaatcaaaataggtaatattttcatcaccccagaaagttccctcctgcctccttttccagtcaatcccactagacgtaatcactgttctgatctatggattatttttggctattcttttacttcatataagtgaaatcatatagtttataatcttctgtatctggcttttttctcccaacacagtgttttggagattcatccatgttgttgcatgcattcatagcttgtgcctttttattacttggtagtattcggttgcatgaataagttactatttgcttatctgttcacctgttgatgaacatctgaattgtttccatttgaggactattatgaataaagctactttaagcattcatgtacaagtctctttgtgaacatgtgctttcacttctcttgtgcagatgcctagaagtggaattactagttgtatgctaattagatatttaactttatgtgaggttgccacatcactgtccaaagcggttgtaccagcttacactcctaccagcaatttataagaagtccagttgcacagtattcttgccggaactttgttttgtcagtgttcttaattttagccattctactgggtgtgtattggtatttcattgtcgttttaatttccatttttctgatgactaaagcttcttttcatgtgcatattggccattcacatattttctttggttttttggtttttttttttttttgagatggagtctcgctctgtcgcccaggctggagtgcagtggtatgatcttggctcactgcagcctccacctcccgggttggagcaattctcctgcatcagcctcccaagtagctgggactacaggtgcctgtcaccacgcatggctaatttttatatttttagtagagacagggtttcaccgtgttagccaggatggtctcgatctcttgacctcgtgatctgcccacctcggcctcccaaagtgctgg

SEQ ID NO: 2494 - DNA, 272 bp, Homo sapiens
cagaaagggaacttctggaactgagaaccaaagtatccaaacaggagtggctccttcaaagcatagctgagcatctgaagaccgccaaccagcagaaggagagcatggagcagttcatcatcagccagctaaccagaacacatgatgttttaaagaaggcaagcactaacttagaggaaccatgcaagaagcgcagccaccagaagtccttaaaacagcaggaaacaactacaagtttataggacatagatttcagtgccctcatctggcca

SEQ ID NO: 2495 - DNA, 5747 bp, Homo sapiens
cgggcgcgccgcgtgagtccgagccggccgctcagagcgctccaggctgggttcccgggccccgccgcgccgcctccttcccagctcgcccgcccaggcctggcctcctgcttttccatttgattccctgcctctttctattcggactggaatgccgggccaggctccggggcgcgccgctgcggcagccgcacctcgcaggtcccccggccgaccccgacgcggaagcggcggccctcctcgccgtcggggagccagggagccggggacggtacgatcagtcacataaggcttagaggatcaaggatcctgcccagatgacttaccgaaatgttacagattaagttggtgtggtaacctgggctgagcactctgggagaggaagagaagagagaagacaggaaacaactgaactatgaccaatcccagcacggaggcccagaaaactttaagatttgagtattaatgtctcaaggtcaggagcaacctcaaggctaaaactcagatctcaggactcaatttcacagaagttccactataaaggcaataatctaaagctttaaatgatatgaaaattttgtaataagagttcagtatttctgccaacattggcgcatggattgcaaagttcacaggattgaaaacaccatcgacataatggaaattgaacagcatctgattactgagtgctatatcagcaagttaaaaggatcttttgcataccttttaatggtatatatcctaaaactgaagtgttcaatatagacatccagattgaaactcaggcagtgaattacatacacaacaaatcagttgaacatggcagagcttgtcagacttatgaaagattaaatacattttacatttccacaagtgtggtattcacaggtctaaattggaaaattcttgggttgaagaagaataatcataatcttagcttcactcattgaggaaacattattcagggatgataagaggtaaaatcttaaaaatattgacaagctaatgagagaactttgaggtaagctgatatgcaggtatagttaggactgggaaaagcaagaaaatggaaggatgggttagagggtggcactacacggctgatatagtttggatatctgtccccatccaaatctcatgttaaattggaatccccaattctggaggcagagctagaaggcagagcctggtggaaggtgtttgcaacatgaggaaggatccctcatggcttggtgctgtcttaacaataatgagtgagttctcccgagatctagtcatttaaaagggtgtggcacctccccccccccccgcccccgccaactctctcttgctcctactctgccatatgaatgtttgttccccctttgccttcagccatgattagaagcttcattaggactcctcagaagtagatgttggtgccatacttcctgtatagcctgtagtaccatgaacctcttcgctttataaattacctggtcttggggatttctttatagcaatgcaagaatgacctaatacagaaaactggtactgagaagtgagtcattgctgtagagatacctgaaaatgtggaagcagctttggaacttggtgacaggcagaagttggaagagtttgtagggctcagaagaagacagaaagatgagggaaagtttggaatttcttagggactggttaaatggttgtgaccaaaatgctgatagctaggacatgaacagaatgcacccaagcactttgctaaggcaaaacatgcgtgacctttgctctagttcccaataatttccttatttccattcgagacctcagaagcctggacttcaaaccaaaatgctgatagtgatgtgaacagtgaagtccaggctgctgaggcctcagatggaaattaggaacttactgggaactagagcaaaggtcacacaatgttaacgccttagcaaagagcttagctgccttctgttcatgccctaggaatctgtggaagtttgaacttgagagtgatgatttagggtatctggcagaagaaatgtctaagcagcaaagtgatcaagaagtggtgtggctgcttctagccacttatattcagatgtgggagcaaagacaaaaggtagaacttatatttaaaagggaagcagagcaaaaaaagtttggaaaatttgcagcctggccatgtggcagagaaagaaaaaagctttttcagtagaggaattcaagcagactgtggaacaattacttgctagagatgtttgcaggattaaaggggagccaagtgctactatccaagacaatagggaaaaagccttgaaagcatttcaaagaacttcagagtggcttctcccatcacaggcccagaagcttaggaggagagaatagattcatggactgggcccagggccatggtaccttgcacagccttgggacactgctcaccacatcctagctgctcctgttcccactcttgccatggctcaaaggggcctacatacagcttggactgccactttggagaatgcaaacagtaaaccttggtagctttcatgtggtgttaagcctgcaggcacacaaagtgcaagaatcgtggattcttggcagcctctgcctagatttcagaggacatatggaaaagtctgtttgtccaggcagaagcctgttacaggggtggagcccttacaaagaacctctactagggcagtatagaggggaaatgtggggttggaggctccaacagggtcaccgctggggcactgcctaatggaactatacgaagtgggccactgccctccagacctaaggatgatagatctaccagcagcttgtattctgcacctggaaaagccacaggcactcaactgcagcccatgagcgcagccttggattctttaccctgcaaagccataggggcaggactgctcaaggcctggggagcccaccccttgtaccagtgtggcctggatgtggaacatgatgtcgaagattattttggaactttaagatttagtgacttccctactgggttttggagctgtgtggatcctgtagaccctttcttttggccaatttccccctttttgggatggaaacatttacccaatccctatacccccattgtatcttggaagtaaataatttgtttttgattttacaggcttataggtgaaagtgacttcccttgtctccaatgaggctttggactttggacttttgagttaatgccagaatgagttaagattttgggggcctattggaaaggcatgattgtagtttgcaatgtgagaaggacatgagatttggagaggccagaggtggaatggtatagttcagatatttgacccagcccaaatctcttgttgaattgtaatccccaatgctggaggtggggccttccttgtatgatgtgtttggaacatgcaggcaaattcctcatggcttggtgctgttttcatgatagtgagtgagttctcctgagatgtggtcatttaaaagtgtatggcacctccccccactctctatctctcttgctcctgctctgctatatgagacacctgttccccgtttgccttccaccatgattgaaagctttgtgagacctcctcagaagccaagcagatgccagtgccatgctgcctgtatagcctgcagaaccacaagccaagtaaacctcttttctttataaattacttagtctcagatatttctttacagcaatgtaagaatggcctaatacaatagcctaaactaatttgagggaggtgatgtgtctcttgctacacaaagtatggttcatggactaacagcattggcgtcaccaggaggttgtcagaagtacagactttcagttcccttcccagacctaataaatcagactctccaaaaagttttgggagcactgctccagccaatgacttgtggtagaattctgtttttgcctcaacagcatccattctcctttcagtaacaactcctagcttctactttggggaactttccatctcccacactcagacctagggttcagatgtggctaacctagccctgtgcagccagaggaaggcacatgatccaggcctggccaatgacagtgccttatgacccagccagagtgactggttcagcaaagagggtgtaatatgagctgagccaatgagacttagtcctggtacttttgggaaagaaatgctccccttcctgagtttgctgagctgataagatattcatctacagcagccatctttccactacctgagaatgaagccaacataggaaaatggagctgagaaatgagagagatcctaacaaattcatttatccactcactaccggatctaaatcctgggctttttagtaactcaagccagtatagtcttcatttctttggccagttcaaactggatgtctactagttacaactgaaagaatcctaatacatcagtctcttcctgtccctgaaattcattaggctcattttgaatctttgatatttccttttcctctcttctttgtctgtgtttaatccattttgcattgctgtaaaggaatacctgagactcggtaatttataaagaaaagagatttatttggcgcacagttctgcaggctacacaagcatggcaccagcatctgctcagcttctggtgaggccacaagaagctttaactcatggcggaaggcggagggagagcaggtgtgtcatatggcgagagagggagcaagagagaggggagggagacttctctttttttggcaatcagatctcgtggtaactaataaagcaaaaattaattcattactgtggcaaggacaccaagccattccaaaaagattcacccccatgacccaaacacctcccaccaggtcccacctccagtgttggagatcgcatgggagacaaatatccaaactatatcactcctctctaaaccagtttagagggttcaaactttgccttctccagatttgcctcttccctgagaccttccctgatagcttcccacacatactgctctccccagtccatcaatgaattcctgcatccaggtggctaatggttccatacttacccttcagctgtgaccagttttgtgtccacctctgtcttcctccctctttttgcttagatgacacccactcaacctctagatgtcccctgctacaggtgggatgcccttgttatatgttcttatagcaccacctgtcttcccttcatggcacttatatttgtaaatgtattcatgccatagagtactgcatgaaggcagtcgagtgggtggttcaaacgtagaccctggtgtcagcctgcctggactagctatatgaccttgggcaagtttcttaacctctctatacctcaatttccttacttatcaggtgaagatattaagagtacctcctcagagtgtgattttgttaatttatgtaaagtactgagaacatgcctggcatgtaataggcactgtataagtgatatctattattattgtacatgggattatttgatgtctgtatcccatcccccatcagacatgaaaaaataggtctgcttttgatcaccattttacacttaaagaaaagggtcaggctgggcatggtggctcacacttgtaattccagccctttgggaggctgaggcaggtggattgcttgagcctaggagggagggagggaaagaaaggaagaaagaaagagagagagggggagagagagagagaaagaaagaaagaaaagaaataaaagaaagaaagaggaaaaag

SEQ ID NO: 2496 - DNA, 766 bp, Homo sapiens
cttggatccccttccacactgtgggaggtttgttcttttgctctttgcaataaagcttgctgctgctcactctttgggtccagactgtctttatgagctataacactcaccgggaaggtctgcagcttcactcctgaagccaaggagaccacgaacccaccgggaggaaggaacaactacagacacgccggcttaagagctgtagcactcactgcgaaggtccgcagcttcactcttgagccagagaccacgaacccaccagaaggaagaaactccaaacacatccgaacatcagaaggaaaaaactccagacacgccgcctttaagaactgcaacactgcgagggtccgcggcttcattcttgaagtcagtgagaccaagaacccaccaattccagacacactaccaaaggcagaggggagctcctagacaaagaaaaaacagtgaagcatagacagtttttgcaagaggcccaagatcatacatcaaatatgtgcacagccaggacctgaaccagttgatatctacaaatgcctggcttttgccactgggctccttcagacaccaaggaaagaccatatgagcacacagcaagaaggtggctgtctgaaaatcaggaagaggaacttcaccagaacatgactccatcagcacctttatcttgcacttccacccttcataactgatgggaggacaggcatgatggtgtgtgcctgtattcccaccaactcaaaaggctgacatgggaggatcactagagcccagg

SEQ ID NO: 2497 - DNA, 519 bp, Homo sapiens
gtgtgttctctgagcacctcgtgaccttgctgggagtgtgtctgatcagccgcttcccttgtgaccaaatatttggtcatggcagcaggagagaattccatcagtggacagctctatttttaaggctctggctttgttttctctttcctgagaggcagtccctgcagcaggcttgagcctctctcactgacagcctgcctcgcataatgttaagcaggcatcggacacttgctggaaggcagggaattgcaatgaaagagcacggaggtgagaagctgtgctccttggggtgaaggcagcttctgtgctcctgggatctactgttaagccagggtgacgccagcttgcatgctaccggagggatgagtctttggctcagcagaatgggcctaggtggagcttgaaattaatgaagagatgctgcttccagctttttgagcaagaagaagtttggcctccagttattacaccttgagatcaaccttcaggcctccacttaagcgagttctgacgtcagtg

SEQ ID NO: 2498 - DNA, 25274 bp, Homo sapiens
cctgagacaagctggcagtcactaaatctcagcgatcactcaatgtgtgccaggcattcgcacacaatatcactaacacccatgacagtccttcaagagaggttctgctgtctgagagattatgtgacacgcctaaggtcacaggatcagcaaatactagggctgagatttaaacccagaactgtctactgccaaagcttttgcgctctccctcgtgccacgttgcttctcattttgggcttggtctccacttcccagtccttgaaggagttctccaggtctgccccattagcactgcatctcagaaggaagctgcagctgcgccgccaatctcccggtggtaggtgcttaataaacattatgaagtgcatgaacaaatgaatagcccctgatggacagacatgcttgagaaacactatttttcacattcctatctacactcaagattttacctatgatagcaggctgaagattcccaggatcttacatcctagcaggtaagacaaacaattaaccaacagaatgattaaggtcacagacatgctaaggaagaattgaagccagatgtgataagcaaaataacacctccatccctaaagatgtccatgtcttcatacctagaacctctgaatatgtcaggttatgcagcaaaggagaaataaggttgaagctggaattaaggttgctaatcagctgaccctaagatagagagattattctgggttggctgggtgggcccatgatagtcacaagtgtgcttaaaagtgaaggaaggaggcagaagaggagagtccaaggacaaagtgactacagaggaatggtcggagatacaattttgctggcttagaaggcggaggaaggggccatgagccaaggatacaggcaacctctagaagctgggaagggcaaggaaatgaaatgtcctttatgaaaagtaatgcagccctgtaacaccttgattttagcccactgagacatatgttggatttctaacatacagaactgaagacagtaaatgtatgtgtgtgtgtgtgcgtgcatgcgtgtgtttcctgagtcagggtcttgctctgtcacccaggctggaatgcattggcacgatctggctcattgaagcctcaaacttctgggctccagagatcctcctgcctcagctactctggctattttttttttttaatttgtgttttttagaaatggagtctctctatgttgcccaggttgatgttgaactcctggccttaaacgaagctcccacctcagcctcccatgttgctgggattacaggcatgagccatcacatccagctaagtctgcattgttttcagccaccatgtgagtatcactttgttacaggagtaatagaaaaccaatgcactgagtgatgatattgattgtaagcagggaaggtccctttagaggtctcacaaaatgtaacagtgtaatgaaatgcgaaaaagcaagaactaaccttaaaagagctgagagaagattccagaagaagaaagagctggtattgagttccagagggaggacactccttggcaaaggagacccaagtggctgagctggtggagcaagaaacagagagagaaaagatgagatggagctggagaggttggcagaggtcctctgcaggactgggaggtcatggcaggaggactggagtttattttaagagcaatagatggctatagaatagagcagaagggtgataggttgtttttcactttcttaatgatatccttagaggcacacaatttttaattttgataaagtaaaacttaaaaatcttatccttcatcacttgcagttttagtgtcatatctaagaaatcattgccaaaccctagaccacaccgttttactctggcatttccttctatgagttcaacagttttagcccttacatttaggtctatgatctaccttgagttaatgtttgtgtatggcatgaggcagggatccaatttcattcttttgcatgtggatatgcagtcgtcccagcaccatttgttgaagggataagtaacattttattgcaataaagacagactcagtaataatgctatgctgagccatgttgatgcccaaggcaaaagaaaaaaatcagtaacatagtgttttgtaaatattaaagatacaaattctttctaatttggtcttgaagtctctccctggagagtggctataaactctagccctgccctgacgacagggctccagggaaggcagtttctggatgtttacagcatgcctttcaagggatacatctttatcctggtagactgcctaatgcctaagtgtccggccatggccaggtgttccccatacagaaaacttgcttttattcacagatgtccctgtggctcttgtctaagctgtgtttagtttattcctaccaagatagccactccataggagagccctgaccaggaaagaagttaggctcatgtttgtctgtcaggggagacacaggaggaggcagcacaacaccgagcatgaaataacagacatatttattacttacagattccacagtgcagggggcagtatgcctcccagggtcactggaaagggggaagccactgaggacacgtgcattcagccagcaggtggggagcaagagagagagaaggggacctgtaagccaaattctttattgggtcctgggagttactcaagcaggtttcctgtggggaggtctaactggtggtacaagcaggcattagtttcatgggggtcacgctgtgactaagaggtggccactgtggcacacctgcacagtccatgtggggtgtggaggtcagtggggctaattaggtcagttgtatctggctgtctcatggagaggtaactatcacgagttatataagccagagagctgaactgaccaccttaaggaactaggaggagttgtaaaactggatactgcaccaagggtgactaagcctgcttctggtatgagaaagttaaagttatattcaaaatggatactgaagcaacatgaaattataagaattcactcaatactatttatcttaaaattttatttttttttcactgtgggtttttgcattaattttgtttaaaatattgcatttaatattacttatcctagttactgagaccttgaagcccttttacattttgtgcctaaaataggccttattcacctcactctagttaatgtcctacaaagtccctagctcagcttaccatgccttccacaccctaaaccctgcctgcccctccatctgcctctcaccccccattcctcaactgttatcactaataatacagattagttcatgtttccttgcacacatcatgctatgtcaagtgtctgtcattttgatcttgctcaccacttgacttggaatcacttatctttaatatcttgctctttcccatcctacaagatcaggtgttaactcctccagaaagctttccttgcgcctccgggtgggttggcgctcctcacccaggctcccacagtgccctcctcacccattgtgctcccataattattatagaataataacataataacatagcatgtattaccctgtaaaataattatttattatttgtcttctctccttctggactgcagcactttgtcccttatgtcaaactgtatcttacccacttgaacattctcatgtcctagcacagtgcctagaatatgacagataagtaatagatatttgtttaacagttaatctagctagaagtacagcaaggagaagccaatccaatctgcctaaagtgaacagagaaggttcctcatggaatctccctggtaggaggacacaagttaagcatctggcacagaacgcttccctgctaaaaaggtgagacatcccagagaacagaggctgtgcctgaggcaagagctccttgtctggactccgaggatggaagcaaagacttacaagacctcattagagagtcagccccatagacagaaggataatttagaaatttaataactggatctggcctacaagtgaagcagagaagtggctacttccaaggagtgaaacagtgagcaaaattaagggaaaattcccactgagctcacttcatttattcattcattcattcactagtcatttcataaacatttatggagcatcttttgggggtactgggataggccctggaatacagggatcaaagatcatctccttacccaaagaaatccatggccaagtcaactgctgcaaacctactatgtgtgggatgggaaaccaaaaaatacaggtattaacaacaaagtctagccttcagtgtttttactggattattctatttgcctatccaaatccactctctatctttgtccaccctgctattccctggggaagctgaacctgaaccacactcttgggctcccttgaccactgactaccaactgcacatggccagtgttgtgcatcagcaggagattggaaggagagaagtgagtgagggtgtggcatttattactattgccgtggggtttccatgggccagttctgttgaaagccaggaatcctatgtttcttccgcatagcccccgcagtcttctggctctctttcccctctctccactctttcaggcctacaatagcacctagatttcatagtcctctggcatttgactattcttcgtggtttccctaagccctgctcccagctttgtaagtagtcctttattaaattcatttcacattatccaagtgtaagtgtgccatctgtttcttgctgggaccttgactgacacaacaagctcctaagggagatgtgacaagaacatcaataaacgggggatggaaggaggaatccccttggacatgtgaatgaatatatatggccacccactgggaaaggaggccatgagaaaaagtcaaagccaaacacgttgggattatttgcctttatgcccaggaagctggaacagagcagggagctggtcgaaggtacccgagaatccatccctgaaggatagcagatttggagggtaaggaaagatttctttctacctgagaagtgcctaggagacagtgactctgagttttcttggggtagacagcaatgaaggcttaataagcagaccccccagactggtctcctctccccttgccactgtgggaccttgaggcaaagggaggagcagactgatgcacctcgagtgctatagagaaagggaaacaagactgtttcctgagttgcagaatatgtcaaaaaataagaggacaaaaccacactctgtcaagtcaccttaaagacacgaaataggttctaggcctataaaagtgcctgtggcttagcatagctagaggttatctagatgttttcagtctgagaactttcacctgaggaagaaggacacatcagactcttctaacagcattcgagtcacactactcacatccctcttttcagttccatcctcctcaaaactccttagaggtattatttggttcctcatgtggttttcttacatggaagaagaaccatatgtatgctgatcaggtttaaggtacctaacaagtagaattcatgctgaaaatcaatactttcggcatctgcagtctcctaaaagcattgttagtgagagtcagcctccccaagtccaggaaactcaaacactttgaaaatctaaacccacaaagccaaggtcaaaatcctggcttgggtgaagtcatgaatatcagtgctgcctggaggctccttggaagcccaccatccaccagcctgggacacacacagacacactggtactttgatgagccctgctgcccactaaagtgctgatttgttagaacagccattgtaccaggtctctctcatccctttcttgaacaatggattgctcttccaaacttttttctttttttttctttgacttttaattttaattttaattctttagttgacacagatcttatatatatttattgtgtacagcatgttgtttgaaataagcaggctttctgaaatggctaaatagtgctaattaacatatgcattacttcacatacttatcatttttgggggtgagataccttgatctgttttcaatttcatagcctggcattggctcattgttctatttgactgattctgcctgtcactgtatctaccacctctgtcagattagagtaatccacaaatttggtaagcaggcgtgacctaagtgactgataaaaatgttaaatatacaacctgaggattcttcaatcccatcctggcttctctccttttaaaactttggtctgtccttttcagaactacatgcagcatgacaagtgtggtctagcctgtgcatggcaaagcatgcctctcacctcgttgaaattctctgctcctgcaggctgagatcaaaataactcccttacacattatggctgatattactgaagtgcttctgtcatttttatcctgaagatactaagtcacatcagtgcatcttgttagttttcttttggactcgggtgtaacatgttctgttcctgttcagtttcagttttgcctcattatgcttagaccattgctgcagcctgttaagatctattaggatcctgtgcagaccagactcaacctctcatcactcgacttgtgcctaactctctagtaccatcccatccccacttctgtctctacactttatttctagcaatagtaattgcttcagggcctccccaatgtcttctagactgtgtgtaggatacaatctctcccacacagaaaaagtctcagactaacacaaagatccacatctcaaactccgacccattccactccatgcaacagaaggtaaaaggatatgggagatctctgagtcatgtgaccaggaggctggggtctagtcctgtcttcacccttaaaaggctcttgtctgtcctgtgagcaggcatagggtacagcagtctgaggatacaccagggtctttctgcccctctctagctggagcagaggctgctcttgcttcccaatatccattctctcattcttttctgctcgtaagaacagaccccagtatttagaacagcacatataaacccctgaaatgatggcattgccagctgctttatagccaggagtggtcaagagataaagttttggccaatgaagtgggaaaagtcatgtgtgactgactttcaggagggtcttaaaggggagggaataaatgatctttgtcctcatccacttgcgcctgctgtctgcctggaatgtgaatgtgatgacaggctttccagcagacatcgtaggaccatgcagtaaacttgaggttagaaactggtctgatgattctggaggagaaagattgaagcatggtctcggaaacaccatgccaagcctagactgcctttacgccaacttcttttatgggagaagggaagtaagcttttacacatttaacacacctttcagaagccactttcttctatatttatgatgttatctctagctgcttaactctggaaaagcctcctattctctaaccctatttatccaactgcaaaatgaaactaacaatataacaggaaggggaaaaagatcatatgtcaagcattgacaagacactaggaatatgaaggcaaaaagataaaggcaattcagtctgcagattttatgtgatgatcacctctcattgctcactcactatttctttctttctttcaacaagtatttataaagcctcaacagagatgacagttctgaagggactagggttgccatatttagtaagtaaaaatacagggacaacaaatctttttttttttagcataagtatgccctgtgcaatatttttttattaaaaagataattgttgtttatctgaaattcaagtttaactggttgtcctgtattttatctaatgaccctacctggggctaccatggtgaataacactgaaaaaagcccatcctgcaaggagctgtcttccagtggaggggatggtgcacaaaccatgaagctcaatatcagaactgaatgtagggataagtggcatgaaggaaataaaaccactacagtgtgacaggaaggtgactcttcaagattgtcagggaagtcccgtgaggatgtaacatttccccagatgcctggacattgaaatggaactagccaagccaggggaggaccagtccagcctcaggggccaacgagagcaaaggccctcatgtgggaacatgtttgggatgttctagaatcccaaggccagtggggttaatgttaagtggagagaggtgtgctggagcccagtcatgtaaggcccataggtgatttttttttaaaagaggccatggattctattttaagagtaagtagcagccatcagagggttaagaagggaagaatatcgtccaatttatttattattgtttattttttaaagaaggtcttgattgcttggtggggatgagacagggttggagaagtaaaggcagctgcaggagaatgagtaaggggcttttcaacagcacagctgaactgacagaggcttcagctggagagctgcagaagacctggtgagaaggatcccacgggctatgtgtttgggagtagggcagacaggaccagtgaagagattcactgtggaggctgcaggagagaagcgaatcaaatatgatgtgcagggctgggtcctgagtaactgagtaaaaagttctcatttactgagatggagacactattcctagggcaggtttgtggacagcatggggcagaatattaaggagcttgtcttggccagattccttagattagatagtcaaatggagatgttaacaattaaaagttgcttttattatccctaatttacagaagaggaaactgaggtctcgcaggttagaaaagcaggactcataacaaaacctgtccagacccagcttgcttccccagaccacactattataaacctccctgctgcagacgcgaaacaagcaccaaatgagatcatagacttttaaattataatgattattaacgtgggacagtgtctggagacaggcagggcatggaacctacaggatctagggagcaggtaaaatgtgctcggctctgctttggagctgagtcctccgcacgccagggtcagttacatttccacagacaagctgttccacagccagacttcacgccatcccctctgaatcatttaaattgcctttgctaaataatttacctccatgtagacaaaagggttccacaggctccccaaacattgtgggactggtgcataatttacaaagcattgcttagccgccccgtgcagggagaacaacagggcttggacacctgccagagccaaggagggcaccaactggaaaggaggcaaaacacagctccatcaaacagaggcaaaggcacctactgacacctggattctcaaggccaaaagcaagacaggaaaatgtgagggtcaaactgcctctgggcacaggctgaagccagtgagggaggggcacgtagctagcatgcgtgctggaagtctgaggaaaatatcatcaatgctacactcttcctgattaccaatatcctgagacctaattaattatgtcctttaaaaaagcagcattgcctctggtaagaagcatgtttagcaaatacctgagcattttaacacaggcaagaacgatgtggaattcagacaggaagggcaattttctgtgcctggaatgccttcctccacatcccttatgcacttgacaaattcctgctcctttttccagagctgtcctcaagggttacctcctccaggaagcctacctcactcccagaggcagaccaaggcttccttctcatcgtgaactatgttttatctctcatttcattgtataataaatgttgttttcctcccctggactcaggtccttggtaacagagtttctttaaatctgtagtcacagtacatgattcagtggtagcacattctgtattcattgtagaatgaaggatgaaacaaacaagacatgcaccataacttacaagatattttccccagcattgcatgtagtattgttgctttaagcataaaaattcatatcccaagagaatggcaaagtgtgtataaaataagcaaacataccagaagttgctcagcatcttcaagagtcgttctgccccttgctccatgtcttagcccattttctgttgctgtaacagaatatcacagattaggtaacttataaagaaaggaattttattcatctcacagttctggaggctgggagttccaagagcatgatgctggcatctggtgagagccttcttgctgtgtcataacatggcagagggtatcacatggcgagagggcaagagcacacatgccagctcaggtctctctccctctcttatgaagctgttgttctcatagtggaggctccaccctgacaactttatctaatcctaattaccttgcaaagaccccatctccaactgacatacggatttgggaattgagtttccaacacaagaaatttgggaaacatatttaaactatagtgctccacttggactaatacttcccatttctaaccacctgtcagcttcagctctttgagtttggcatctaattcattttacaatgcctgactcttaataggatgattgggttcttgaatcagacagatatattttttttggaagtttccagccatgccacttagaagctgtgtggcctcagtttagtaagttaacctctctgatcttcagcttccttacttataaaacaggcacagtagaagtatagaggtattaataatgcctacctcattgtaatgttgtgaatattaaatgagatcagtgtatataaatatcttagtgcagtgcctagaacttagtgatcattgaatgaatgttagctattactactgttttcactttactacaagatgtattgtccattctgtcactgcacctgctttctatgttctctaccagtacacacaccttcagttcagccctggacttgctgccatgtatccaataccccatgatcagacccagaacacatttggcaatcataggttctcttcttgtgattataacaaatttcctcttcctggatgcttctcaagatcaagagtaaaaatctgagttatcttaagctatgtttgggttgtcagtctgtgctgctttgaatataactcccccaaaatactgcctcatataaagccccagcttatattagggttacttgtgtttgagcctaaagatacaatggcagttagaatttaaatggcatttactatgtgcttggtactttttaaaagtcatttatatttagtacttaaaaccgaagaggtaccagtatatcttcattttgcttatgagaaattgaggcacagagaggtatcgtatgagggtgggagtgtgtcacactctgctcaggagggcttgctagtcagagctgtaaactaagtttacatccttgggagaagaaaaactttgtccattctaaagggtctgacttttcccagttttagacatcaaggaagaggcaggttctgttatagaaaacccagccttgtaaggcaaggattagatgggcaggaccaaggaatggtcatcattctctgagcccactctctttagttaagattttaatgcatctgaacatattgaaaaagaaggtggcagaaaactggcccttgactcaagatagcttttagacttagggcagggtagggagataggttgtaggaaaattgagactactgttaggtagcaggtatcccatacaataaaatgtcaagtggtaccctctagagttaattcgcttctgttatctgggagccctgttaatcattctttcatgccttggttgtaccatggggaataaaggagtggatttaggttcaccttggacacttgtgtgaaaataagatctgcagtctctggaaccagctttgttggatgcaaagagaaagtgtgtctcagggataagaaagaactccctgctaaccatggggagcttctccatctattgctagccaaggtggatgaagatttgatttcattaaatcacccggcacatttctttacctgcccataggtgagtgagtccataggagagtgaaaatggaggccatttccagccaaacctggaggcttccgtgggtcagacaactaggccccaagagaagaaaaataaataagttaaactcccttcatcgggaaaataaacatcaaatggcatgtgatagtgtgcactgcataagtgaataaaggaggtttaattctttaattattgcctctagtttccccatggtaacaaagggcaagttgatgaagagagataatcagggcataaaatattgtgtctccttggtttatttcacttaataaaataataaaaatatttctccttaagttcccagtcttgcttaaaaaaatgagacagtatttttatctaaactcatttcaaaacagatccataaagatttactgagtacctactatgacactgggttcaatatgatggtctctgctcagaaagcacaattctgacttccccttgacagtccccacaactcacattcacacacttttaagaaatttcaggccagacatggtggctcacacctgtaatcccagcactttgagaggccgaggtgggcagatcacctgaggtcaggagttcgagaccagcctggccagcatggtgaaactctgtctctactaaaaatacaaaaattagatggccatcgtggtgcatgcctgtaatcccagctattcaggaggatggggcaggagaattgcttgaacccaggaggcagaggttgcagtgagctgagatcatgccactgcacttcagcctttcagtctgggtgacagagcgagactcagtctcaaaaaaaaaaaaaaaaaaaaaaaaaagggaaagaaattttagttatctagtggactcttagaagatattttcgtttacaacattcaccatcaagagtctatgacttcactaatattcacctatattcctttgaaagattgtgtctagcaatcttttgtgttcatgttaagcaaactatatttattaagaaatactttgtttccccatttttgtatttagaatttccaataggaatttctttcaagaaataacccatgtgcttttactgagttaatagacttccagccaaagtgtctccgttcactcaataatcatgaatacagtaaatacctgctatgacccaggcattgtttgccatacttgggatacaacagtgaacaaaattctaggtcctcgtgtagcattaattctagtttaaacataaagtcaaaacaaaatttaccaagaaaaagcaaattacattgtatatcatgtcatgattagtgctactggaaaatgcaatgcaaggtaagagagggagtcatgagatgtcaggggatagtggtgatgaatgtggggaagggaggctgtaatttaagagtactgagcataggtgtattagtccattttcacactgctgataaagatgtacccgagactgggaagaaaaagaggtttaattggacttacagttccacatggctggggaggcctcagaatcatagcaggaggtgaaagccacttcttacatggtggtggcaagagaaaatgaggaagatacaaaagcggaaacccctgataaaaccatcagatctcatgagacttattcactaccatgagaacagtatgggggaaaccacccccatgcttcaaattctctcccactgggtccctcccacaacacatgggaattaagggagtacaaatcaagatgagattttggtggcaacacagagccaaaccatataattctgcccctggcccctccaaatctcatgtcctcacatttcaaaaccaattatgccttcccaacagtccctcaaagtcttaactcatttcagcattaatccaaaagttcatagtccaaagtctcatctgagacaaggcaagtcccttccacctatgagcctgtaaaatcaaaagcaagctagttacttcctagatacaatggagataaaggatttgtataaatacagccattccaaatggaagaaactggccaaaaccaagtggttacagggcccatttgagtccaaagtccagtggggcagacaaattttaaagctccaaaatgatctcctttgactccaggtcttacatccaggtcatgctgatgcaagaggtgggttcccatggtcttgggcagctctgcccccggggctttgcaggatacagtctcccttccagctgctttcataggctggcatgagtgtctgtggcttttccaggcaaacagtacaagctgtcagtggatctaccattctggggtctggaagatggtggccctcttctcacagctctcctaggtagtgccccagtagggactctgtgtgggggctctgaccccacatttcccatctgcactgccctagcagaggttctccattaggaccctacccctgcagcaaacttctgcctgagcatccgggcatgttcatacatcttctgaaatctaggaggaggttcctaaaccctgcttcttgacttctgtggacttgcagattgaacaccatgtggaagctctcaaaccttggggcttgcaccctttgaaaccacggcccgagctccatgttgacccctttcagccatagctggagtgggtgggacatagggcaccaagtccctaggtgcacacagcatggggaccctgggccaggcccatgaaaccattttctcatagatgtcctggcctgtcatgggaagggctgccatgaagacctctgacatgccctggagacatttttcccattgtctaggggattaacatttggctcctcattacttatgcaaatttctgcagctggcttgaatttcttctcagaaaatcggtttttcttttctatcatattttcaggctgcaaattttctaaacttttatgctctgcttcccttaaaaagttgaatgcttttaacagcacccaagtcacctcttgaatgccttgctgtttagaaatttcttccaccagatactctaaatcatctctctcaagttcaaatttccacaaatctctacatcaggggcaaaatgctgccagtctatttgctaaaacatagcaagagtcacctttgctccagttaccaacaagtgcctcatctccatctgagaccacctcagcctggaccttattttccatattgctatcaggcttttggtcaaagccattcaacaagtctctagaaagttacaaacttttccacattttcctgtgttcttctgagccctccaaactgtcccaacctctgcctgttacccagttccaaagttgcttccacattttcaggtatcttttctgcaacacccccactcctggtaccaatttactatattagtctgttttcatgttgctgataaagacgcacatgagactgggaagaaaaaagaggtttaattggacttgtagttccacatgactggggaggactcagaatcatgatgggaggcaaaaggcactttttacatggtggtggcaggagaaaatcaggaagatgcaaaagcagaaacccctgttaaaaccatcagatctcataagacttattcactaccatgagaacagtatgggggaactatccccatgattcaaattatctccaactgggtccctcccacaacacatgggaattatgggagtacaattcaagataagatttgggtggggacacagagccaaaccatatcaataggattcatggggtgctagttaaaggaggtaagagtcattcatacaatatcattctaaggtaagcattctaagcaaaggctggaaaaccaaagcatgcccagagtatctgagaaacagtcacttagtgcagactgggcaaaatcctaggacagtctcagatgatccacaaaggtagtggggctgaggaaaaaaaaagatggtgcaagaccatgtatggtgttggaaagacactggcctttacccccaagaaaaatggagagccttggagaattttaaacaaaggaatgatacaacaaaaatcatttttcctagcctgtgtacttttatttagcctacccataaggtatccagaaggctttttggaacaatgaaaacacctggagcagcttctaggacctcctctgggctacagaaaaggtctaagcacccaggtttggtgccaatattcattttacagaggagaaaatggaaagaaagaatgggcaatcgactggcctatggccattgctgagttagggacaagcccaggactggacacagggctctttctccccacaatgtgccactaaccaaagcaattatgcaagaagaaaccagtcttgggtgcattaattttatgttttcagctgtccttcattagccaggcatcatgttaagtgctttataagcattatccccaagatgtaggaaatgttcttcctaactcatagatgaaggactgagacccacagggtttactgcacttatttgaggcacacatctaatacatggaggaaccagggtccaatgcagtctttctgcctgactacagagcccactctttgttactgtaggggaaggtttgtaaaagaactgaactgaatttcatattggttgcatttctgcatcctgtcactcagctgcctttttatgactctcactttcaatatgttgacatgaactcacaagttccagaataaaacttttctaatgggaaagtaatgtctttacacaaaagacttgttaaatgggtctcaatcaagtatttttctaacagatagaaaaagatcatttcccaagaatagaggcctgtcctgtaatgcccaagtcaaggtaacctcctctgagaaggtttctctgctcctgtcatccagtgggaagaaatgacttctaattccaagcctttacagctgttcatgcgcagtgataacaattgtcctttatcgagtccttgctgtgggccaggtatttgacctccataatcccttaacttctcagcaaccccttgagtcaggtacagtcattttctgtatcttaaacagagattcaagtgagttcagtaatttgaccaagattacacagctatggagtggcaaagcttcactctaaacagcctcagaaatcattcttgttgcacttatcacaggaaacttgagtacaagtcagtttccagaatgccttacttatgaatacgttccaggaaggcagggagttcctgtcttctggttacaccagatccccagcacctagaataatactggtcccaaagaggatgctcagtggatattttctgatagaataaatgaccttctctctatggctcaaattcctaatccataaaacactgattccatgtaagaattgtactacataacaaaggagaaagtgttttatgagccacaagtacctacctaatgattattccaaatctgagatgctatgatttgaccttttgttgctgtaatgtctgtgcctaagaacacataagtaagatggtattggatgtaacattgtgccactatgtattctcatgaacaaataatcaggaagagagttttgttttggtgatgatgtgaaaggaataaaacgattaaaccagaataactgtgcattcctcaaagaggacctgtgtactatatcccataggatctggcactttaaaaaaaaaaaaagaagaagaagaagaaaaagagtggttactttcaagagtctgaactccttcctcaagttcagaacttcagacctgcaggtctttctccttcagcacccatactgactggcaaaaacagctataaaaatcaatagatgctacatgctggatggaaagagactgcaaaacagaggattatcctccctcaggaagagataaaggggaattgattaaaggtgttccaggccagtcctttcatcagagcttggaagggctgagcccacgggagggcaggttgccactgtggcagcacaggtagggccctggaaatgctttctccgagaagccttttgactgataaggctgccagagctacttttgaggcccaaactggctttctgttattctccagggacttggcctgttttctttcccaaaactgtactgttggactccacactctctcccagttatctccctgaaaacctgcttaggacagggactctggctctcagcctccaaccacctttattactgccacaagagggatgcacaagggcctttgctgcctcctgtagggaaattcagataacttacggtggtcacgactcgacagagggctgatgaacagcataggtttctggttccccagccaaggcttctgtcagtggagctgcccggtgctgggttgtctctggctgtcttctttcatccctgccatattccccaggatgtgagcgctgctcatttctgcagccttcttactcaccacatccctctctcccttcaggctccatcctttctgaaatccaaacagttccctaaaccctttaatcaggtcttttttcaatgggtacccgggactgttttaatcaggtatggtaagacacacaggcagagaaatgactgtcatgaaggaagaagtcctctcacagttctcatgccactctatgcaaggccatgcagggaagcagcagggtctgacccctgggcagaggggagaaggggaactgggggcaagagcctttgttgtggtttccagagaaatgggtgagacagggtaagcattaggactggctagtgtgcataattttagcaggttctagggcatggagggtgcccctatcttactggtacctggccctaaggcgataagggaaatagtggcctgaagtataaaatctctgtaaaggaggtgctaggggtatgggctctggatttgttggtttgcatatgaaagacatgctcagaaccagtttttagtaaccactaggaattagctagtccagggaggtgcaatcccaccaacgttagcaaggcctcaagttgtcaaaccatcaaaaatacagaatacaaaggcatgatcagtaaagctccacactttctcaagcatcccaaaaggactggtctcaagtatgtgagcactctgagggttgcaactttttaaatatttgcacaacatttaccttcagaaaaagctgggagtgacggcagagcagccacctcctccaggaagccttccttgaccaacccttccccacctcgctggtgctgagtgtgagatgctcctgtttgtgttcacacagtgactgctctgtgcttgctgctatccagccctgagcacacatggtttagcagcccatgacttgtctgtcaccccatgagatgggaatatcctcaaggataaggtcagaatttgacacagtgaccagaacagtgaggatcagtaataggaaaattagttggaatcttattaaatcttctttcttaccaagcaaaccacaatatttactccaggctgaatgttaaggctcatatccaggccactgctagcccataccacatctctgcatgaattcacaaaagatgctccttcttcaaatttacaacaacaacaaaaagaatcaatataactttggataacctgaaaaataaacagcatatccaaaaacagaagtccaaaatcaaagtgtcagcagggctgccctctctctgaaatctctagggaagaatccttcttgcctctttctggcctctggtggttgcccagcaatccttgacattctttgtcttctagaagcatcaccccaatctctgccttcgtcatcacatggctgtcttctctatgtgtctgtgcctctgtgctttttcatggtgctcttctgagtgtctgtgtccaaacctccctcatctgagtagcacaccagccattgcattccagcctgccctgatccactatgacctcatatcaacttgattacatctgcaaaggccctatttccaaataatgtcaccttcgtggtactaggggtaaggactttaacatatctctgtcaagggcacaaagcaaactacagaactctcccctgatgtgttctcccactggccagaaagaaagccacatccacaagtcacctgtgatactttttttgaagaaaaatattcagaaaagatttgggtattcacaccttgataaattataaagttctttattcactctgtctttttacttctctctcatcaccctctcttgtgtcagaatgtactttcagccatggcttaaaacagtatgtctgtgtccttagagaatgccaatcaaggtcactgtgaaaagcaacacaaagaaacgctgatcacgtctcacttcttgccaatattgctcagaagaaaaaacgaccagtgaattctgtgtttgaaaaaagcatctcaaataagtacaacctagaaaaactgaaagtccatttttcgagaaactagaaatgtcaactgttaaactgtactgcagtgaatgtggcagagagaacatggtatgtttgccatctccattacctttgcctcggcacacaaagacagactacatttcccagcctccatctttattaagtggagccatgacactgagtttggacagagaaatgtgaagggatgtgacatatgcctcatttaagcctggccagcccctaagcaatctttcctcttcttttgcctctgatcagtgcagagaatcccatcgattcccaaaggccctgggaaatggcaggtccgctctagggacgaagtgtgggtcttttaatcacagctgcatcatagcagatccacactcttagatagagacctatattgcattgtgacagggttgagaacaagggttcagccactggaattgggggattgctccgaaaataaattagcaaaccctaaagaaatgtgtcctttatagaagacacagtagtgtggctgaagtcaaaggatgaagttaattggaggagataagaccagcattatgtagtttggatttacgtaattacatggaaaaagactagcaaaggtagggagactggaaagtttaaagcacctcatagagaaaaaataaaagccattccacccaatgggaatgtggtgaaggtggagcaggtgggcatgaatagcactaaatatccttaagcagctaaaggacaggacggctcaggaaaggtaactggagaacttggggctaatgcaacaggcaagagagagccatcaaagatgactgaataagtgaataaattgttaaaaacaaagtgcccaaaagacagaaatgcaggtcgtgtgctggatggatttgaggcaggtggaggcaagaagtcccattaggaagctattgcaaccgtacaggtgagtgattgtacagacgtcacctgaggctggggaccaggggtgaagaggaaggcatgggggagatgacagcaataacaactttgtcttgggacacctactatgtgcccggtaatttatatacaccatacaatttaatcctcaaaattgtatgcagtagcactatggccttatgggacagttgaggaaactgaggcacaaagaaattacaaggctagtaagttgttaaacgtctcagcttggacccaaactcaggcatttgactccagagtactcgctcttaaccaccatgtgtagattaaggtagttaacaaggaagaaattcaggtgccctgacaggctgatctcgcttaaacaacctccacagcccaccacccagctacaacctccttctcattcccaaaaaacaatgtgagtttcaatgacaaattccgaatcatttgtattaccttcaaagcatctgcctgtgatcacataatacatccttttcaacaaatgatacaaatgcagtaaaaatgcaaattcttccctggccaggctgctcaaggccataaacacaggtgcaccattaactttgagcactgagcaaggattccaggtacaaagcttccccagagaaaaaaactgctctcaaattaaagggaaaggggcaactctgttcctctggccagacagggagcaaataaaatagaaacttagctcagagctatcccagaggttgtgtttcttagccttggctgcacatcaaactcatttgtagagtttccattaaaaaaaaaataccaacactcaagcctcatgctagaccagctgaatcagaatttggggagttcaggcccaggcactatatgtttaaaactgtcccccgggattctaatgcaaggtgagagttgagaggcactgcccttgctgagcaaagtagctgtttctgtgtcatttgggtgccctccttcaactacgcgtttgtccaaaatgtattgtgcatctctctgtgcccaaagtcatactatattctggagatacagaaataaatgacatgatcttgtcctcaagaattttagtgtggaatgtgtgaaaaagccaaatataatggagcgtaggaattggctaggtgttaggacagactgagggcagaacaccagggaggcacaaaaggaggcacccgtcttggggatcagaaaggaccttgaacaggaatcaacacctcaactgagtattaaaagaagaataaaactgagccaggtgaatacgaggtgggagaaagcattcacggctgagagaacagcttgtacaagagaagagaggtagaaggtgcagcaaaaagaacttaaggatttaaagaaattcaggccagcagaaacatttgatgcatttgagtggaccacaagtgaggctagagactggggcaggcaggggagttccatgggacctggatctagcaaaggctactggatttagcacccttgaaaaggtgtcgaggatcaaagaaggaaagtgtgaaaaaaatattgagatgcataaatacaaagtggatggtatcatttgcacatttattataccgtttagtgtacaattataatgaatcaggcccttttctgagcatgtggtcttcattcattcaataatttagcatgtatttattgtccatctactgctattgatcaataatagcatggtgtaggctatttcccatatacacaatgtataggcaaataagataacagtgaacagtcaaaaatccctcttttcatgggatgtaccttttagtagaggagacagacaactggaaaaataagttaaaatagtaaattagaggctgatagctgtggtgacaaaaataaacagatgaagaaaacagccagtattgtggtttctggtcttttgatgggtcaacctgtcagggcttcagtcctctataattccatcaatcattaacctaggtgttactatgaaggtattttgtagatgtgattaaagtccataatcagttggctttaagtaaggaagatgatcctagatggtctgggtgagcctgattcaagcagttgaaaggttttaccagtagagctgaggcttccctgaggaagaaattccatctgtgggctgcagtgtcagctcatacctgagggttccagcccacccttccccatggacctgccctatggatatttatcatgcctagccagcttccacaattgcataagccaatttcctgcagtaaatctcttaatatgtgtttcctactgcttctgtttctctcgttgaaccctggctaatagggggaagctgtcattttaaacagggatgttgagatagacctcactaagaaggtactacctgaggagaaacctaaagttggtgagtgaatgagcaagtaactatcatgtgaatgcaggatcagaatgtatatgttgggaggcgagacaaggataccagacaaagtagcagcaagcacaagggcattcttttatttaatcctcacaacaacactgtgaagtaggaactatgttatcatcaaaaattgtgaaggacaaggcaaagatatgacatcaacctaagtggtcatcaatggatgattagataaagaaaacgtagtttatatacacaatagaatactatattcagccagtttttaagttaaataatgtcttttatagcaacatagatggaactggaggccattatcttaagtgaaacaaatcagacacagaaagataaataaggcctattctcgcttataagtgtgtgtacacacggacatagggtatggagtgatagacaatggagactcagaagggtgtgggggtgggaagagggtagatgatgagaaattacttcatgggtaccatgtatgttattcagatgctggatacgctgaaagccctgacttgaccactatgccatctacccaggtaacaaaattacacttgtactccataatttatattaatttaataagcttagcattaataaatttaatacatttaaaaaataaatacataaatataaataaaattgtgaaggatctgatattttcccctgcttgccagctaataagtcaagctgccacacacagatgctggcagaagatatgagactcccgggtcagaagcaaagatgttattactcatggcacagcagacggcatgaacttcatgttcatatcagttccctttgctccacccaatttccacacagacaatggaggtgggcctgtgtagacactgcacacactttggacttgtgtcacagccaaggaatctgaccctaggaaacccctaatcttataaccaggccactggcaaacctgctcaacctttgtctcagaggaagacattatttttattatattggtcaggaaatagatctgccctgtccatggagggagacgctatactaaactcatccaacccacagcccacagggctgcatgtggcccaggacagctttgaatgtggcctaacacattttataaattttcttaaaatattacgagattttttgcaattttttttagctcatcagctatagttaatgttagtgtatttcatgtgtggcccaagacaattcttcttcttccaatatgatccagggaaaccaaaaactggacacccctgtgctataccttccaaggctatgtgctatacaaatatactttaaaggccaggcatggtggttcatgcctgtattctcaacactgattggctgaggagggcagattgtttgagcccaggagttcaagactagcctaggcaacatggtgaaaccctgtctctacaaaaaaatacaaaaatttgctgggtgtggtggtgtacacctgcagtctcagctccttaagtggctgaggcaggaggattgcttgaaccagtgaggtcagggctgccagtgagcagtgatcacaccactgcactcagcctaggcagcagagtgagactctgtctcaaaaaatatattttttaagtaatttttttactttatatata

SEQ ID NO: 2499 - DNA, 2915 bp, Homo sapiens
ttggaaacttgaaacccttgcctgggaaatgaagagcaaggccctgatttggaatgaatatgtttaaaataaaaataattacacagagttggaggagctcttaacacagatggagctcaatcatcccaatgtattgatggagaaacaggctcagcaagttcatggcagaaatggggctccaatcctctgtgaggctttgcccggtgccctagctatcagggaacacgaaatctgtccagtgcaaccaccttctctcatcatgtttgccacctgcttaagactctccttcaagtaagcaagtaagcagcatgttcttactgaccacaaagtagccattgttggggcaactctggcagtgaccttgatcgcctctagaatgcaaaatgcacttgacttatgcaaataccaacacttagtggccctttgactgccagggagcattatggacctttcgctgagtttcacttggacatatgaacttctgatctcaactgactcatttagttggagcagggaatcccaatgcctttggaaatagaaaatggatatgactcaggatgaaacatcagtggaaacagacctttcaagattttttaaaaaaatataactactggttagcatagtcataaaattagatagttcttcttccttatttagaaaacagaatacagaccgggtgtggtggctcatgcctataatcccagcactttgggaggctgaggcaggcagatgatttgaggtcaggagttcaagaccagcctgaccaacatggtgaaatcctgtctctactaaaaatacaaaaaattagctgggcatggtggtgcatacctgtagtcccagctacatgggaggctgaggtggcaggatcgcttgaacctgggaggcggaggttgcagtgagctgagatcatgccactgtactttagcctgggtgacagagcgagactccatctcaaaaaaggaaaaaaaaaaaaaaggaaacagaatacaaggtcaggcatggtaactcacacctgtaatcccagcactttgggaggccaaggtgggaggattgtttgaggccaggagttcgaggccagcctggccaacatagtaagaccctgtatctacaataaaagaaaaagaaagaaaacagagtacaaagggtggagtctgggtctccagtcttgtttgtctgcttgtaggtcctgctattccaagtgtggaccatgtaccagctccatgggaatcaccagggagcttgttaaaaatgtaaaaatctcaggctttcccccagacctggtagatcacaacctgtatcttagcaagatcccccagttgacttgtagacacaggaaaatttgagatgtactgcctgagagcaccaaaacatgtcaaacacaaaatagacctgaaacaaaggaagaaaataaagtatttaccatgcttgcattgtaatgagaatgcacgcaataacttcaggacatttatgacaataggaattctttttaaattagtagatggttctttttagaacagctttagatttacataagaattgtatagagttcccatataccgcccccttatcccaacatatacagattttcctcttattaacatcatgaattagtgtggcacacttgttaaaattgactcaatattgatatattattattaaagcccatagtatacattaaggttcacctttgtgatgtgcagttctatgggttttgacaaatgcataatgtcatgtatccaccatcaccatatcctacagaacagtttcactgccctgaaaattctctgtgctctgcctgttcatccctctgtcctcccaaacccctggcaaccactgatctttctactgtctccatagttttaattattccagaatgtcatatagctggagttatacagtatatatccttttcagattgaattaatttatgcctttatgttcctccatgtctttttgtgatttgatagcttatttctttttgatagcttatttcttatactattgctaaatagcatcccattgtatggctgtatcagagtttgtttatacattcatctattgaaaactcttttggttgcatccattttgggaaaatgatgaataaggctgctgtaaacatttgtgtgcaggtttttgagtgaccataagttttcagctctgttgggtaaatacttaggagtacaattgctggattgaatggtaacactatatttagctttgtaagaaactgtcaaattggagcagggtgtggtggcatgtacctgtagtcccagctactcaggaggctgaggcaggagggatttcttgggccgaggagtttgagactggagtatgctataatcacacttgtgaatagccactgcacagatgcacaaaagaaactgtcaaactgtcttccaaagtggccgtgccattttgaatttccactggcattgaatgagagtccctgttccacatccttggcagcatttgtggtgttaacgttttggattttagccatcctcgtagccgctgatacagaagcctgagggaacacactcccccctacgtccttctccaacacagcagagccaggaaggacccggatggaagttaggacaaagaggcccagaattggcacagataccaacagaccattcgttgaagaagaaatccaaatggccataaggaaccccagagatgaaaggcctcctcccactggcttggttcctggcttgtagtgtgcctgctgtgcaaggaggcttgctggacctaaaatcaatgatcgagaaggtgacagggaagaacgccctgacaaactacggcttctacggctgttactgcggctggggcggccgaggaacccccaaggatggcaccgattgggatggggtcaggagggcacccctcccactcgggatctaagtctcttgcac

SEQ ID NO: 2500 - DNA, 14677 bp, Homo sapiens
ttagaataacagaatttggtcccctcccacttccgtaagttgaattcttaattgctaaatttcaggcttttttgttgttgtttatgtaagaatttcaaggccacaactccatatttgaagtaaagtgctcataaaattaattgcaaggtaatttgccgttaatagttatctgatttctactttgatctagtggttgttaagaagagaggttttggtttttttaatcttgattttgctgttgattcctacttttaattgctgtactggagaaaatgatttctgtgggcttctttgaggtacagcacatgattcacaattgtatatggtctgataacataagaaaataacattttctcagttagtagaatacaaatacttaaaaatatatgtttttaaatatttgaaaaggggtctgctgattccattattaatgtattgcatccttacttgattaaattacttttgtttctggaggatttttttgtatatgtatatttgatgctgtgtccctggtgagttataaactccttgaactacagcttttatcatgcatttgttataaatttttattcattttatatatattgatattgtcaatcctcctttttaaaatttggatttgactttataattctgcacatccttttcttttcaacatttgccttcatttttcaagtgtgtttcttatagacagcacatgtctgtattttttaaaaacccaatttgatattccttgtttcataacaggaaaatttggttcatttgaattcagtgtgaagattaatatttcggtgttgttctcactttatttgctatttaccgtttattccttttttcgatttttacctctctttatattcttgctaataatattaagctttttgctagttctgttgtttctcttttggtttttgaattaatgttattttatgattccccatagccctaactataaacttattctaacaatataaactattctaaaaatcacatataatttatgtgtctttatttatgtgtctttattaacacataaaaattaataagtaagtgtaaccactcgagtatttaatttgccattcctcctgcccctttaaaaaggagacatttccactggcccctgctcttccatcctgagcaaactccccaccttcacagtagccaacacttgggtttacagcaatggtttcagattttcagcgtttcatatcctggctaacatttttgagataataatttcttctgtttagcaataagttcttaagatttaaatatattccagtcatatcattttattaattcatttttttctctataccttaaaatctatggcatctcatggttcgacattaggaaatccatcactatgattcagtaagtaaacaaattcaaggtgtcacatcatattgctttttatgcttttgattttagtaatatcctttcacattcataatccagatagagagataagcaagattgtatccaccaagcctcctctttattgatcttccaaactgaaaaacatagctgccattttagtcagcagttaaactttattatagaatatttttataccttttctgctaacattacctgcaactcccatggtgatgctcaaatcccatttgggaattcagtgaactagcagaatgaaattctaagagactggggcttgttgatgtgtccacgctttccatgggaactgatgttaaatatttcacaaataccataacttccaggaattcacatattctttattgaatgtagaattgtgaaatctttaagaaataactgaatcattatttcttcactgtctcctgcctgtgaaagcagaactatgaaatagctcaagggaatcagtgagagatttgtatccattatattcagtagcctgcatgtgtccaaatcacaaatgaaatgatgtgggcaaatataaattaaaattgaatgttgcagaagtggttgaggaacttcaccaggatacattaatgtacaaactgaaaactgatgaaaggtaagagtttggtcctatgtggtgtaaaggataggagcagttttgtggacatttcttcattcttctctttctgcttttccagacttctgaagagagatttgctaggaaaaataaaaagatatataaatttcagtgatgctgaaggtatgtgcaaacaaattgtcctcattaatagtaaaggtataaattgatgtggattttctagaagacaatttaaaggtacacacttggtttctaaaaagtacactttttaaaatctatctttttaatcccaatttatttacaatttattataagaaagtatttaggtaattatgcaaagatgtatgtaaagtaagttcactaattgttctcagtacaaaaaaaaggatgaaattccataaacatctattaagaaagacctggttaaataatgtattgtacctccatatgtttagtcattaaaaatggtcacttaaatctctagtgtattgacatcaaataatgtcaacaataaatttaaaaagcataactctctagtgtattgacatcaaataatgtcaacaataaatttaaaaagcataaatctctagggtattgacatcaaataatgtcaacaataaatttaaaaagcataaatatatagaaaaatatccctatctctatataaagaatgtctacatacccacttatgaatacatggaaacatatctgcaaggatatagtctaaaaccttatcggtagtgtttcttcgcagtagtgtgaaagaaatacagtagaaacatttaactccttccagtaatgggaaggagaggaagagctcacaaaaacagaaagcatatatttttgacattttgatattttaaatgtaatctcttttcttcatttttctggctacatatgttgattcaacacatattagtaagcaggatgtaatattcaataaaaacttctgtaattgtctgcattagttccaatttattcatatagaaactattcattttacatatctctttctattaaactaacatttagcatgtaaggcacagttttatttttgaaattattaataaattaaaatgttagtgacaaacataaactcttgagctttacaataggttaatgataaagaagacagccaatattagatggagaaaagcttcataaaacccacaggttagagaaaaattgttaggcatttaataaatgatagatcctttatattttgctgcacaaaaaccaaagatgaaaccttttttaaatgcatggtctcagcatgcatttcaaatcacatttttgaagtttatgaatttatgattatataggggaagaaaaaattctttgtttctccacccatcttagatctattggctggagctctgcaatttagactgacaaaagacggattaaacaagataaaaacaagtttattaacataggcacaatgcataagaatgggaactgtcactaatgtataactcaaatgagtggttagaccttagagttatataacaatctgaacaaggaataataaatatgttgagaagtgtcaggacaaaggaaaggaactttgggcttctaggggcagcaaattgtgggaaggtaaatttttgggaaaagttaatggaagatgttgggcacggtgtctcacgtctgtaatcccagcacttcgggagaccgaggcgagtggatcacccgtggtcaggagttcaagaccactccagccaacatggtgaaagcctgtgtctactaaaaacacaaaatattagctgggcatggtgggatgcacctgtatacccgctactccggaggatgaggcgggagaattgcttgaacctgggaggcacaggttgcagtgagccaagatcatcaagatcatgccactgcactccagcctgggtgacagagtgagactctgtctcaaaaaaaaaaaaaaaaagaaagaaagagagagagagagagagaaagaaagaaagaaaagaaagaagaaagaaagaaaagaaaagttaatggaggatgaggtctagttagtaggtttgttttatatactatgtagattcctctctggtgccttccttgggctggtagactttatagctgtttctggtgatatagaatcatcctgcccttcctgatagagggggaggataacagagagtttttctcgtgtcttcttgtgttttgttttgttttgttttgttttgttttgttttgtttaattgcctttgactcaaaatagtccttaggccagagtgacatattttggggtgacatcctctgaaccttttcaaatataaggtctgcctccttctttctacttcataacataaagtcttctttctcttccatgaatattacaattcctgcctgagtcttacaaggccctcctcttccctgtaggtcaggacacaattggtcctttgaattgaggtgtggtagtagccaagctttcaggagtgaggtttccacctttcatcttgtttctaaaagtaaatatctagtaaatgataaagctgtgtttttagttgtaagtctatggtgattgtatagcacagaatgattctaatgtattattttagcaatgaagacaagcagatttgatgcagaaatccttgacataaggagccaaaatatttatgttgcccttaggggatagatattaaatatatctacccatactaaactttttttttttaagagatggagttttgctgtgttgcccaggctggccttgaactcctggactcctcaagcaatcctcctgcctcagcctcctgagtagctgggattacaggtacatgtcactatgcccaactttcccaaattaagctttaacaaatcttctcaataatgttttcctaaattattcttgaatacagtcatgtagaacatataacaattatgaagttttaaaagtctttataattcaggaaattttgaattaataaaaacaaaggaaactttttgttttttgagacagagtctcattcggtctcccaggctggagtgcagtggcatgatctcgggttcaagggattctcctgcctcagtctcccgagtaactgggattacaggtgcttgccaggaaataaaggcaataaaaggtcattgctaattatctgctctaggtttaaaaagttcatctaaacttttcaagtatctttttttccctgaagcctacattttgttattactttagttggaaaacgactgcagtcaatgactcctcattccctcaccattctgacatgcactccagcatctctttgccattatttcagcaaagatagatataatatgctatagaagaaaaagagtagcaaccttaacttaagagttgagttcctattgtaaaataaagacattactgagactgggtttcaaacaaatatatttttaagctccactcctgtggatttttttgttttgttttgttttgtttttgtcttggtctctttgttgatcctgtcagccaatggtttctcacttgcctgtcagagctgaagagtccattccttgtcaattcagatgcgaagtggaacaaacgtcctttagtaacaaaacgaatccgaaatgaaaaaggatatgttactgctgactgtggtggttgtcaataaagatgttttcatagcaactattccttcaaaatacaatgaacatctgcaatagtcttttacccaaatgacaaattcctttcctactaaatcatgtctttacaaaattagaaggctctattttaaaccttgaattacttgacattgaaggtaatgctaattacaataaaatctcccacttacataattattaattcaaatttgcacctttttcctgaattttacctgcttagaaatccttatggtgctaatgatgaacataacgattaagaattttgttgctgaaatctctctatgcctcagtttaaccatgttaaaaattgataagataatacttaattgatagaaactgtgataataaaataacaccacaaatgtgattacaacagaacatggcaaaataaatgctagctaaatttttaaatcatggtttaaagatataatttgtgttactttaattaaataattgataaatagatttcttgccttgacattaaccttgagtattcatatttctgcaagtaggagaggaaggatgtgatgtctttccccatccgtcataagggtcatggccaacactcctataacaaaaggtaggctaacgagaaaaaagcatgacaaatatttaatcatgcttttacgtgacagagaagccttctgaaagaaggctcaaagaaccagggaaaactatccatctttatgcttagattcaatggagtggacagttgtgtagaaatgtgatcggacaaaggaagaattatctaatagtaatggactgcgtgtggaaacccataagaactgtctattctgattcttcttggcctctctgtgtggcatttcttcctcctgggtatggggcatgactccttctggaattagggtttgatgacctactatcaaataaggggaggtcagagaatgtctttatggccagctcctagatagaaaggcaggacaaggttagactaatcattctagcttttatttttggctttgaggaaaagcagatatggtttgtatgacccaccttagggaagaggaattccagtttttatggttcaccttgagggagaatgaggggcaaaagacatctgaatccttcacttcagggtatcattttctgaggctcaatatggacaagtatttataactaggtgcttaatatggccttttgagatacacagttcctatgctgcaatctcacaggcaatgaatggtctttataaaagtgtgttaaagttgaaaaaaaagcaacaaaacaaacaaaaacctgaagaaatattcctcattgaaggtccagcttacattaaaaagaaaactataataatttattctcttgagaagggttgtatagcaaaggaaaattcttgaatgttccctctgcttgccccatgcatcaattctattgatattaaagtaggcctagcaaatgtacttccattctcactgactcagtctttgtaattcaacaccaattctgaaaaatacttagaaattatttcagtaaacagctcttataagtgctacatgcataacaatatttcaatatcagagacttctatcccatgagaagatattttcaacctaaaatttattataaatgacctaacaaagaactattttttcagtaattggctattatggttcaatctgttatacccactttacactagaaactatcctatattttcttgttgcctacgtaaaagtgggcacgaaaaggttaaacagtaaacttcctgactcctgccagccaagggaagactactggtgttacctacgaagtgtcatggcattctcatttctgaataatgagggaaatctgctttcaatacaaacccccataagacagtcactcttccagacaaattaagctaaataatccatcatgacagctgagaagacaatgtgcaaaatgtcagtggaggccagggagagaaaggcagagatggactgtaagagctgcagcatgatgcaaatactgagaaaagacattctctgttaatacagctcttaattgtaggcattttttacagaacatattgagagtgaagcaaagcttccttagcagtactctgatgtcttctcagcaggataatgtagggtaattcacagtgaaggcaaggggttaggaaagtcacagccctaaaaatcaatgggctgcttacagggaagaaggtgcaacagatcttggagagcacagaaaagaagagatgagcagcctgtattgaacagaaaccaaaatattagttagatatatccagcaaagccattccacaagttcgttagtgagtaggtgccaaaagccaactgtaaatcctagatacttgtacatatgcatgcttatattacttatattttaagcagtcatatcctcaagctatattatgagttcagtcattctaaaaagatgcttccattgtcttcttggcacttactcagaatcttcagttatcttattcatactgtgtgcttactggttgtcttaacaggtgagggcaggggccctgtcttattcacctccatatctccaggatatagaatagtgcttggcacacagcaggaactcaataaatattcatactattttgagtcccttaatcctcatatcaactacaggatttagattttattgttatctccattttacagatgaggaaaatgaggaacagagaaattaagtaatttgcccaagctatgcatgaataagtggcagagtcaggatttgaagccaggcagtcaatccctagaatttacactccaacaactactgcctctagtggttatgtatgtatttatacacgtatatatttgcagaaataattgaaacttatttctgcctaggtgcatgatatattaaagcatcactaaatccttctgaatataattcaaacttcttcctaccatagacaaagtaatggcctatagtgaacataatgattatcccatcatacaccttgtactgtattagttttctttgcaatctcaattacacttgcatttttattatcatggttttataaaactttatgactggaaagtaccgtattcataaagagttgtgcctcatatatgttagacatatatgcatttttattagtaattataacttttatgcagccagatagccccaggtttatgattccacatcttttgtgttgtgtcatcttttgtagctagttgatattgtaatgtttgctgacttaattcattcagttattaatttctataaactagaatttaggggacatttcaatggactatggagagaaaataactgaaaattggaaattaagagcatctgagaaaattcaagttgtttgtacatcctggacataaatctcaggaaaactgacatattttccttccttgtcaagtcatacaaccaatgctatcactaaaactggtctaacatttaaacattcagacaatcagtttagtcaatgcttcaataagtttactgaactagcagtttcttaccaactagttacagaacagtcacagctgaaaatgatctatacattgtattataaatgggattaattattctgccagacaaccccaggtgtgccaaataacccaaccccttcctccaagacactcattgagaaactagacagcatctgagcattgtaggaacaaacactgaagtaaatggattctaaatccctttgagttctaaaatgctgtagagatctgagaagcccacaaccttataacagcaggcaacatagattacgcttaaaaagcaacatactttcaattgattgataaacccttttgttgttcatttattgcaaataggttttagagctcaattcacacttttgtgaataaacattgaaaatatttgattcaatggttatatttctgcctgacatgaggaaattatagaatctattaaccttaacaatttaattagcatgtcccagacttaatcactcactatctgggtagaattggcccaattagttaaccactctaaaccacagtttcctcatctgtaaaatgggatggaaaataataacaactcatagggttgttaagaggaatacataaattattcatgtgccctgtatggcacacaataagtccttattaaatgaaccggttgtagaactgtattaagaacaagtagtagtagcttccatatttagagagccatcaattctgttttccaacagctccattagtgagaattgtgctgtgtgttttccccccaccccgccccactacaactgcattgctatatgcaaggatataacttctgtctctaaaactattcaaatagtgagcctgggaaaaacaaacttaggtcaaaagagtttgactaaactggctgagaacatttaagttggataaaaatagatgtattttgtttgtataaatagattttggtcatgagaaagaaataaagaggttcctctcaaaagaaagcctggtttagcagtcagtaaacattgggaagagtcagcagttgacttccccactgtgtggaagaaactgccaaaagcccatccagaattaggtgtgtgggagggaagaacaaaggagaggcaaacaagaagctgtcactattcaccactttcaccttgaataacctttaattgaaaaataaagttgccaaaacaaggagtaaaagaaaaactaccattttattccctccttgagattgaattagagggaaacatactgaccacagtaatcccaaggttggactcacatgatggcaaatgtcacttagttctaaagctctaattagaaacagggctgaagttttagccagctcctgctactagaaataaaacatgaggcaacagcaacccaagccctggacaccccctgacagtgaactctgaggtgctttctgagtgagttgagtataaagctgacagagcctagagaattcatacttgagcaaatattgggaaagaataaactgggtcagttaccacctgtttctagattttatttttttctagacttcaactaagattgtctttcacattaataagaagaacgatgaacataatctatttcatccaacttctacattccaggcacagtatcaaccactttattacattttatcttctgtaatattcacagtgttattgggtagattaaacaacttgcccaagttcacacaactggtgactggcagaaatgggatttgaacttatttgatgccagaggaggtgtatcctttaatattttagaataacttatttatttcattatattttatgaaccttgaaatatgtttattgtaaaaaaaaaacgcagaaaatacagacaggctaagtaaaatgtgtctttacattaaagtatttaatttgcaaaagaacagttgttattttaaaatcctaccccacagtttttcatatttctctttctatgtagggttaatctcatcaggaatttctcttatccatccacagtttgtaggacaattctttgcacataatgggcactcaaatgtacgcagatcatattagtccaagaaaaagctgcttgttggggctaccaagccagcatggtaacaccttacaatcaccctttctacctgcagtcacattgttcccagagtggggtggtgatacttgccagctagcccaagtttctggatatagacctttaacaacttcacaagtacccttagaaaattcggttaagaccgaacatggacatgcttgctccatttttttccactctcaaaatatccttgagcagtaactcattcatagataagaaaaactttttctcttcagttttttcttttctttttgaatattctttgattttagcagaaataggcacagtaaaagaataaatataagagacgaagaataaaatttatgaaatttagaaagctcatgttagagaattgtactctttaggtagatccttatttaaagaataattagaggaaagaaaacaaaagatgaaagagtacaaatgagattcctgagcagttttttattttgattgataaacttttaaaatgtgtttgaattacaatatttatatatcaggaatatgaaaggtttaatcataaaaattacataatatttcttccaacattttcatcttgtccatttcttcatatctatagtggagaattatccctctgtaggcaagaagaagtctttattctcttcggaagctgctcctcttgcactccaaaatatagttctgatggaagctgccaatcactttatcccattcccagaacaggcatggtaccagactgaggtcaatcctatactccaccttatttgccatggaaaatagcctagcgatacttgcatgactcagggcagttggagtagtttgatggaattttttaaaccacagctgacaggaagtagctctgttccttattagttgcaaatgctgcaagcatatgaccctagagttatctgttgccagttgttgccttgtggagatcataggcttaagatgatgaaggcagcaatcagcaataagcagaggtgtgcttgtgtgtgtgtgtgtgtgtgtgtgtgtgtgtgtgtcagaatgagagagagagaaaaattactgcttctgaaaccaaatccatttccaaggtgtggttttagaagcaaataaattgccaatttcagagctgattcaagttgaatttttgtcctgtaaccaaaagagtcctgactaacagccaaaactcaggctgtcaagtaaacataatctgtaagaatccgctttccagcctccattccccttgacatcttcctgaaagaagatttgtataggaaatgctgacgtctctttggcaactgcataaaaattattgtattcaacaaatttattatatgtctctttgtggccaggcagcttgcttggcactggaaattggctagggagattggggcaagaaaaatacctctctccatggtggaggcatacataaaagccgattgctacacaactgcgtaagaagtgctttaatcaaagcctgaataaagtgttgtggaaactcaaaggagcaagcaaaatgcttcacatgaaagttggacattcgagtcaaagactcacaggattttcccaagcagaaaagaaaggagaggacatcatggacagaggaaatagcatggtgcaaaggcatggtatgaaaaaaatacacgacaaatttgtggaataacagaacttttgatgtgatcacagcataatgtggagttgggtaacagtgagggattaggctaaccagcttggcagaatactgactaaaaattcttaaatgctgtgctaagttgttagaattttatcttacaggttttgagaagccatctgcagctcacaactagatgagtgacacaatcagatgtgcgtatgcaagtaggtaatgaacatccatgtaaccatcaccctgagtcaataactatcccttcatgggtgaagttgggcaacttttcatatggttaacaacaattggccaggcacggtggctcacacctgtaatcctaacactttgggaggccgaggtcggtggatcatttgaggtcaggagttcgaaaccagcctggccaacatggggaaaccctgtctctactaaaactacaaaaaaaaaaaaaattagctgggcatagtagcaaatgcctgtaatcccagctactcaggaggctgaggcaggagaattgcttgaacccaggaggaggcagaggttgcagtgagccgagactgcaccactgccctccagcttgggtgacagagcaagactccatctcaaaaaaaaaaaaatccttttttttattatcatcaattttctgcagaccagtccattctactatagaattcctggcatttttcttctcaatctttaaaactttttatgttttatgaatatctttgtattgggtattagtattactaacttttctggtatagtttgcaagatatttgttcccatgctatgatttgtatttatttctttgcttatgttatatttttacagtgaaaaattttaaaaattatataacaaaatatatgttatttctcttgtgtcttctagattttgagtcatattaagcaatgtttccccattttcagaatatagaagaattcataactgctttttaaaaatacatgtacagttcctttttaaagccttgatttaaatatctgatccattgggaatttatcctggattatggtgtaagaaatggatccaattttatctttctccatatggctatccagttatctcagcaatgtttatttaactgtccatcttctacccagcaatttgagatgctacctataaagcatactaaatggtcacatgtgattgtatcttgtttctgaactttctaccttttcattagtttgtctgcctattcatgtgctaatatcaaactgtttaaataataaagtttttaatagtactttctaaagaaatctgatatagtttttccttccagctgttgtcctgaacattgcttttcttttttagagtttatctggttattcttacttgtttttaaattcctaatgaactttataatcaatttgtttaactctagaaaaaagcctggagacattgaactaagatcaaatttaatgtattaaatatggtagaaagaagagagaatgaaaaataatgttaacaatctaggtgaggaattgctgaggagacaaattaagtaaatcctgtggaaggaaagaagaaaggaggaaagaggattggatggaagaatctccacttctcagtgtagtccttccttagcctgctttttaatgagtgctgctaaagcccttagcctgcctgtttacccttggagtggagcaatgaactgaagatatttgagtgagttcaagagagactcagaagagaagaattggaggcagcaaacatagacagcacttttaatgcttttctcatatgctgtaagacatgaaagcaatctattgggatgaaagctgaaaggagaagcgggacaagagaagaagagaagcaagaaaccaaatactgggggatatattgcacaagtataacttcaagaaacccaagccagtgcaaacaattcaaaaaataatggaacccgaagacagc

SEQ ID NO: 2501 - DNA, 3810 bp, Homo sapiens
ggcccagcagggtcttggctggcggccccattagccacggcccaggaccccagggtgggagagtgaacggaaaggtactcgtgcctggagcggttgcaacatcctctgtaatgaggaagatacagctcagaggcactgggtcgaaggacccctctccccagccctcctttcaggtgtcggggcctaaagggggtccagttccagtgcggaaggctgggaactaggaagcgtcgcggaccagacagcccgccttcccggtctcccgggtgggggttcggggggcgtggtgcggcggccggggctgagaggggtcggtgcggcggctctgcctccccgggaagtgggaaccggccaagtcccgagcggggaggggcaggctttctcctgcccgcgcctggggggaccctacgcctgtgtccgaaggaggccggcgtccagcagatgctcccggggcgggtggggagtgggggaagggggcgggagagaggcggggaggagaaaacccacaacaaaacttgcgtcgcggagagcgcccagcttgacttgaatggaaggagcccgagcccgcggagcgcagctgagactgggggagcgcgttcggcctgtggggcgccgctcggcgccggggcgcagcagggaaggggaagctgtggtctgccctgctccacgaggcgccactggtgtgaaccgggagagcccctgggtggtcccgtcccctatccctcctttatatagaaaccttccacactgggaaggcagcggcgaggcaggagggctcatggtgagcaaggaggccggctgatctgcaggcgcacagcattccgagtttacagatttttacagataccaaatggaaggcgaggaggcagaacagcctgcctggtatgtgcacaggatatgtgagaccagagctccttcccctggattcttctccttggccttctgccctgattgaatttgggacctgggcctgtgcccacactctcgctcttagaaccccggactacagtggggtcagatgggcaagtggctaatggctgttgagctggccgtggagtttatgatgtgctatgggaatgatggtctgtagactgatgttgggtcaggggcaggggcagcaggggtgtggtggagtgagcgtagggctgggctgctgtgggagccagttgctgctgccgactgatccctggagcctggaagctgcaggtgtgccgggctccctgtttctctgccgggccagtggctgagacctgagtctccatcaaccatgtggatctgtagggtcaagcaagcctggctgccacccctcctgtctcctctagggcctcctactccttgggaccccttttacgctgccccctcacccccagtctgggtgggcagtggttattggtaccggggtctgttgtcccctccagatggaggacagggatcttttccacctcacctgtgtccccagtgcccagtacaggcccaggcacaaataggcccttacttcagagaactgggtgaaccaccaagtgagacaaagtggtatctgaactcccacagccaccacagggcagcaggaactcagaggcggctacgatgtctgcaacatcttctgggaggaggtgggcctgggattgggtcagaaagcccaaacgaaggtccaggccaagtgactcatgcctgtaatctcagcactttgggaggcaaagatgtgaggatcacttgaggtcaggagtttgagaccacccgggcaacatagagagaccccatctttacacaaaatttaaaaatttggctggcacggttgtgaccccctatagtcccagttgcttgagaggctgaggctggaggatcacttcagccccggagctcaaggttacagtgagctatgattgcaccactgcactccagcctgggtgacagagtgaggccttgtcttaaaaaaaaaaaaaaaaaaaagcccagcaagatctacaagatctagacaagggaaggaaaaggagcagcagcagaggattctggagtgagcagtggtgtggcaggggtgcagaccatgcccatggaacagacaattagtggcaggaaaagctaacgtttactgagcacttactatgtgcagtacatgcatttcactgacccctctcagtcttcccataaggacagtgctgttatcatccccaaggatgggggagaaagctgaggtttagatgattgtagtcacataagagccagagctgaggccagagccaaggttgcagctcaggccgctagctccagtcattaacatcattgtcaagctccccagtttacaaaaccctcctaggaccagggtcttgccagacccttctagctgctttatggtcatggtttctgatctggtgatggggagagaggctcagcctgagccagtgcttgtggccactcagctcaggagtgaatgtcccccgtgctggaggcatccacagcaggtccttgccgctgtccctgctgctcacttagtgcagcatgttgctgtgtgtcattgctgcagtggtgacagcagctcatcacctaattgcatcaccttatcacctcatcacctaaaagccaggtgctttgcatcttatcttactccacagaagctgtgtgtttagatgtattatctgcattgtacagacaacgaaactgaggctcagcaaggtcagaggtgggactcaaactgggatttgtgggacctgagagtcagtgaacctgagctaccagcatgtcttatcagagcccagagatgtctgagtccctgtaaacagaaaccaggaacccaccaagagccaagcctacgccacgggactgctgggacaatggcatctttcagcatcttcctctatgggcctgagatcatcccctgtaccccatccttgctggacccggggccatgccagggagtggtctctggcaggtggcagtggtcactgagcacatcaggccctggtgagggcagctgaggggatacacatcaggaatgggaggccatgagggcagcagcagctgtagtcgctgatcctttctctgtgctgggctctgggcttgacctatacccagacacagagagttgctcacagctctctgtgggaagaagatacctttgctattcaaaacccaacccaactaatgctaagctctgggtgaacacagtcatggggagccctggggcatctcagtgtcccgctgctccccctcttcccatgttcatagcactggaattggttcccagaaaagaaaatgctgattgcacaagacagaggaagggcactctaggcagaaggaacagcatgtgcaaaggcctggagggaggagctattcaatagtcctgtagaactgggggcagttgaggggacagttggaagagagtcaggaccaagtcaggaaggcctgagaatggcgagctggagagccgggacgcaccctgccagtgctggctcaccatggcctgtggctgctggaggaggcagggggtcttcccacaccgccagtgccaggatagcaagggttcagcacagtccaggtcgtgtctcagcttccccttctaggaaataggggtacagactccttagggccaagcctgctgaatgaaggctgcagaaggttttgcagacctgccagaggacagggctttacctcgtcccccgcctctggagggcagcctggtgggggttgggcaggtgcggagggcagcagtcagtcatcggctgggctctgaggacagtccagagtgggccctgctttgtgctcgggagggccccgtcatgactttcgagggccccagctgtgtccactgtacct

SEQ ID NO: 2502 - DNA, 3942 bp, Homo sapiens
gtcctgttaccccacccatacctgtctgctgcgcactctgtgcttctgtagcattctcgcttctggcctttaaagttggcaaggggaggttaataagcacctaggtggctgagtgtctctgtcttctggcttgttcacaggacttcgagtaagaaggtgatttacagccagcctagtgcccgaagtgaaggagaattcaaacagacctcgtcattcctggtgtgagcctggtcggctcaccgcctatcatctgcatttgccttactcaggtgctaccggactctggcccctgatgtctgtagtttcacaggatgccttatttgtcttctacaccccacagggccccctacttcttcggatgtgtttttaataatgtcagctatgtgccccatcctccttcatgccctccctccctttcctaccactgctgagtggcctggaacttgtttaaagtgtttattccccatttctttgagggatcaggaaggaatcctgggtatgccattgacttcccttctaagtagacagcaaaaatggcgggggtcgcaggaatctgcactcaactgcccacctggctggcagggatctttgaataggtatcttgagcttggttctgggctctttccttgtgtactgacgaccagggccagctgttctagagcgggaattagaggctagagcggctgaaatggttgtttggtgatgacactggggtccttccatctctggggcccactctcttctgtcttcccatgggaagtgccactgggatccctctgccctgtcctcctgaatacaagctgactgacattgactgtgtctgtggaaaatgggagctcttgttgtggagagcatagtaaattttcagagaacttgaagccaaaaggatttaaaaccgctgctctaaagaaaagaaaactggaggctgggcgcagtggctcacgcctataatcccagaggctgaggcaggcggatcacctgaggtcaggagttcaagatcagcctgaccaacatggagaaaccctactaaaaatacaaagttagccaggcatagtggtgcatgcctgtaatcccagctgctcaggagcctggcaacaagagcaaaactccagctcaaaaaaaaaaagaaagaaaagaaagctggagctggtggcttaggccatcacccttcccttggctggaactactggacagacccttttgagatgtgcctgtggtgctgtggagatgtgtgtagtggtcttagctctttgttgagcttgtgtgtgtgttgtgtagtcttagctgtatgctgaaattgggcgtgtgttggagggcttcttagctctttggtgagattgtatttctatgtgtttgtatcagctgaatgttgctggaaataaaaccttggtttgtcaaggctcttttttgtgggaagtaagtaggggaaaaggtctttgagggttcctaggctcctttgtacaacaggaaaatgcctcaaagccttgcttcccagcaacctggggctggttcccagtgcctggtcctgccccttcctggttcttatctcaaggcagagcttctgaatttcaggccttcattccagagccctcttgtggccaggccttcctttgctggaggaaggtacacagggtgaagctgatgctgtacttgggggatctccttggcctgttccaccaagtgagagaaggtacttactcttgtacctcctgttcagccaggtgcattaacagacctccctacagctgtaggaactactgtcccagagctgaggcaaggggatttctcaggtcatttggagaacaagtgctttagtagtagtttaaagtagtaactgctactgtatttagtggggtggaattcagaagaaatttgaagaccagatcatgggtggtctgcatgtgaatgaacaggaatgagccggacagcctggctgtcattgctttcttcctccccatttggacccttctctgcccttacatttttgtttctccatctaccaccatccaccagtctatttattaacttagcaagaggacaagtaaagggccctcttggcttgattttgcttctttctttctgtggaggatatactaagtgcgactttgccctatcctatttggaaatccctaacagaattgagttttctattaaggatccaaaaagaaaaacaaaatgctaatgaagccatcagtcaagggtcacatgccaataaacaataaattttccagaagaaatgaaatccaactagacaaataaagtagagcttatgaaatggttcagtaaagatgagtttgttgttttttgttttgttttgttttgtttttttaaagacggagtctcgctctgtcacccaggctggagtgcagtggtatgatcttggctcactgtaacctccgcctcccgggttcaagccattctcctgcctcagtctcctgagtagctgggattacgggtgcgtgccaccatgcctggctaatttttgtgtttttagtagagacagggtttcaccatgttggtcgggctggtctcaaactcctgacctcttgatccgcctgccttggcctcccaaagtgatgggattacagatgtgagccaccgtgcctagccaaggatgagatttttaaagtatgtttcagttctgtgtcatggttggaagacagagtaggaaggatatggaaaaggtcatggggaagcagaggtgattcatggctctgtgaatttgaggtgaatggttccttattgtctaggccacttgtgaagaatatgagtcagttattgccagccttggaatttacttctctagcttacaatggaccttttgaactggaaaacaccttgtctgcattcactttaaaatgtcaaaactaatttttataataaatgtttattttcacattgagtttgtttaaatcctgaagttcttaccttaagagaattgggactcctagagtgattggacattcaaaatattcctgatagtcttgttaattaagagattaggatatctttccattaccttgataattacgttttaatttagcttttttcattggcctgtgtttaaatgcaaataaccccacaatggacatttcctatgttaaagtgacatttaggggataaaaaatgagagcagttccatggattttggtgtttcccctgagacatgaactcagcataatctgggataaaatgattgagtgttaaggatgtgtttgttgttcctgtcgtttttttattttcttcaaagtatacaacatggtttgatatgcacatacatttgtgtaatgattgccatggtcaattaacacatcaccatttttgtgtgtgtgtgtgtgtgtgtgtgtgagggagtcttgctccgttgccaggctggagtgcaatggtacaaccttggctcactgcaacctccacctcctgggttcaagcaattctcttgcctcagcctcctaagtagctgggactataggcgtgtgccaccatgcccagctaatttttgtatttttagtagagacggggtttcaccatgttggccaggatgatctcgatcccttgacctcatgatccgcccacctcggcctcccaaagtgctgggattacaggcgtgagtcactgcacccggccacatcacctcccatgttctatcttacgtattcagaacttgttcatcttgtaactgaaagcgtgtaccctttgaccaacactgtttttcctgtcttaacaggatctacagatcaaggacaggggaggggatagtggaggaaaacggagttagtctgtttctaaatgaggggacagtatgtttcttggggcctgaggacagcttaataaagtagacaaatgaagaaaaacaacaatttgcattaaaaaatatccaattctttagcttttccagcttattaccccttctctggtactagctatgaaaatctgatatgaaac

SEQ ID NO: 2503 - DNA, 2229 bp, Homo sapiens
ctttcaggagtggggatggatttgcatcttccctttggcaggttgtaaagtggagtccatattcctgaacgtggctgctgtgaacacgcaccgggacaggcctcagaacgtggacatctcaagacctccagaggaagcccttgtcacggtgcctgctcaccagtgaccatgttcatccactgtgaccactaggcaggcactgctctctgcagagggggtcattccaggccctccagtgtgtgtgatagtcaccatgccatgcagggatattcttgaagccacacatggctggcggaacccagagcccccaccccagcccacctggctctttgttgacagtcggcgacaaggttgtgcgtggctcctgacctgctgctaagagtcacttgaccagactgcatctgcatgggctgcgcggaggttgcccagccccagtttcttccggcgcagctcttaggtgttcactctcgccagctcagttggctttgtgaagtgtgaaaccctacaatgtgaaaggaaagtgcttgctgtgatgttcctactgtggcccagctgcccagcatggacctggtgactctccacagggcctctaccatcctctctgtggccacttcctgagccagaggccaggtcttcatggggccctgagcttctgctgcctctggtgagagggagagcccttcccatccttacccaccaggaactagagccccaaccacagcagatgcttcctgggcagccactggccaggccgttgtatccatgtcacccttagttgtgggcattcatgaaagcaatgcgcttgcttcagcacattgggatgcacagaaacgtgagggcaggggggcagttgtggtcgcccctccccagttgtgcatgtacccggctacttaggtatgcttaggggagctggtggccaggggtgccccttcaggcctgctctcacagtgaaaccacttcaagacagggcaggaagttaccttcctggtgcacacaccgaagtgctcgagggagaggctgccgccccctctccccttccctggctgtggacactggcagccaatggggaggcggcctctcccctgttgctgcccgtgtccacacaggaatgtacactggtggcagaaacatgcatttgccataaataattcagaaacacttgtatggtcctgtaaaacttctctggtgtttgttgacttctgcctgtgggtctgaggaagggagaaggcagaacccataggcagtccctgggcaagggaggattttcccggccgcagcacagccttccattcatgtgcacgtgagtctggtgaaaatggccttgtgaagtccagtgtctgtcatgcccctgagttcttttggtcccagagaggcagcctgggcagtctgtttacagctggcaaacagactggctggcaagttgtggggctgggtcagaaagtgtctggacttgtaatcgggtgccctgctgtccacaggtggactctggggaagccaggcccctggatcccaagtcctttgtgtccggagcctttcctggcctgtgcctggagggtagcacatctttccagcctcccagggctttgcagcctgcagatgccacctgtccctgagagaagttagcgtccctggccctggccggtggtctctcatccttgtgtgctgctctgctaagagatgtccaaggcggagccggggcaagatccttccagactcatctgtcagagccccaagccctttagacccagagcccaaggaccatgcctttgggacattaggactgcagcctttgcttctgtgtattttggagttttggtgacttttgtcacctggacacactcatttgttagccatagtgggttcccttggtcagcaacagtgcatgtacctctggatgtcatctgaggtgagaccaccgaggccttttctctctgtgtacagaggggagttaggagttgctggactggatgcattacgaggactggggacagggtagagggacatccagggatcagggcatgagtgggggcaaccccccggcctctgccctggcatggtctccgcatgggctgaggtgtagctgattggctgccacatttcggccatgctggctggcgtgcccatgttgcagatattttcccgagttccccagaatggatggtattgaatctcagccacatgcaacactgtgtccagcattctttgcaataaatactttttaaaaaataa

SEQ ID NO: 2504 - DNA, 26315 bp, Homo sapiens
gatgggtttcctgaatacagcacactgatgggtcttgactctttatccaatttgccagtctctgtcttttaattggagcatttagtccgtttacatttaaaattaatatttttatgtgtgaatttgatcctgtcattatgatgttagctggttattttgctcgttagttgatgcagtgtctttgtagcttcgacagtctttacaatttggtgtgattttgcagtggctgataccggtttttcctttccatgtttagtgcttccttcaggagctcttttagggcaggcctggtggtgacaaaatctctcagcatttgcttgtctgtaaagtgttttatttctccttcacttatgaagcttagtttgggtggatatgaaattctgggttgaaaattcttttctttaagaatgttgaatattggctcccactctcttctggcttgtagagtttctgctgacaggtccgctgttagtctgatgggcttccctttgtggctaatctgacctttctctctggctgtccttaacattttttccttcatttcaattttggtgaatctgacaattatgtgtcttggagttgctctttttgaggagtatctttgtggcgttctctgtatttcctgaatctgaatgttggcctgccttacttgattggggaagttctcctggataatatcctgcagagtgttttccaacttggttccattctccccgtcactttcaggtacaccaatcagacgtagatttggccttttcacatagtcccatatttcttggaggcttttttcatttctttttattcttttttctctaaacttcccttctcgcttcatttcattcatttcatcttccatcactgataccctttcttccagttgattgcattggttcctgaggcttctgcattcttcacgtagttctggagccttggctttcagctgcatcagctcctttaagcagttctctgtattggttattctagttgtacattcgtctaaatttttttcaaagtttttaacttctttgcctttggtttgaatttcctcctgtagctgagagtagtttgatcatctgaagccttcttctctcaactcctgaaagtcattctctgtccagctttgtttcattgctggtgaggaactgcgttcctttggaggaggagaggccctctgctttttagagtttccagtttttctgctctgttttttctgcatctttgtggttttatcttcttttggtctttgatgatggtgttgtacatatgggtttttggtgtgtatgtcctttctgcttgttagttttccttctaacaggcaggaccctcagctgcagatctgttggagttttctagaggttcactccagaccctttttgcctgggtatcagcagcgatggctgcagaacagctgatttttgtgaaccgcgaatgctactgtctgatcgttcttctggaaattttgtctcagaggagtacccggctgtgtgaggtgtcagtctgcccctactggggggtgcctcccagttaggctgcttggggttcaggggtcaggaacccacttgaggaggcagtctgcctgttctcagatctccagctgtgtgctgggagaaccactgctctcttcaaagctgtcagacagggatatttaagtctgcagaagttactgctgtctttttgtttgtctgtgccctgcccctagaggtggagtctacagaggcaggcaggcctccttgagctttggtgggctccacccagttggagcttcccatctgctttgtttacctaagcaagcctgggcaatggcaggcgcccctcccccagcctcgctgccaccttgcagtttgatctcagactgctgtgctagcaatcagcgaggctccatgggcgtaggaccctccgagccaggtgcaggatataatctgctggtgtgacatttttaagcctgttggaaaagcacagtattagagtgggagtgacccgactttccaggtgccatctgtcacccctttctttgacttggaaagggaagtccctgaccccttgtgcttcctgagtgaggcaatgcctcaccctgcttcagctcgcacatggtgtgctgaacccactgtcctgcgcccactgtctggcactctctagtgaggtgaactcagtacctcagatggaaatgcagaaatcacctgtcttctgcgtcactcatgctgggagctgtagtccagagctcttcctatttggccttctcagctgcccgcctcagctgtgtaaactttcaaacctgatccaaccaatgtttgggccctatgtaaaccagccacctgctcctgaagccagtgtgtaaaatccattgcgcttcactgcaggctggaagtcccactgagaggcactgctctttctcagaagagaagactattctcctttctctttcttttgcctattaaaccactgctcctaaaccatcttcttgtgtgtccatgcactgatttccttggcattagatgacgaacctcgggtctttaccccacacaggtgatgccacttcagtatgttaaaactcattaatttattagttaaaattgctttattaataaatatagcactttttttttttgagacggagtctcactctgtcacccaggctggagtgcagtgacgtgatctcagcttactgcaacctccacctccctggttcaagcgattctactgtctcggcctcctgagtagctgggagtacaggcgtgtgccgccacgtccggctaatgttttctatttttagtagagacagggtttcatcgtgttagccaggatggtcttgatctcctgaccttgtaatccacctgacttgacctcccaaagtgctgggattgcaggcgggagacaccacgcatggcaaaatatagcacattttaaagaccactgatgcacagtgcaaaaactgccatatatgaatatgacatcaaattatacttccagtaacagtgttaggaaaggtcttgttaccctacactaactatttatgaatagtttaatggaatatgctgttttaaaaaatattttccattttggtatgtgaaaaaatggcatctcattatttatttatttatttatttatttatttatttatttatttatttttgagatagagtctcgctctgttggccaggctggagtgcagtggcatgatcttggctcactgaaacctctgtctcccgggctcaagcaattctcctgtctcagcatccctagtagctgtgattataggtgtgtgccaccacgcctggccaatttttgtatttctagtagagacaggtttacatcattttggccagggtagtctcaaattcctgaccttggcctcccaaagtactgggattacaggtatgagccaccgcgcttggtgacatctcattattttaatatgaattttagtaactattaggtaacttgtttttatatatgtttagtgtactactttttgaattgcctagtcatggcttctgcttattttgctattaaattatttaactttttactgatttatataagcttttgctatccacattatagtaataagttgtctaaaattattttacatgtatcttcattcagctcccagagtccatcttcaatgcttttgatagaaaaggagttcctcccttctaaagatgtctactcttagtttaaatatgtaccaattagtaatacacaattagggaagtttaaacactgtctaattaaatttgatttggggaaaataaatgttctcacctttccatttttatttaaccatgtgtaagaaggcagcctatacattctggggtaaaaagtctctttttaaaaagagaaaatgtattctatcaaagagggtaccaaattccaagtttgcactgcactttgctgaacaccttgtattttttcaagcttaaactttctaaaaggttagcagtattctctgtgaaacacagagctgctcacattgcagccctgctccaaaacatttggtggttcataacagcctgcaaagctgagcccccatccatgtttctaaggccaacatctcttaacatcccaaatctatacgacactcccaaagtatattcttttgtcaaactccacttcttgtcctaccctgtccttaaataagcctcatatttttatacttcatgtcctgtacttaaactgcttttttgcctagatgtacatttttcttttcccacattcttcttctccacatggaaaacgtgcacatttgtgagtatcacctttactctctactgcaacttctcacttgccagttctccacttgttcttgctggttgtaaggcactgatgaattttagaactggaaccatattatatccatctttgcagttctagagcctggtatcaggtgtaggtgtcaagaaatggttcccaatggaagcttgctgatagtgatcttcaacagatgagacaagaaaggagccagaatgctgatttactaatccagattactttccactattgttttgctgaaactctccaatgtcatgagaaaaataacaatgataataataatactagtagcaaatacagaagataagtcagttaaaattgagctggtagcatgcataacttcaattctgtatttattactggtttcaaaatattccttatccacaaattggaagaaacaggaaacagaccctcaagtgtctttcacaatgcaagacctgccaatttcataacttgctcagccaccctcataaaagaaactaggcacactggtgaccccatctcacacacactcaaaggagacagaaggtcttcctctcactgtcctccagtacatgtggctcctccttcttaaaaagcaaaacaacaaagaaataatacctcccagagggtatgacacttgaacttggacaagtgtttttttttttgttgtttttttttaagatggaatctcgctctgttgcccaggctggagtgcagtggtgggatcttggctcactgcaaggttcgcccacgccaattctcctgccttagcctcccgagtagctgggactacaggcgcctgccataacgcctggctaattttttagtatttttagtagagaccaggtttcaccgtgttagccaggatggtctcgatctcctgacctcgtgatccacctgcctcagcctcccaaagtgctgggattacagacgtgagccactgtgcccggcctgatcttcaagtttttagattcgattagtaatcaagtcaattcaatttttgcccttacttggctcatatcacatattatggacctcttaggatcactctatgcaaattctgaggcaaaaccttgagtttccatattatgtaaaataacagtaacctgttatgaaacaacagtagagctgttcttaaggcattgaccctgcccaaagcacaacttaatttcccaaacagttatgagtttagtttcaaaatctcttcaaaaataggcttcatatgagtctttgaacagggctcagcactttcagtgaggttaaaagtgggtgtccacaaggaaggtttcaagagataagaaagccccccattaatcaccacacagaggactagcagaatcatagagtccatgcccaccctttttcacttctagaatatctcccaccatgtgaaaaaccacctctcttccacatgctatccttttcaatgagaacatggtaaacatttcatcctcagcaggatttgttcagggtttcactctactttcccactgggtctcagtctgccagctttctgctttagtgtctttttgaactccccctctttaagggcacagaaatcctcatcagtcagttcatctactaatatgacctctgcaagcccctcactctacaaaacaccattcctgaccatcacagaagggaaggtctaacttatgtggtcaaatattagctaaaatgtgttgttcaataggtaagctgtaatttaattctggaaaccagacccctgtcctggcacacttacactttttccttggtgtgccaatcttttcccttgatgtgcctaatagggaggactctgaacacaggaggttttcagttagtatttgtttggtgaatggatcatgtctctatggtaggtagtctggcatgggtcaggagcacagccctggagacaaacttaatagtttgagttctaatagctggctgcctctctgggtctttatatcctcatctgaatcctgaggataataattacatctacacctctctgtcgaagaattgtgatgaatgaaaaagatgatgcataaagaaaaattaggatgctggtagctagctctcagtaattgttagatctgatgacatttgctcctactgctatcaagctgagtgtgtttctatgtataaaagctaacaaccaacaagctgagtgtgtttctatgtataaaaactaacaaccaacaaagggtgaaaattaaagtaaaacttgattgttaacttgtcagactggagtcctatggattaacaggtctagcacaggtagaagagaaagaaatacttaacttctggtttatttgatttaatgcaaatacaggaaaacctggataagaaatgcttttcaccaaagtttgtctgcaacttgaatgctgtaggttaaactaatttaaaagtactctagacagattcatttgtaatataagcatgtcatagtttctggtgtttaggactggatttatgtttatttagttttctgaagagacacaagagacagcccaagctgctatcggaattcctagagacaagttgggcaaatgagcccttacaaaattccatttatggtaaagataataatgaaataaataattactgagaccagctccatcagcgagaccctaacccagcagtgctagaggaattaaagacacactcacagaaggtgtgaagtgggaaatcggggtctcacagccttcagagctgagagcctcgaacagagatttacccacatatttattaacagcaagccaatcattagcattgtttctatagatattagattaactaaaagtatcccttatgagaaatgaagggatgggtcaaaataaagagatgggttgggctacgtatctgcagcaggagcatgtccttaaggcacagattgctcatgctgttgtttgtgggttttttttttaagagacagaaaaattttattaatgagtatgcatacaaataaacctagacaaccatgaagagtccctcacagtttcatgtattcacaatattatttcatctctaaagccatcagtgaacgactagttctgctacttgttaaagttgtgcaaaaattctcaatttaaacatacagtcttaattataccagtgttctaatgtcccaagactgattgtaggtaatggaatctcaacaatatcttaaataataatttaaaaaactcaatatgatctacaagactaatatatttaaaggaaaataattcacattcactaaattcctcccctttcttccttcttccctattctccctttcacttgccaatttttttctacagtatatgatgatggccaaattacccaatatcaactgtttcaaaaaagaaatgttattttagaagataccatacagcaagagacttataggtgtaacaccactgaaattatttactaagccctggccgggcatggtggcttacacctgcaattccaatactttgggaggttgagcaggcagatcacttgaggtcaggagttcaagaccaccctgggcaacatggtggaaccctgtctctactaaaaatacaaaaattaagtggacatggtggctatcccagctactcaggaggctgaggcaggagaactgcttgagcccgggaggcggaggttgcagtgagccaagattgtgccactacattctagcctggatgacagaaccagactctgtctcaaaagaaaaaaaaattatttaccaagctgtgttttcatagtgttttttaattctctgaactgcttcagtatctgcagtgttttttttacatttcaaagacttcccacatgtaacatttcattggaattaccactttacatcatagttgatatggaaattattacatctaacagatgaagaaaatgtagacataaagaaccattcgctctaatgtcatccagtgtaactgctaagagttaggattagactcaagtcctattcctaatcctgtatactaccctaaactcctaagcccccatacattgtacttcacagaatgctactagtgactgtgctcatgcattcaaacaagttttggaaatgttgtgttaagcaaagctaaccagattcccagagtctttattatgcatcataaatccccaggaaagatccagagtatagagcaggtgccataaagttaaaagtcccacaagtttcaagcaggtaacaaaggtgagcatgcaagggaaagtaaggacttggggattagaggatgcatccccatctagtggaagcctggtcacatagcaatccagcccaatcttgctgggtctttccagagaagctataaatcttggctttaatttcaaatctccagttttgtgcgtattgcctcaaatttaagaaaaaaaggcactatagtttaaaacaaataaaatttttgaccagatcgggccagccacatttgggaaaactgaaataccatgtatcataatctcatttgcccacagaattttccttcaaaggacttatacatttcctagaatgataacggtgttaaaaaatgttgcctctggctgggcgcagtggctcatgcctgtaatcccaacacttttgggaggtcaaggcaggtggctttcctgaggtcaggagttggagaccagcctggccaacatggtgaaaccccatctccactaaaaataaaaaataagctgggtgtggtggtgggcatctgtaatcccagctactcaggaggctgaggcaggagaatcacttgaacccgggaggcggaggttgcagtgagccaagattgtgccattgcatttcagcctgacaagagcaaaactacatctcaaaaaaacagaaatgaaaacaaacgttttcctctgaaagcaagcatcctgttaccccagacaactatggtatgggtagctctgaacctcaaccatgaattatttcagagttttttcaaactgaaattgaaattaatgcccagccttaactgttcatgtagaaatatttcttttctgacaaatctagctcttgcaaatctatgcttagtagagacggggtttctccatgttggtcaggctgttctcaaactcctgacctctagtgatccacccgcctcagccttccaaagtgctgggattagagcataagccaccatgcctggctggcaaatatatacttctaaacaattatgctgctttagtataattgttttttatatatttttgtactgattaaagatatccttacaataagtctaattgaattataaaaaaaaaattacaggaattgactagatatgagaaggacactttgcctttccaaaacaattttatctttctttttttttcttaaaattttttcttaatagagatggggtcttgccaagttgcccaggctggtctgaaatttctgggctcaagctatctgcacaccttgtcttcccaaagtgctgggattacaggcatgagtcatggcactagcctccaaatcaattttaaacataaaagtggtttggagacgatttagaatttgggtcaaaactagtgagtttcaaacacttatatctgcaatgtaacttataagtcagaaaaggcagccttttccctaccgcagcctttttttttctctcttttatttctgaccttcttggttctaaaaatttgttcagaaatcctgatggttgtttaaatgcttagcaccatgacacacatgtaatacaaattgcataaatggacggggcgtggtggctcatgcctgtgatcccagtaccctggaaggccaaggcaactggatcacctgaggtcaggagttcgagatcattctgtccaacatggtgaaaccctgtatctaccaaaaaaatacaaaaaattagctgagcatagtggcagacacctgtaatcccagctcgtgaggctgaggcaggagaatcgcttgaacccgggaggtggaggttacagtgagatgagatttcaccattgcaatccagcctgggcaacaagagcaaagctccatctcaaaaaaaaaaataatgtataaatatgttgaatcacctggcaaatgattttcttcccctggtgtctatgtgttccatactattgtagcctcttttaactggtaaaataactaccccaattcagagatccagtacttaatgcatcacatttccagagtcgtgagaaaacagctaaacctgttagagtgaattatactcactttgtttccccatagaggaaataaaacccacgattagaaacctttggaaaacataggaaatgcaacatttggaagtatatagaaacaagagataatcatgcaatgcttccaaatgaagtctcacattggatttgctgattttggagacagattcccctcttctggacagctttgatggccaagatagaagttcatttgctatgtttccagggactattctctttgatggatacaggatttatggggtctaaagagaacatacaattctaaagtgttcatgtttgagagaaaactctgcaatgatcagaaggattgagccagttttagcaaaacaaattaggactacattaatgatgaggttgactatacacagtttggagtgggagagttactctacccagtatcactgacatgttggaatgccagatgaaactgaaacagaaaaattgtcttggagtctaaaagacatctgatgtgctgatacctgttcagtcttctgcagtcatgggcgtaaactctcaaagagcaccactgggtcttagtccgtggcataaacattattctcaatgtagatattgtcttctgcttggacttcctttttaactgcattttgcaaagctttagtttgaagactgctaaatgaaacacttagttgttgagtctcctctttgaagaaatactttttggcaatgatgacacccaaaagagcaagaagcaccaagacagaaatacagactccagcacagattcctttagtggtgttgaccatctgtggactatatgctggggacagttgagtttgattgttattccaaaggccatctgaagactctgtcatggtgtcattcccatctgttgtgaaagagtgcaatggtgagctggtgggttgtgtccttatttctccctgaagtgtcatagggtgggtttctgctggctgaggtgaagatggtgaagtggctactgattgatggttctgcgtgggcaatggcgttggaggaacaaaggtagagaccattgttgtcattggaacacttgttttcattgaaatgctcgttgttgttggaacagtctttgtcgttggaacagttgttgtcgttggaacgcttgttgtcattggaacagtgatgctcgttcaaacagtagtggcggttggaacagttgtgacaattggtgtagtcgtgaccctgggtggcacaatctccaatgatagagtgattttcatgtcattgaaccacccactgtgctcaacatggcaacaatataagccactgtcagacacagctgtattttctatagtcaaagggacatcccttcttgaaaggtcccccaataccttatagtgtgtgtccttccgataggtgacgtgggttccattggtccagacaatgctatttcagcatgtgaataaagaacgtgcgcctctattccagcacatggatgtgacagctccattgtagtggcagggtagcgtgatagacggacctgccattccaccaacctttacagaaccagctacagaatctgccagatgtaggatgaggcttaagatggccacttcaggatacattatgggatcagccagttagttagaaggcagttttccagcttcttctccctcctcctagtctctgtttgtggacggctttaaatggttttccaccctgggtgggccaggtgttccttgccctcattctggtaaatgcacaacctcccagcatgggcattatggccatcatgtacatgtcacagtgctgcaaagattttgtttatggccagttttggggccagtttatggccagattttgggaggcctgttcccaacaaataataatctctgaacataagaatttgactagtgttaatcactccacttctccagtacactgatacttctccctttttcttagcataacacaaaacagatacatgactacacaccatctgctctccagtgcggaacagaggaacaaaggcataagcaagcttcagaacacagtcagccatgttcaccacatctatatctagcactgcttaaaacaaagtcaatgagaaactgagaagatgagtgactaccctattttcagcacttattgtcacaagaaaagaaaacatgcccacacactgtctccttctaaggcacagcatccactttcctgaggaaaaagtaactttacagcatatatctcaatctcacattattagcaagatgacactggctttgagcacacaaagaacaggcatattatagacactcttaagacacatcacatggcctggcttacctgatacaatttttaatttctctgaagtaaactcaaatttcaaacatgtatttctttattaacttatttcattaatttccacagggacttcacagaaagtatattcaactttcattcacttaatcttaccacaatagatggtgtaacatatccagaagacagccatatgtaagacatgctcataccccaaagcatagaaaacttaacacaacagggccttgaggaagcaacactataacagtgcaaatatacaaatatttaagaaaacctacatcacccaacaaagagcatgtatggtcaccactacccagcactctccaaaataagtagctatgaatagcttattcaaatttggcttatatatacttgtcaccacaaattggttctgaacatactgttccaattttggatattcacaacaagggtaattatctggtaagatatatttataataacttgtaattagattcctaaatgcacacatatacttgtgtcacagtgaggtgaaaaaaactctgagttatttgtagagtaccttaagatttaaatttccaaaaaacattcttaagcttagttttacaagtattccacccagcatctcttcagcaagctatttcaattttaaaaagtgaggactagggagggcttttaaaagttttatttctttctgttcagtttatcttatcccatacagaaatggaataaagtgtgatgtctgtcctaatgatatttatggttgtggtaatacagaaatatctatgcttccaagcaagaaatgaaaaattatggtttccccaaaatagagaaaccagtgctacctggggcccaaagagatgttcaggttacatctgtcagaattgataccatgcaagacaaccatctttggagaacagtggggctcacctgagattttggtgagtcatgtggatgacatcagagacaagcattacacaaaatgagcatcccaataagactttcatgtgagattgtcttagaagatggtggcccaactcacacagaagaggacggctgtgcatccaagagagactgatattttttctcaggagcagaaatcttaatgtaggagatggccactcactgagtagttgaggaatgccctgatggaactctctgggggtcagatttcacactgtctccctgagttgcataaagcacagaacagcatgcctgcactccagcttctagcatgtaccaactcagcagaaaacacatcactgtctattttgtttcaaaaatgctttgccatttaaaaaaagttaattaatatagtagaaacccaagaactacctaggggtagggagcatgtctgtcatcagaagtttttaaatgctggctagacaaacactctgtggaaataaatttcactctttgtgagaggggtaaaataaatctttttcttgggcactgacagatctagccaagatcctagtatacagcagataaacagcaacttctgtttactaaactttattttcacagattactggtgaagcaaaatattgatataactctaagacatgaagggtatcacaagaccactcatgttctttatgtggtttcaattaagaaatgaggtgaaaaatctggccatgaaatgagttttgatgctcctaagtagcatcagaactgctctgatgtgcttaagccattgtgacagtcctagctttgttcctacccaaagtctcttctcatgaatcctaggcttactggtcaaacagataaagcatccgtaaatcaaacacaaacttcaacgctcttaacatgtaggtgtacatctcatctgaaaatcattcaaaagctcaagccatctacaagaaatctttcctttgcattttagtatcaataaaaggaaagaaggaaaagaataggagaaagccatttaataattttcataggtaaaaatgtaacattggtttctcagttacataagtacttttcttgcttcatccatgacatacataatttttaaccaactaaaacacattacaagtagagaaatagctaaaatcatggaaagcatacacataactcttcaaagagtaggaaacattccctgttcatatgcattgcttaatccagcattccaatctcactgaggcaccagcatccacgctgttctctgaagcattctttttcctcctgtcacccatccttcagatattagctcaaatatcacttccatgggtcaccttccttaacctgcatcccggcatcctccattcctctcccatacaaaaaggccaaactttatgttggggtgatcagacccaacaccacatcgttggggtgacaaagtccgggggagtcaaaggattgagaaaaagacagagagaaaaaagtgggacaccagggggccatcattatcatggaggctgcaaaggcactgagctctgggagcccatggtattttttggtaatccagcaaagaaacaggtggtgagaatgtgggggtcaaaagagcaggcacatgatctacagctgtgacggtttagcatttatatggaacatgttctgctacttgagataatgggaataggggcctaggaaggctagaaacaaggagccagcaagtctagacacattccagaggacattatgcaagccctgtctcagtttccctcccaacacagctttttcccaacatgcccccttatcttttttgtaaaagagaaggtatcattattactagctatcattattactagcataaaaagtgccctcttttaattgagcaaggcgattgcaggctttgcagcccttaattgatggtgggtgatccagctttatttttcttagcctttattcaaactggagtcgctctggtttgaatgcttgccatatagctcccctttcccttttacataaggaccttaaccctaggggttgcagaaggatgaaggtccatcttctgtaacttcatgctgaatagaggtgatgatattcctgcctaactattagcatttcttgtattcacgacagagaggagctgagtcagaaagcattggtccattaagcgtcatgactctggtcggtcctcgttccatcttctcattcagattcgattgtctcatggctcatactggggaaacccgttccatggttggtatccatgtgtccctccagtctcccattccatggtcgtacacatcttgagggtgtccacatggtttgttcatctcctgcaaaaacaaaagcataccctcacccccacgttagtaaatctactgaaacagaagcaaaaattttgtggctgtagccaggaggccactgataatgagaaacaggctttttctgattaacagaaggtatagagaaagcaaatcgagacttttcaaaccttcaattctcactgtacaggtgggtccactagatgctgtggcttatgatagatcttcagatatttggtgggcacccacataggcacctgattgtcacctggagagacacaagcaaatccccttccccataaaattatctttaggcagggatcggaggaagtagactcagaggtaaggagaattttggggcctaatggcttcctgatgtttgataggtgttcctttggaagttaggaattccctttccatattgctgtgtgggcatggaggtctagctaagcataaagtttgtacatatatttaccctttttcattctcctaattctagtgtataatggctcctgcttttgctaggatgtctctccctaacaaaggtgtggggctttcaggcataattaaaaaggcttgtgaaaagagtcaagttccccagtcacaacttagtggctgggagaagtatctagtgactgcctgttctaggaccccttggatagtgacacatctggaggacagttgtccaggacaggagaataagactgagaagtccacacaagtgtccaagagacagttagcctcctggacctcaatggccaagcatacctggggagggtgatggcgtgggctggtgcttgccctgggcaccctcattcctgctgctggataatttggttagggcttctgacgcagaggacctttgtcccctggggcagtgggccttccagtgattcccttgacataaggggcatggacaaggaggtggcttatttctattcggacaatctttttaaaagggtccttgcagaccacactggaagcaagccctattaagcatttgattttcccagcctttcccttttccagagcctccaaagtctgcttgcctgagggtcatgactaaagctatggccttttctcgttgttgttagtttgtcccattctgcctgctcctcctgatctatagtataaaaaaaaacaaaaacaaaaacactgaggttgccaagttcaatagggtttctaagttttgttccgggcctaaggcggacttttgaagttttttctaaagcctgcagctgactgagtgataaacttgtcctttaagattagttggccttcaatagagtcaggtgacagagaggtatgctttctcaatgccaccctttgtctctccagaaaggcagtggggttttattcctttccctgtgttatagtggacatcattgaatactttataggcttcttcctagttttcctcagtccttctagcatgcaagttagcaaatgtctgtggcaccaatctccatgttctgatcctgcatcccaatgaaggtctacactgggaacttcctactggcctgtggggaattgttctctttcctctgttgtcatcctatcattgacctgactgagataccagagatcaccaaactctcgggctgcagttatggtggattagtgtctgatctagctgtaacatttatatctcactatgtcagatcaaaggattgtcctaacccttgtaaaacatcatggttatctgagaatttacctaggtctattttaatttgtttcaagtctgacaggaaaaaagttacataaactctgactgggctgaattctccagaatatatcttaggggtgtttttgccttggggagaacatttcccatctgaaaaaaagaacatagagatgacagaacccctagtcactttccactgagcattagtcctagagcatcctctatgtcctaatgcttattcctttccagggtgcataatacccatggacttctgcttattggattagttatgttcaccgatgtagcagtcctgcatctgttttctcacctttcttgaccacagagaaaggggtctgggctgctggattccagtggtcctttaccagcatgcccaacattgcctttgcactcaagaggtgagttctagagctgggctgggttcctatttgataacaacccagctgccccatcaagatgcactcccataaacagttcttatgtaaattaatttcagagagggtgtaggtaaacttttgagtcaggattgagataagagttgttttattctgaaagtactttaaggattggctgagtgcaaagagctcgcacgcttgagaggactaattattagataattttcctaactgcttctacaagagtttccctattgttcccccgacccccacctcaatcacccaggaggaaccatctgtcatcctgtcctggagggagttcctcctaggtctggtcagacctttgtatggtaattaagatttaaatacctcattaggaaatctgctgggttaagggaattttcagtggttaatgttaaatcaactttttctaacagaatagccccatactttaagattgagttagtaagctacctttttgctccttttactttggatagctctgaactggtgagatgtgctcacaatgaagtttcttctaaaagttatttttctcttttcttctgttagcaaagcagtggctgctaccgatggaatacatttgggccatctacaggttactggggttaaggattttgataagaaggctactggttgtcagtggtcttagtgcttttaggcaatgcccttgtttacactgacaacaatatagtattggagtgttatagggtcacggagaagaccattagttatcaattataggttttaaatttatcctggcttttaaaggaataagttacactgttttttctttaactacttacatctctctttctcctttgtagatggattttggaaacacagcggaaggacatttgcggtcctccctgctggattaaagttacaggaaattgccatgcttcaaggtcttcatctactctagccttttgaatataattttatatagcaccaccaattgctccaggttttaatgttgcaactacaggagcagtaagtctcatagctaattcatcttctcacccattaaggggagagagaggaggtggccttcacttaattgatcaggtggagccaatgggctagtaaaacatacttttttcagtttccctttcttttaatttctgtttcctgttcctcacattcagaatctgaagttagtttttacactcgtcctcctcttctttatctgaatctgcttcatcatgtgtttgaaatacctcaagagctgcttttattagcacccacattgaacaaaccaagactggaatttttgctccatctttatacactttttaaaaatctctgctaattctctcccattcctccaaagccatagtcccttgttccgggaactatggacaaaactgctttattgcactaaaaagtgagtgataacaaattctgagtactaactttcactccccctcttcgtaataagtgctttaagaaatttaaataagcagaatgctttcacgttgtcccatttttttaccctggttcttccaagccctcaactttcccgccgacgttcttttaaacgtcctcgggttacctttggcgatgcgtcctctgctttcacatgctctagtgttccttcaccggggtctttgtcaccccacattgggcgaccaggaatgttggggtgatcagacccaacaccaggtcatgggagtgacaaagtccagcagagtcaaaggactgagaaaaagactttgagagcgaaaaaggtgggacaccagggggccatcgctaattgaggaggctgcgaaggccctgagctctgggaacccaccgattttattggtaatccaacaaagaaacaggtggtgagaacgtggaggtcaaaagggtgggcccattatctacagttgtgacggtttagcatttatatgtaacatgttctactacttgagataatgggaatggagcctaggaaggctagaagcaaggagccagcaagtctagtcacatttcagaggactttatgcaagtcctgcctcagtttgcctcccaacactcagctttttcccaacaactttacttcttacaacaacttatcatgggaatggtaaatttggtggtgaaaaactgtctcttttctaaaagaaggctaaatctgaatcagaattgtacttaggaaaattaagttgtgaaactttaagaagcttttgaacacaaaatggttcttagaaaacttattttcataatttaaatacacatcaaattcagagaaacacaagttaagcatcctttaagttactcttggtttaaaacttttaagtagaatattttaaccacatacatattcatttaactaaacaaggaggagggcaggacaaaggtcagaccagtggcactgtatggctaaaagatcacacctttcattatactagacagtttttgtctgaggcctggggtcccagaacataaaaatgatcactgtctcctttattgcttccctgtattatccccatccttctcagccagggcagctgactgacatccaccttctcaagaggacatgcaaggacagaagacgtggctcagaaacactgctctatgaaaagggcagatagttatgtaagaattttgtaaaaacatgagtttttaatgaatgcaaaaacatgaactgtcaagcaagtaagagctgttcaaacaatttttttttttttggaggggggagacggagttttgctctcttgttgcccaggctggagtgcagtggtgtgatcttggctcactgcaacctcttcctcctgggttcaagcaattctcctccctcagcctcctgagtagctgggattacaggcgcatgccaccacggccagctaattttttgtatttttagtaaagacgaggtttcatcatgttggccaggctggtcttgaactcctgacctcaggtgctctacctgtcttggtctcccaaagtgcagggattacaggcatgagtcaccatgcctgtctgtcaaacaattttttaaaaagatatactccacataacttaaaacatgagggagactggcagatgacagcatcagagcgagtttccttaataactgaggaggtgattgggaaaactgagccatctaccaaaatagctttacagaaccaatgcatctcatttgttgtagaagctgatgagttctagagctcttatttactatggagttttcaaatacattgaacaccacttaatgttttcctcaatcccaagcttcttgtaaaactttcacgttgccaaccatggcatcttagaggcaaataaaagcttacctactttatggaatttcagatttctaaaaatagcacatgcaatacaagtcatgcacccagtatgcttgtggatgttttaaaggccactactataccttccaagcaggcttccttgacttcagctctgctgacatctgtggctgttctgtgcattgtaatatgcggagcagcatttctaatgtctgtgcactaaaggccggtagcatccttccccaacacaagacattcaaaattccggaaaggaaatccacagtggatgcccacgaagcttcctaatctcaaaatataacacttgattacatatgtaggttttgagtttctggaacatgtattttatccttacaactatcccatgaggtagaaaatctactgaaaagatgcctatcatcgtagtcagcaatgacaatgccaccaaaggctaaagtttcattttaaattcctttataccttcaaattcaataaaattttgaaaaaaagatcttctttattaaaaataacaacacacacacagaggtaaataagcagtatacatttaaagctacattttttttagatcaagttgactctataaagcagtttttccatggagctaggggtagttatgcattgtggatcctgaggttaatttatttccagctctgggcatatcataaagcagctatcaaataggtcaacatacccacccaaccctaatagtgttactctgagtataaacatggaatctttgctgaatggtttcaaaaaagcagggtgaaaataacttagtccaagaagatacatcaaaataaataaggaacatttttaagtaattaaaccaccggaaatatcacacattttatgtaatcttatcccattgtctctgaggaaagggaaaaaagagaaagtacaaagccagctagagaaagacaaatacagcttttaaaagctctaattaaccccactaagaaatttttttggctacctggagtacgcaggcactgtataatgtagggcagttgtccccaacctttttggcactagggtctggttttgcagaagacaggtttttcacatatgtggtgggacggttttcttttggaataattcaagcacactacatttgttgtgcactttctttctattattacattgtaatgtataatgaaataattatgcaactcaccataatgtagaatcagtgagagccctgggattgttctcctgcaactagatgttcccatctggtggtgatgagagacagtaacaaatccttaggcattagattctcataaatagtgtgcaacctacatccctcacatgtgcagttcacaatagggtctgcactcctaggataatctaatgctgccactgatctgtaatatgaacaatggggagtggctgtgaatactgatgaagcttcgctcactcactgttcatctcctgttgtgcagcctggtttataacaggccacagactggtatctgtctgtgccctgggtgttgggggccccgatgtagggcaattacatttattcatttatttattgagtgcaatggcatgatcctggctcactgcaattttcaacttccaggttcaagcaattctcctgcctcagcctccccagtagctgtgattacaggcatgaaccactatgcccggttaattttgtatttttactagagatggagtttcaccatgttggccaggctggtctcaaactcctggcctcaggtaatccactcatctcagcctcccaaaatgctgggattacaggcacaagccaccatgcctggctggcaactacatttattaccatccatttattaccagggcacctatgttgtacagtgcctggcacacaacaggtagccaataaacagctattgatctaatgcaggaataataaagtaaggtttattttttctcctttaacatgctgtagttgtgtcagatgttaataagacctccggagtctgcctgaagtaacataaaacaaaagacccattcatcaaacaatcacctggaccccctaacttgttacaagttaggtatgaatgtaccacctgtaccagcttagtgagatgaatgtttaccatcacataacaaatacttgtttgccacgctaagggcttagagtttgaatttctgatgagaaataaagtggcatgtacaaaaccccagagaatgatattccatatatccataagcatcagtagcatatcttaaaagtctcacacatccagcaaatcctttaaaaacaagatatcctaatatgcagccagtttagcaattttttttttttttcagagtctctctctgtcacccaggctggagtacagtgatgctagatgggctcactgcaagctccgcctcctgggttcacgccattctcctgcctcagcctccctagtagctgggactacaggcgcccgccacaacgcccggctaattttttgcgtgtgtgttttttagtagagacggggtttcactgtgttagccaggatggtctcgatctcctgacctcatgatccgccagcctcggcctcccaaagtgctgggattacaggcgtgagccaccgtgcccggccagcaatatttttaagaatgataagacagtgcagcttcatttacctgaaatggagcacaagttctttttgaaggaattcatacccattcctgcaaaagttctgtggtctcttgaaggtagcacagaactaagcgtttttttgtgtgtgtgtttccaaagaggttttagccaagattttagtctctaacagactccctgattaaaatatggcttagaaactatacctgcctacttgaaaaagcatcaaatctacagaatacttttcacggatgtacaaaaatgaaaacaaaataacattctactttttgcaattcactttttctcaccttccacttctcttaaatatacttcagaatcattatgcacaggtgcagagaccactacatatctaaaaaaggagaaaaccctcaaatatttggggatggactggcaatattgccttgcagaaataattttgtttccttcagacagaaatgtctcactattttcagcattcttacctaacaggcaaattttgtttccattgactttgaaagggctaagcttaaatctaaactcttaaacaagaatgaagtttaaattttttattaatgaaaatcccagacaggtttttccaaatctttatatatttatatataaacgtaacaaatctttatatatttttttgaaaaggtggcttatttttttaattttattattattatactttaagtttcagggtacactgcacagtgtgcaggtttgttacatatgtatatatgtgccatgttggtgtgctgcactcattaactcgtcatttagcattaggtatatctcctaatgctatccctcccccttcccccctctccaccacagtccctggtgtgtgatgttccccttcctgtgtccaagtgttctcactgttcaattcccatctatgagtgagaatatgtggtgtttggttttttgtccttgcaatagtttgctgagaatgatggtttccagcttcatccatgtccctacaaaggacatgaactcataattttttatggctgcatagtattccatggtgtatatgtgccacattttcttaatccagtctatcattgttggacatttgggaagaacctgcattgccaagtcaatcctaagccaaaagaacaaagctggagtcatcacgctacctgacttcaaactatactacaaggctacagtaaccaaaacagcatggtactggtatcaaaacagagatatagaccaatggaacagaacagagacctcagaaataatgccacatatccacaaccatctgatctttgacaaacctgacaaaaacaagaaatggggaaaggattccctatttaataaatgatgctaggaaaacaagctagccatatgtagaaagctgaaacttgatcccttccttacaccttatacaaaaattaattcaaggtggattaaagacttaaacgttagacctaaaaccataaaagccctagaagaaaacctaggcaataccattcaggacataggcatgggcaaggacttcatgtctaaaacaccaaaagcaatggcaacaaaagccaaaattgagaaatgggatctaattaaattaaagagcttctgcacagctaaagaaactaccatcagagtgaacaggcaacctacagaatgggagaaaatttttgcaatctactcatctgataaagagctaatatccagaatctacaatgaactcaaacaaatttacaagtaaaaaagaacaaccccatcaaaaagtgggcaaaggatgtgaacagacacttctcaaaagaagacatttatgcagccaaaaaacacatgaaaaactgctcctcatcactggtcattagagaaatgcaaatcgaaaccataatgagataccatctcacactagttagaatggcgatcattaaaaagtcaggaaacaacaggtgctggagaggatgtggagaaataggaacacttttacactgttggtgggactgtaaactagttcaaccattgtggaagtcagtgtggcaattcctcaggggtctagaactagaaataccatttgacccagccattccattacgggatatatacccaaaggattataaatcatgctgctataaagacacatgcacatgtatgtttattgcagctctattcacaatagcaaagacttggaaccaaatctttatattttttattcacccttctctctctctccacaaccactaacataaccacccacaaaagaagaagacaatcccttcaatgttccccgaatgtgtgctgctgctagctcggaagctctgtagagttttgtaacggagtgtgaactgctggcctggatctcctaaccagtaaggagagagggaggacaaatccgctgagcaggtggtagtcggccacaacacaaccgccagccaggaaaaggccagggtgcggggatgcccgctgccccctcgacgccagtgtcctctgccc

SEQ ID NO: 2505 - DNA, 2343 bp, Homo sapiens
actcacctggcggctgccacgcgcccccgcccaggatccgaggcctggggcatctgaatgaggaccctccacccacatttccacttgggagcgagctccagtcggggaaagggcctgcagcccgcctcgtccccaccctgggaccccgcgccccccagtcccccactcccgcgccgaaggcagggccgcgccctgagccgggaagtcgaggggatggaagggaaaggagccaccggtgagggtcccccgggttctgagcctcccgcgtcgggatccgtggggcgcacagagcgccacctccggccgaggcgcagctcagagcgcgatgcgggggaggaacgcgcgcggaggccgaggtctgagcgtggctagacggctcccacgccgagaaagggcgggtgcgcctgggctggatggatttcgcctccctagaccaggagggattggaccctgactacaggtccaggtgctcgtcagtgccctgccagggggtctacgcgtcctggtaccgggtccagcggggtggcgtgctgtgcagaccccgaggctagacggcctaggcccctggagcccaggagacgcttccttggggggaacttgcggcttgggaggggacacccactgcatggcttctggaaagagccggactcgcagggccaggacgcaggccggaccccggcctcattcttcggccagttatcccggagtggcgcgcatcctgtcttcctgggcctcggactgctcgcgcgcagagggggcccgaggacacctctgtggggttagaggactcggtaagacggtgtggaaggcaaggaggaaggtcgcgttgtattggggatggggtacccgtccctcccagcttgagggatcctgggggtcctcgccgcctctgagggcctagatggctgcttccctcggctcccctgcccggcctggagctacgggtgcgcccagctagagtttagggccacctggggacgtgcaaggggcgctggagcgaggcgggggctggggcggggcgtgggtgcttcacccgcgggggacgcagagcttaggcgaaagcggtgcaggcatctctctaatcgccggccgctattaaaaataaaaccgcgacccgtcgccatggcgaccacaacaacagcggccgcgcgagggaggcgaaaacttgtgcagccgcgcgacagccgccttctggggagactcggggcacgacgcacccggcgtgggactgggacccccctgcccggccccgccacattctccgccggatccccggaagacacaaggagacgtggacccccacaggcttttttggggggattgggcgttgaaaccgcagggctgacttaaccaagaggtcaccgacttggataaaaaacccacgcccgcgcggacccccctccccggccttcgtttccattcaaactcccagcgtcctcattgcagcccctggggagggggacggagggacgaggtgggtttcaggtgctcggcccaggaggggacggtgcgacccgggccccgccggcgggttttgcgcgcggaggctgcggcacctgccccgcccgccctgccgcgatccttgcagacgggggcggtcacatgcttctttctggccaggaatcgagtttcacttccagccgctattagtcggttcacacagttcactgcaaacatttgataatgaggctaaatatactcccgcgtcggaggaggcgtgggcgtccccgcccaggcccgggagacagaggcgctgaccccgggacagagcctggctttgtgcgggaggcagacgcgccccgcgcgccgcccccgaaacattcgcaccccatgctgaggcgcgcgtctgggagtccgtgggcgccccgaggggcagtggaagccgttggagggcctcaggcaggaacacaaggtgtcgtggcagaaaggaagaaggggccgggcacggtggcccacacccgtcatcccagcactttgggagggaggccaaggcaggaggatcgcttcaatccaggagttcaagatcagcctgggcaacacagcaagaccccgtctctactaaaaccctaaaacttagccaggcttggtggcatgtgcctaaggtcccaggtcctcgggagactaaggcaggaggattgcttaagcccaagagtttgaggctgcagtgaactattatcacaccactgcactcagcctgggtgacagagtgactctgtctcaaaactaaataaataaacaataattgtgttattctgtctccatttctcgcatactgaatttaaggtggactcagccagcgggttcaggcccagggtctgtcctgcagctacagtcagggttggt

SEQ ID NO: 2506 - DNA, 9104 bp, Homo sapiens
ctttgctgtggttatggccctgagtccttaaattataggctctcctgcagtttcaaaaagctaattcacactactgtgtgcattagaaaggtggtatatatgatattccactaagggaaaccctaggaacattaaactcctactagtaactggtcacgagtcagggctagaactgacactagtcatttttcttcactgacaagttttcattatgtggctttcccagaacaatttagaaattgatctgcaactgatggaagctgggatgaattgggcgcataagtgaacccaaagcatcagagcaaagtcaaagcgaacatctggctccagctttgagtacaagattaataaaggagtctctccatatcctctctgtccacgttcgttgtggacggggtcaccaggaagatggttcctgggtgatgagagtgtccaggacattgtcttcggtggactactggcacagggacctgaataagacactgggatttacaaagtggaaaagaaatcactgagggatccctcaagccactgaaaacatgtaccatttgccataaaacagcattaaacattaagtcaacagattgcacatgaatatcaacaatcctgcaaaaaaagccagtcccttaagaaacatcaagattgacagttgtcatcagagaaatgatgaggaccaggatcttcagggtaccatctggtgctgtgtttgaagaaaatgagaatgagagatatttcctcaatagatgaaactattggccccagctccaaattcacacttgttgcagcagttaattctgcaaaatcacagaaggaaaaaaagtcaggccaaggtaggtggaccacgaggtcaagagatcaagaccatcctggccaacatggtaaaatcccatctctactaaaaatacaaaaattagctgggcatggtggcacaagcctatagtctcagctactcggaaggctgaggcaggagaatcgcttgaacccggaaggtgaaggttgcagtgagctgagactgtgccactgcactccagcctggtgacagagtgagactctgtctcaaaaaaaaaaaaaaaaaaaaaaaaaaaaaaaaaaaaaactcaggaaaactcctcttcttttttctttttttttgtcccaggctaagcagaaatgtactgactcattttgtggttatatgcattattattctcgtctcaggtcaggactgctagacttagaaagaattctgatatgaattgtgatatcattgtctaacagaaagtgtattggaagttgttcacaatctccagacacttggcaggtcacagagagaggtgcagagagctgccttttttctttcttttgggttcaggattgcatttctgaagtttgtcctttaccatttattgtacactgacttttgctgttagataactggtttccaaaattagtgtgtacacaaattacctgagtcatttattaaacatttcctggcctccccctagggcaatttatttgtagatttcaggtgaatcctagtcatcaacaatttagctaataccaccctttcccagagagatcctgagatgggtgatctgaaaacacctcatttgaaacattctaggttagtgaattgagtttattgttttacatataaattattttcactatgctttatcatagagcttgacctgttcccagaggaaatctataggcataaaatgaacacatgtgttctcaacggctttaattaaaagagtggcatgcatatttcattgctattaacaaaaacaaaattgatttgcttttctagataattgaatgtatgaaaatctcagtgccttccttctgtaacttaactctataaattctgcatcattttcattttataagtgctggcatgtattgtgaatttctttacagcaagaagaatgacttaatgttttagagttagttttgtttttttgttttgtcccattttttaccaaacataaaatggcctaaaatgagtgcacaataaaagtgtgacaccttaaactaaagtaacatcaatcttttccataaagtattttgttctgtgatggcagataccaccatatgattgaaacatttctaagtgtgccgtatattaaagactgagccccttctcctaaatacacatatttttgaatgatgtatataaaatatattaaggcaaaagcaaatggcaaacataggtcactttttttttttttttttttttttgcagttacagtagtttccagacagccacttctgttcctgttccaaaaactatgactaacatttgtctgtctggatggtatcattaaatgaaaggactaatagtctctatgatgccacctgaatttcttatcgttgtttatttgttctctcatgaaacatgcatcatatatttaccacatgctgattatgtagaagataaaaagatgaaaaagagaaccccagaatgaattttccctctcaggatggtatgacattaaacaaaactaatcacaatgcaaaagagtaagtgcagtactcagctttcaagatgaccctcaacgattgccccctggtttttacccctttgtgtagtcccctcctgtgctgaattgtggctgcctgtgttaccaataaaataccaacaaaatgacagggagtgacttctgagatttagtcataaaaaatattctaggttctgccttgctctttcttgaatcacctgctctggaggaagccagttgcatgggaagacatccaagcagccatgggttgtgtagagagaaactgaggcctgccatcagtagccagcatcagcctgccagccatgcaaggagccagtgtggaagccaatattccagagccagtcaagctgacttcttgactgaaactccaggagagaccctgaaacagaaggacaaaaccactcctgagttcctgactgatagaaactgtgagatgataaatgtttttgtcatttaaactagtaaggtttggagtaatgttttgcagcaataattaattaaatagtaaagaaaaaaatgcactaagaaaaatccaaagtgatataggggttatgaggaaaggtttcatggaagacatagcatttgagtgaagccttgaaaaataacaggatttagaaatgcagggatgagaaagaagcccattccaggtagatggaacaatgtgtgcaaagctacagaggtgacgatttgccagggattaggcaaacatcaaataatcttgtttgattgcaacattagtccctctcatttgctccaaggttgtcacttttgtggtgctgaggctagatgtaggacgatctcttgtttgaagccaaaaaagagataaacacataaagctgagcctaaaatttagcaaagtaagctcagtaagtcagagaaagagtccaaatagatcgccttctatctctcttatccaagaaataagcaagccttgtatgccactcttttaagagatctatttggactccttaagaagggtccatggggcagcccgagaaaaagggagcaaggaactcagaaatggcatctattcagaatgcaaatcttatggatgagtttctctctaaatctacatgtgacttgatatatttggcagactaactccattgaaagataactcattttataatatggcatttacacaaacatcagagaggaatagtaaaagaaagtaaaattatagtataggacagtattaattatgaatatagatacaaaaatcacaaaaaccaaattcagcattataggtaaaacaaatagggtttatttgagaaatattggggtagtttaaccatggaaaatctgtatatgcaattacattagctgctacagaaagaaaaaccttttggaaaagttcaacatgcatttatattaagaattcttagaaaatcaggaacagaaagaaacttctttaacctaaagaacaatagctatacaaactttagaaaacatactttttgtaaaataatagaattatttatggaataagacagtgtattagctaggggcaatgcttgctgttagcagataaatctcacattatcagaattttaatgcaaccagcaaagttgtttctggtcaacaggtaacactgccacgcctaactaaaagaggttgagaaatttagactatttgaaaatgtagactgaaatttggaccagaaagaagagaaaatgagttggctattcacctagcagttactgattgagtctttattttgtagttaccaaatacctatttcattaaaacatattaaattaaattaaactcttaaattaaattgttcattaaaacatcatgcataaagcatatccactcttgctcagagaaacatccaaagtcctatcttgtgggaaattcagttcaaagtcagcgttccaggtgacatgcattcctctgcattaggtctgaatggggctttttgtcatccagtgatttatgaatcaaaaggaaaatcatatactccctcccgtccccacctccactatcatcatggatagtataactccaaaaaacatatccattcacaaaagtgacaatgggagcacataccaggaagaaagccatctaattctgttgggtgggtattatgagttccctctgcctgacattggaatcattttttggttatatctcaattctgctctttgggaggaattatcttgtcctcagcacccctagagattccttttgcccatcattctttctaaaatgtctgaaatgggttaggaagtgtataatccttgggggctatatagaaactggatcttgcttcctgcttatataactttggggactcaagaattgtattagagctcaaatggtcagagatattttttatgccagtcttgcaatatctttcaatttagttatctcaaaaaaatagcagggggaaaatatggcagtcccttacaaatttgaacatgtgtttaccatatgacttagccattatactctacagcactaatgccagggaagtgaaaatatatgttcattcaaaaacctgaaggaaaatgtacgtagtgggtttatttgtaacagcccaaaactagaaatgacccaaatatccttcaacagaagaataattaaactctgtggtacctccacaccatggaatactactcagcaatcaaaatagaaaaactagggacacgtgcacagaatagattgattttgtattagcttcctattgcttctgtaatgaccacaaatacagtggcttaaaacagcacaaatttcttctctgacagttctggaggttgaaattataaaatcaacattttagctaggctaactcccttccagaggcttcagggaagaagctgtttccttcccccttttcagcttctagaagctgcctgcaatcattggctcatgaccctttccttatatcactctaatttcttgcttccattgtcacatctcctacttttctttaacctttttttttttttttttttgagacagagtcgtgctctgtaccaggctggagtgcagtggcataatctcggctcactgcaacctctgccttccaggttcaagcgattcccctgcctcagcctccctactagctgggagtacaggcactcgccatcacactcagctaattatttatattttagtagagacggggtttcaccatgttggtcaggatggccttgatctcctgacctcgtgatctgcccacctcggcctcccaaagtgctgggattacaggcggaagccactgcgctgggcctatctccctcttaaaagggccgttgggattattttaagtccacctggagagcccaggatgctcttctcatctcaaagtccttaatcacagcaatgatatctcttttgctgtattttctatattcatagtttcagagaataaaaacgtggacatcttttgaggtggggaagcattatgctgtctaccatagatcaaagcaattaggctgaatgaaaaaaagccatcctcaaatgttatctagtcatgactccatttatacagcaaaatacctgtttgttaacaaaaaagacaaaactcaaaaatgtagctcagatctgctaaatggattttaggtttaggcaaattcaaccaccttgccacaggtaatcccagcaagaagttgcagatacaaacttgagctttctgcagtcagattcattccccagagaaaggcaggagaaactgagctccacattccaaggttttccaatctgctaattactccacctctcaagatacattagtgcgttatgccaactgggtgccccttgcatgaaaagaaataaaagatatagggaagaactattccttttaacaattgtattgtttaattttgtttaggcttagcagtgcatgagactcttatactttttgaaggttgtacatatttcacaataaaattaaaattcgaaataatcaagagaaggccctaagactgtaagaagtacgttcattgtggagggctttcatgacaattctaaatttgggacttttgagggtataaaatggaaagcaattgagactttgtaatcgaggaagtaacaagttcagagctgcattgggagatgactgcaatgactgtataagataaggatgaataccgagggtgtataacaagatcagcgagaagaggattgccattgttccacctggaccaggttagtgaccacagggaggggaagcagggagacttaggagtatattgtgatatactagggaagagtatctcagtgttaggaaatgtcagctttgtaagtttttatcaagcagctcctggtatagtgtatgggttcagtaagacatggaaacagattagttgtatgaagaagggggcattaaagatgaggttaagatttaatggtatggggaatgttgggatcattaatatgaagaaattaggaggaggggtgttagtgaataggagcaccaatggtgagtttttgacagtctttgccagcttaagtttgtatctagccacatagcgagatgaggcattaacttataataaagataaatcaaaagctccccatgttccatgaatatctattctcatatcccggctgtttaagactttcaccaaaatttcttgtttatccttcatatagatctcgcatatttttcaggattaattttactcctacatatggtaatagtttctattgagatgataaatgaaatcttcgtatccattataaaatgataagtagttattacaagtctttaggaaagctctcattttttgtgtgtttcacatgaatcagtgttctgctctattgctctgagtatggctggcacagaaagagttaagttggggaggaaagctcttggtttctatgttttttgtaaaatggcattctgttctattgctgtaagagcctagcgggagaaaaacaagcagggccagggtgcaacagcggctggacagggagaaagcagcagtcaaggagcattcagggcacaaggtaagaggttcacattgcttttttgtttgttttcttaacgttcaccattcttttcttatactctattagtaatgagaaaacactaatatataagtgtatctgaagctttcaggaatggaaatggattttctatgactatcagtctctgaaaacaagcatggataggctggtgtatgacccttgagacctgtgatgatgggagtgatccccttcttgatgggtcctcagtaaatccaacaccctgcagacacagtatgctatttttacaggaaaggtgtcccaatccagaccccaaaagagcgttcgtggatcttgtgcaagaaagaatttgaggctaatccagagaataaagtgaaagcaagtttattaagaaagtaaagaaataattcataggcagagcagaagcatgggcctctgattgcccctttttatgattatttcttgattatatgctaaacaaggggtgggtggattttccatgaatttcctggaaaaaacacgggtaattccagagctgagggttcctccactttttagaccacatggggtaatctctggacgttgccatgacatttgtaaactgtcctggcgctgatgggagtgtaccagtgaggatgaccagaggtcactcccatcaccattttggttttgatgggttttagctggtttctttactccaatctgttttatcagcaaggtcttcatgacctgtatcttgtaccgacctcctatctcatcctatgacttagaatgcctaactatctgggactgcagcccagtaggtctcagccttattttacccagcatctgttcaagatggagttgctctggttcaaatgcctctgacactatgagggtgctttggcaggaattatctttggaccactttggctttgatctcccagggagtgatcatgtcatagaaatggaagtaagcatgtattttgtctctccaactgaactgttcagaaacagttaataatttcataataatattactagtaattgtagcagcagtatgtggttaatcgaggttccatgtgcatttctttcacggtgtcttaattttcacatgaagtccatgtttcaggggttgttatgcctgctttacagatgaacaaattgaaatgttaaataacctaaataaccttgcctaagagcttatgagagtgttggggctgggatgagaacctggtcttacctgaattcagcactcaggtgccaaaacactgtgagaaatagaggtagtttatttcttaaatgataaaatcatttaaatgttcccagtatcatacctagcatttaatagagactcagtacattttagttctctctttctctctttgaaacaactaacaaaacaaacaaaaacttgccacagttccaaattagagggatatgtgaaactcaaaggcatagtaaaataatggactttaggaatttaggagctccagatgacaaccaagaagtctaggggtgagggctcctccagagtagcccagaagagctatgctagacacgtccaaggcaaggaaggagagggcaggaagaggccgtgagggaggcagtgaccaccaagaggggaaatgggcagagagataatccagataaccagaataaccaaagaacacattagaagag

SEQ ID NO: 2507 - DNA, 6297 bp, Homo sapiens
gtacgcggggcgtctggaacttaaaggggcagcgtaccttggccgtcccgttccacaacaagtcacggacaagttcactgagagcgtctacgtcctggccaacgagccatccgtggccctgtaccggctgcaggagcatgtgcgtcgctccctccccgagctggcccagcacaaggcagacatgcagcgttgggaggagcagagccagggagccatctacactgtggagtacgcctgcagcgccgtgaagaacctggtggacagcagcgtctacttccgcagcgtggagggtctgctcaaacaggccatcagcatccgggaccatatgaatgccagtgcccagggccacagcccggaggaaccacccccgccctcctcagcctgatcctggaagagactcggggccccccagcctccgccaacccaggtcagtgccgagggtagccacgagcctctctctctgctctgaactaaccaacccgcccgcttggcagccaggcaggcacctgcttgtctaaccacttggggtttctcactgggcttgtgggatgatttcggaggtggcaggtggaggggtgtctgcaggtccagaatgttccaccctgctgctcagggaccatgtcagcccatctctcccactctctctccaccaccttcctctctcttttccaggccataggccccatgctagtcccagagatttccaccccccaagacagagaagggagcccacatttcctctatcctaccacgtgccagcagcctgctttacccgtgcacagtctctcaggcagagcccggcatgggcaattacccacctatctctgggacctccccacccatctactgcctacctgctgtgtgaccgagcaaattcactaccctctctggtctctgcatttactttctgtaaaggtggctctcaggtgaccaagagggtgcagggcacagtgacggatgtgctttggagcagtcggctattgctgcataacacagcatcccaaaacagtggtttacagccccagtaattaacctactcatgattctgcactttgggctgggctcagctgggtggttctgctgctgtccctggggctcacccatgtggtgctcatgggagctcagctgcacctgcatagtcagggggtcccttggccaggactgttggcagcaggggtcagattttcctcatggcctctccagcaggccagcccgggtttctcctggtggctgggagccaggagagcggctcccatgcagagtgctggtttcacatttgtgggtggcccatccgttgaggccagtcacgtggccaggcccaggaccagatgggagaggaccgcacaagtgcagcgtgagctgtgggaggtgtggctgaccacgcttagagagtgtggtgccaggaaagatctgatgtgtcaccattctatatctgtgatgggcagacgcaggcaggtcaaaggggccctggggacttaccgagcccctgcctattggccaggcactgtgattgtcctcggtgccatgtgccatggaagccctctcagaggtcgaggggaggcaggtggagacagagcctctgtaggcctttcaagctgtagccccagagcccagaggcagccgaattcatgtgtgcagtcagagagcacttagtgggcactgtagtcaatcagtgagcgcttactggacaccacaggcagcaagcatttactgagtacctctggcagttgatgcatacttcctgagtacctgttcatagcaggcttagctctggatgtggggtggtgaggaatcccacaggctgaggggtggcctgggagctttccagggggcctgaagcaggaggggctgcctgagtgggtcagcagcccagcccagtgccctacgcagccctgcccacacccccaacccagcctctgtctccccagtcccatcccccacaccctggtccctcctactttgtgcctcgaggacactgccccgctgccctcctcacttcccagcgtctgctgtcccctccgctgctgctgcccggcaggattgctctgtgtctcatccacgtttgtccctgcagagttcctcgcctctccctggaaccgccagcctcatgccgcatctcagaggctttttttttctctcttttttttttttttgagatggagtctcactctgtcacccaggctagagtgcggtggtgcgatctcggttcagtgtaacctctgcctgtcaggttcaagcgattatcccgcttcagcctcccgagtaggtgggactacaggtgcctgccacctcgcccggctaatttttgtatttttagtagagatggaatttcagcatgttggtcagtcaggtctcgaactcccgacctcaggtgatctgcccgcctcggcctcccaaagtcctgggattataggcatgagccactgcgcccggcctcagaggctttcattcccacttttcccccaaaactgcgcctctttggggtcatcagtgaccttcgcagggtcaagtcatccccctctcctgtcccaggaccttaagcactgccctgttttacagaagaggaaactgaggccccgagaggtaaggcagccagctcagggtcatcgcccacgcccagaaatgccaggattcccacccggacctctgaccaccaagctccaccttagtctggcccggggtcatccctcaggtgctgcctcatgccttgggtctgtctctcagaccaccctggcccttgcccctgctccccagcctgactgaagctgggccaggcagagactgaagactgaacgagtgtggccagcattcctcctgcacctgcccggagcctccaggcccagccgtccatgttcccagaagtccagaagtggctttgctgctcctggactctcactggccccccatcgacccttggaccaataactgccatcaaaataatcctgattatgcacctatcaagtccctggccctgggctaaagtcttcacaggggtcatctcatttcatcctcagccccaaaaggcaggtctcacccccaaatacatatggacaaaaagaggctctgccgggtgtgatggcgggcacctgtaatcccagctactcaggaggttgaggcatgagaatcgcttgaacccaggaggcagaggttccagtgagccaagatggcgccactgcactccagcctgcgcgacagagcgagacttcgcacccgccgccccccaaccaaaaaaaaaaagggcacagtcagagaagagcagagcccggcttggtttggtcccagccctgcctgcctctgatgtgctgtgtgacataggcctggtgctggccctctctgggtctccctttctttcttcctttcttttcttttcttttcttttcttttcttttcttttcttttcttttcttttcttttctcttccttccttccttccttccttccttccttccttccttccttccttccttccttctttctttctttcttttgacaggatctggctgtcatccaggctggagtgcagtggcacgatctcggctcactgcaacctctgcctcctgggctcaagtgatcctcctgtctcagcctcccaagtagctgggactacaggcgcacaccactacccccagctaattttttgtattttttgtagagacggggtttcaccatgttggctaggctggtctcaaactcctgagctcgtgatcctcccgcctcagcctcccaaagtgctgggattataggtgtgagccaccgcacccagccttggttctccctttcttcatctggataaggaaggctggactgcaccttctctacaggctgagttggacattcgcagatctaccctcccaacctgcattctgcctcaagcagcaacgcccaccccaggctcaggccacatggagaagccacccctagttccagtggtggatgtggcacctcggcctggccaatcagagctcccttgtcctaggttcctagtgattggtttgagatggacacgtgacccaatgagcgacctttcctgggagttctaccaggagcatcaggaaggttgagctgggtgtatgggaaccaggccggggcgaggggttccggggggacctgagaacattgtgtggagccctggatccaactgtacctgacactagccaatttcatttcttcagtttcatggacccctaaattatgatttttgccaaaatggctttgagtccgtttctgctgctgtttgcagaagggcctgcactgaccactgtgaatgccaagcctgggtgaccaggcctccacaagttatgcatctccaaggccagctgtgtgccaatgcagttaccccagaatcccttgttccagtacaatgtattagggaggtcagataagagttgtttggggtcgaggcaggttccagtcactgctctgggagggtccctcagcttggcactgtggggtggttgatggagacggatgggaagagcaggggtgtcccgaggggagacagagggcatcctgttaggacatcgggcctgtcaaggcatctgaaggcctggaaagggggttcagccctacctctcctccttctaggtcacactggggggcctctgtgccattatcccacctctccactgtcctactcagcttaggagtggggaggagcctaaagccaccccatttagggcactgattggtgtgtggcctccagagtccttctcccttcttacctgctctgaaggcacctctcaatgtccatctgtccttcgtgcgaccatttctccagcaaacactggtatttgtgagccagccctcttgctcagaccttcaggacaaactggcagcagaatgggattattgcctgcctcccaggacctgcctaggatgtctggggcgctaggagctaggggtgagggaggcaggtgtggggggccccaccagacccttctagggctctgagtcactcatagcccctggatgcaacctcaaccagcgactaacagtcatctctctctcttttttttttgagctggagcctcactctcgcccaggctggagtgcagtggcgcgatctcggctcacaataacctctgccgcctgggttcaagccattctcctacctcagcctccagaatagctgggattataggcacctgccactgcgcccaactaatttttgtagttttagtagagacggggtttcaccatcttggccagactggtcttgaactcctgacctcgttctcccaaagtgctgagattacaggtgtgagccaccgtgcccagcccagtcatctcttaaaaggagtctaggccgggtgcggtggcacacgcttgtaatcccagcactttgggaagtcaagactagaggaacccctgagtccaggagttggagaccagcctggcaacatggagagaccctgtctctataaaaaaacaaaatagctgagcatggtggctcacgcctgtaatcccagcactttgggaggctgaggtgggcagatcacctgaggttaggggttcaagaccagcctgaccaatatggtgaaaccctgtctctaccaaaaatataaaaaattagccgggtgtggtggtgcgcgcctctaatcccagctacttgggaagctgaggcaggagaattgcttgaacccgggaggcagaggttgcagtgagccaagatggagccactacactctagcctgggtgacagagcgagactctgtctcaaaaaataataaataaataaatagataaaagggatctgatcaagactctgggttgtcagacacctcgtcaccccgagtccaagggcttgtgggggcgctggttaatttgcatctcatttgaatgctcgatagccctttttgcctggagggcgccccgcccactctagccgccagggggcgcaagaggcaaagcgttggcgggaagttcagcctcctagcggtcattgtctgcagtcctggctggccctggtgggcacactgtgaccctccaccctttttcaccctatatgccctcgctcccatttttcagagagcaaactgaggttctgagaggccagagggctctcagaacaagagctcgcagcctcccttgtcagggtggagagcaagggcactcctagagctcactcaatagcatttactggccaggcgcgggggctcacacctgtaatcccagcgctttcggaggccgaggtgggcggatcacttgacgtcaggagttggagaccagcctggccaacatgatgaaacctcgtctctactgaaaatacaaaaattagctgggtgtggtgcatgcctg

SEQ ID NO: 2508 - DNA, 3248 bp, Homo sapiens
cctggcctcagcttcccagcagagggctcttctgcagaaagtgatcccaggatagggggctgccatgggagtcagggatttgcaccccaaatttcaggtggtatctgagctctgtgtgtccttcctacccacctctcagggcccagcagctcacctggaccacggaaagcacagaaagaactggctgaatgaatcaagagatcaagtgttctccctgaggccctgtaacagctctgcagctgactgcccagaaggaagcagaaatgtgagttccctgaaggcaagaccctgttggatctcacagcaccaagcactagatctggcatgagttagtcaaggttttggagcagaagaatggatggaggaaataatttctgaatcgaacttggaattgaactgcctgaactttaatgccctttccagccttagggatgataatgaattaccaaagtgagaaaaatggaggcgcaagctgttgtcatccttccagaggcaccctccaagtgtgtgtgggtgaaatgtgagctggagagaggattgacaaagagcagtgaaaacatattcctggaccccattctttttttttttttttttttttttgagatggaatttccctcttgtcatccaggctgaagtgcaatagctcaatctcggctcactgcaacctccacctcccaggttcaagcgattctcctgcctcagcctcccgagtagctgggattacagacacacaccaccacgcccagctattttttgtatttttagtagagatggggtttcaccatgttggccaggctggtctcgaactcctgacctcaggtgatccacctgcctcggcctcccaaagtgctgggattacaggcatgagccactgtgcctggcctgaaccccatttttatctctggatttttctctctgttgaagaattgctgcagaaaccatattctaagtataaaaggcctttagatacctaagatgatccccagaaccttgatgtgaatccatttactcatactttacattctcactttacactttgagcatgaagcccatggtgatctggttgtaaaaggtttaaaggttaattggcagccaatgttgggggtgagaagttgctgctgcaggcaggcaggtattcaccaaggcagcagagagaggaggcatctgccaggctggtagaaaggaaatagaaaaagaaaacaggccgagagcggaggctcaggcctgtaatcccagcactatgggaggccaaggcgggcggattgcttggttgcagtgagccaagatcgtgcactacactacagcctgggtgacagggcgagactccatcttaaaaaatcataataaataaaataaaaatacaaaaattatccaggtgtggttgtgcatgctgtcgtcccagctactcggggcgctgaggcaggggaattgcttgaacctaggaggtggaagttgcagtaagctgaggtcacacccctacactccaggctgggtgacagagcgagactccgtcaaagaaaagaaaagaaaatagaagagaaaagagaagaaagaaaatgggcaaaagcaactaaaggtaccacagatcaaaacctttaagatcagcattgggtacaccattgcatatctgctctgggcaaatccctttctgggcctcagtctccccatccgtaaaatgaacaggttttaccaagggctctgagggcttatgattctccaggagtttccttatgtgaggcctttctgtccccaaccatacagatcagatgaggtgtcatcaaagtcaagactccaatttctagggtttgtgggttatcaggctttcctgccacaaactttcctgccacgaacctcctgctaggctcctcagggggagttcactactgtggctgtctgggccgagcccccaagaagaaacaaaactctccagggtctggtgcagaggctgtggcccaaggtctgcttgctgcctaaggaagatatgaaaaggaagcctggctctgggtgaaacggaagtgtctgaggtctgacagttgctctcagcatggtctctgcagccaggagggaagtaaaactgtctgggcatctggtagtttctaccctgagagtccacaggacagtgacaagtggggcctggtgcaggcctgttctctggtccagagccctagcttaggccagagacagtctttggagagatgctggcccaaagatttggagggagggcaaaggagaatactctgaagctggttcatgaccttaggcaaatctctgtgcctctttgggtccagtttctccatttgcaaaaatggagtttgggctaaatttgcctgtgcaataagggtttctggaatggtgggcactggggatacagagacaatttggttacaaggaacctggattgttaccctgctggcaagggactcacagcctggtaggacatagttacagaatcattggttaattgtgattatcaatgcatgtataggtgccgaaaagctgtggacatagagcattaattcagcattcatccagagatccagggaaggttaagcaacttgcccaaggtcatatagatattaagtggtccacctggggccagagtcttgaaaggaaggggaattcagaagaggacatggctaaatagaagtctggaagaccagtctgcttgtgcttgctgctgtcatcaagatctgaacaaagttatggagacccagaggaggggagattaattctgacttaggagaaggaggaagacttcacagaagcagaggttttgagctggggtttaaagggcaaatatgagtttatcaagtacagaaagggagaagggtgttaaaagctgagggaacagcatattcagatgtgtgatgttgctaaaaagagcctgatgagttgctggaaaagttgtctgtgtgtgtttgtgcgtgtgtatgtatgtgcggtatgttaggaacaaagagtacctaaaatgggaggactgagagatgaggtttcatagtctggctggaatcacacagtgaagggccttgaatgtgtttggagggcagtgggcagccataaaagggtcttaagccacggatgcatggtcaaaatagcctattagcagtcttgctcgggctgctaggagggcagaggaccaaagtacagggctggggccaggcagaaacaactgtaaagaggcagtggcagaggattgagggtgtcaggtgtcaggcctagcccctgtcaagaaatagaaacttttcaag

SEQ ID NO: 2509 - DNA, 796 bp, Homo sapiens
gaaaagaaagatgttgtaaccctaaccctggagccgaacttcctctcctaacaatgctggggaggaacccaggctgggggagaagttaaagccagaggaggggcaggaatgtctgaggtggcaacacttctcttcagccagacagcactggccagtttggagtctgtccatcctgcaggccacaagctctggatgaggaacttgaggcaagtcaccagcccctgatcatttcgcctaaaagagcaaggactagagttcctgacctccaggccagtccctgatccctgacctaatgttatcgcggaatgatgatatatgtatctacgggggcctggggctgggcgggctcctgcttctggcagtggtccttctgtccgcctgcctgtgttggctgcatcgaagaggcccagggctcctcagagcaggaactccactatgcatctctgcagaggctgccagtgcccagcagtgagggacctgacctcaggggcagagacaagagaggcaccaaggaggatccaagagctgactatgcctgcattgctgagaacaaacccacctgagcaccccagacaccttcctcaacccaggcgggtggacagggtccccctgtggtccagccagtaaaaaccatggtccccccacttctgtgtctcagtcctctcagtccatctcgagcctccgttcaaattgatcatcatcaaaacttatgtggctttttgacctttgaatagggaattttttaaattttttaaaaattaaaataaaaaaaacacatggctcacccttccaccca

SEQ ID NO: 2510 - DNA, 12669 bp, Homo sapiens
cttgtggaatgggtagcagccattgattggttaggtgtattaatgctggcctgttaaatgacatgcagacgtgtctttgtgctaaatggcagctgaatgggtgccagcgagagaggttattaagcacagataagaggcagcacctctattcactggcaatgtcactttctcccatttgaggagagacatttgttcaagacactttttttctcctctcactgacaatacgtaaggcagaaagttggtgtctacgttgctgcatggctgcagaatagattgtttcgagaaggtgaactctggaaagggtacaactaggaaaggagaaagcatgttacggcaccaggaaattattataggagtgataccttgaactattttggaaagatctgggaaaagaaattaaggtctccaaggaggaactggagaatcaatgagtgactggcctggtcaccctgagcagcaaaacactgaagtgggactacaaaaaaggaagttggcacagggatatatggaaactgttgactccgaggctcctcagccacatgtttagtgatgggcccagagctgttgttgctcagcaagaccagcattttggaagaagatgtgagcacaaagctgagaagatctggggagagcaaaggcacactggaacccctggttggttacatcatggccgtctctcattgcttctcactataatggcctccagagagtgatagttgctcttttgcttctgtaaattcctcttttgaaatattctaacctagaaccataaagaccagggaggttgtggaatgtcaatttgatctaaacaaactgatgaagcacaaaccactctgctacattttgagctcattggaactgaacttgcttagggcctggtattgccctttgtgtattttctgacagagaagtagacaatcacataacaacaagtgtggggaacagtctcataaaatagctaggcattgtggcattatttcaaatgagagacaatatactgtatgactgatttgctcataggtagaattatttcattgaaggagtcaaaagtttcaaaacaagcctaataataatacaaaaagggataagaaagatacagaataaaaagaaaagtataaacataagcgaaatattaaactaaaaaatacaattgttgaatcgaagaacatgtttgttggaataaagtgtggaaaggatgtatctgaaggataaatgtgtgtattaggaggtaaatggaaatgaagccatgtaaacagcatgtttgttgcatcagcactataatatgttctaatataatggggaaagtgtagagaaatgtgtatctcagacttcatatttctttttttaattgtacattattaagggatacagagtgaaatttcattatctctatacaatgtatgatgatcaaatcagggtaattaacatatccatcacatcaaacatttctcatttctttgtgttgtgaacatttgaaatattctcttttagctttttgaaaatatacaataaattatagttaaccatattcaccctacagtgctgcagatcaccagaactcattcctcttgtattccctacactcattactctactgcttaccatcttcccctcccctacaattcccagcctttaagagccacaactctactctccacttccatgggctcaagttttttgtgtttttgtgtgtgtgtgtgtgtgtgtgtgtgtgtttaatattagctctcatatatgagtgagacattcagtatttattttttgtgcctgaactattttgcttaatatgatgtcatccagtttcacctatgttattgcaaatgacagaatttcattctttttaatgactgaatagtattccattgtgtttgcataccacaacttctagccattcacctgttgatggacgtttaggttaatgccatatcttaactattgtgaacagtgctccaataaactttggataaatatccagtagtgggattgctggatcatgtggtagttctatttttagtttattcagaaacctccacactatttttcataatggctgtactaaaaaacattcccaccaacagtatataagggctccatttttttcacatccttttcagcatctgtttttgtcttttttatgatagccattctaattggggtgacataatattttataatggttttaatttgcatttccctgatgattagtgctgttgagaattttttgtatatttattggccagttatatgtcttattttgaggaatctttattcagatctttttcctattttaacggtattattattatttgctcttgagttgttattagtcccttgttggatgaatagtttgcaagtattttcccctattctccatgttgtctcttaactctgttgattctttcactgtgcagaagcttttagtgtaatatagtcctatttgtctgttttgtttgtagtctgtcactttggagtaagatttcatatttcgtctatctcaccattacctgtgttttcacaaattattagcaaatgtgatttgtgagtctgatttagcaatcatgcagtttatatcttacaatcctttaattattcttttatttaaaaaatacacctatataggtaaacacatatgtaatataaataacacgcaaatttgtatcacgtttacatatagatatgtagtactttgatgaaccctatgcatctatcaacgacagtcaggtgctttacacatgcaacttgaaagccttgagatattactagatgagaaaagcaaattataaacccatatatttagtacataccaaattttaagaataagatatatacggatatacttaggcaggtaagtgttcctatatatttctgcactaaaaaattatggaagtggaaatattttattataatgtctagttatccatgtgtcatgggtttgggagaaataaacttttcattttaaatactttaatattatttggatttttatatctatttttatagctaaggatagttgatgtacaaacaacaaagaagaacaaaaaatatataaacctctggatttaagaatcagaagaactgggttcaggctttagctctgtgtctctcagaaacaggagtgaatttaggtgagttgctgcttctatttgaatattcattataattttttccttaaactttttgttgagggttaacatatatatgaaagtgccttgcccactgctgtgcaaataacatgttaatattccagaaatcctcatttctttaacagataagaggaggaggaggaataattcctttcttttgggtatttttgcttaaagtccttgtgggagtcagtagcattccatgaaacagattttaagtaaaagcaaattagtacagtgctaaagctataactttacttgccacccactatcaaatgttatttgtggaataccattgtataaagattagcaagggaaaatacagataggcagagcaattgattttacatacttctcaaaaatgaaaactacaggtggatctcaagctggcctaacatcatccaagatttatcttacttttgggtggatttgacttggtaaggtgcattgcctgactacagagactattccctattcttccctctctgtcagcagactatttgctagcatgtcaatcatcagttttgtcattgaacgtggtctctaccagtggtaattaggaaagtaaattcaacagtgaaaatcagcaagcaaaactcatcaatcagcagctcttaaaaagagagatcacaatcatagcagcaaaagctgggagatcatgtccctcagggcattaggagttttatataaaaatgtacgtgatgactttgcaatagggacacccactgtgcaaagcccaatgtgtggctctcattttcaattcagatatcgtcagtctgaagtcttataatatgatcacagttacaacagaaagatattcaaatcataatgactgatgagcaacaaaaccaatttattactagatctgtctccccacacactctgaagaattcctggggatgtttacatttgctcatgaaaccatttgtattgctatgctaaaaaagcagaaactcagacatcagcacttgcaaccaatgttgtaaatgctgccctctggaagcccactggtgaggctgtgtccataccacccttggtaccattagtaatatggaggtaagctttaatcttgaaccaaaatgaaaaaagtgctgtgatagcaactccagcagtctccttttgtttagtacttccacaaacagcaatgcagtttctgctaatgcacccaagcctgggtgactctacttcaccaaagagctggtaaaccttcagtattgagcctagtttgggaaactcctgagtacaggctttaagaccacaaagaggccgagttgcagcaaatgcatcttagaatttacacacagccattttcccaaaggcagagcactggtgtacaggggaaggggagataacagagaaaaagtggactgcatattgtgcccaggatctattatcacttcagatctcagtaaatttgcaatgattttcttacattcaaaatgtcagaaagaatttatcttacttcttgccagtgggtctaaaactcacatgcatgttttgaggtgtattctcataatagtgaataagtctcacgagatctgatggttttaaaaagaggagtttccctgcacaagctctcttctcttgtctgccaccatgtgagatatacctttcaccttccaccatgattgtgaggcttccccagctacgtggaactgtaagtccaataaacttctttctttggtaaattgcccagtcccaggtatgtttttatcagcagcatgaaaatggtaaattggtaccagtagagtggggtgctgctgaaaagatacctgaaaatgtggaagtgattttggaactgggtaacaggcagaggttggaacagtttggagtgcacagaaaaggacaggaaaatgtgggaaaggttggaacttcctagagacttgtttaatagctttgtccaaaatgctgatagcaatatggacaataaagtccaggcggaggtggtctcagatggagacaaggaacttgttgagaactggaggaaaaggtgactctgttatttttttagcaaagagactggtggcattttgcctctgccctagagatttgtggaactttgaacttgagagagatgatttagagtatctggcacaggaaatttctaagcagcaaagcattcaagatgtaacttgggtgctgttaaaggcatttggttttaaaagggaaacaggcataagagtttggaaaatttgcagcctgacaatgcaataaaaaagaaaatcccattttctgaggaaaaattaaagctggctgcagaaatttgcataaataaggaagagcctaatgttagtcacaaagacaatggaaaaaaatgtctccagtgcatgtcagagacctttgaggcaacccctctcatcacatgccaggaggtttaggaggaaaaaatggtttcatgagccaggcccagggtccttgggctgtgtgcagcctagggacttggtgccctatgtcctagctgctccagccagggctgaaaggggccaatgtaaagtttgggtcatggcttcagagggtgtaagccccaagacttggcagcttccacgtggtgttgagccagtgggtgcacagggtcaagaactggggtttgggaacctctgcctagatttcagaggatgtatggaaatacctggaatcccagacagaagtttgctgcaacagtggggccctcatagagaacctctgctagggcagtgcaaaagggaaatgtggggtcagagcccccatatagattccctactggggcactgcctagtgaagctgtgagaagagggccaccatcctccagaccccagaatggtagctccattaaaagcttgcactgtgcacctggaaaagccacaggcactctccagcctgtgaaagcagtcaggagaggggctataccctgcaaagccacagggacagagctgcccaagaccatgggaactcacctcttgcatcagcatgacctagatgtaagacatggagtcaaaagatatcattttggagctataagatttgattttcctgctgggttttgtacttgcatggggcctgtagctcccttgttttggccaatttctcccatttggaatggttgtatttacccaatacctgtactccaattgtatctaggaagtaactaacttgcttttgattttacaggttcataggcagaaggtacttgccttgtctcagctgagatgttggattgtggactttagagttaatgctgaaataacttaagactttggaggactgttgagaagtcataattggttttgaaatgtgaggacatgagatttgggaggagccagaggaagaatgatatggttcggcttgtctctacccaaatcttatctagaattgtaactcctccaattcccatgtcatgggagggacccagtgggaggtaattgaatcatgggggctggtctttctcgtgctattcttgtaataatgaataagtctcatgagatctgatggttttaaaaagagagtttccctgcacaagctctctgcttttttctgccaccatgcgagatgtgcctttcaccttctaccatgattgtgaggccttcccagccacatggaactataagtcgaataagcctatttcttttgtaaattgcccagtcttgggtatgtctttatcagaagtgtgaaaacagactaatacaaagtgtaactgcatgttaccttccccagattcagtgcttttctatgcaattgattagaaacattgccactactgcaactgcatactgcaactgccaaaaaaaaatgtttgatggaaccactggttcttatactgactctatgtggcctgggacagctcatcatcaccccctaaacctactctgaaattcctcattcttcagaatgtgaatttcaagagggaaggcagcacctctcttctaagtttcaagtcggttttctttgcctcaggagaaactattttccagtatgatttgcaataggagtatacattcatttcaaagcaaaactacagtccatacatttgtggttgtttttcctacagaagctcaataggtaattgaaataatgtcaggaaatttaccagtgtgtttaagagccaggctccctggcctatgtctcagttcattatttattcaccgtgtaaccttgggcaagacacctaccttctctatgccttgatatgttaatctgagaacaaaagggatatcaacagtatatcacagggctgttgtgaaggtgtatttaaggtacaaagaataatgcttgacctatagtaaatgttctatagtttattttttactctgacacaggtttgtctcacaaatctgttatagttaattatatctagggacacattttaacagtagccactatatgtatatcatatcacaagaggtgacaaaaatggaaaagagtagacaggttctgcagaaaaaagaaaatgaaagaaagtagataaggacttaaaactgtacacctcaaatgacctttgcttaaatcctgcacttttgggttactacagacatttttccttcaaacactgcttaaattctccaacctttcaaggatagtggtaaattacagcattttaaaaataaaatcattgcactgtaaacatatgtatatcttatgtgtgttttgggattttttgttgttgttgttggatgatggctattgtagtctttttgagacacaaatgtatgtgatagctcaagccttgtcaactaaagacctccaaaaataactctctggcaggggactttcagagacttttaccttttcttttatatcaagcaactgttcccaattattcttttgtgctgtcatttataaacagtgaatggctatgaaggaagagcttttcagcaaaggaaagcagtaacatccaacccttagctgccacattctattttctgattcccttatttgagacagtcatgaaaatgccagcatttaaattgtaagacttagtgacgatatttcgataggcttctgaaaaagcttataggtacttcagttcaactcttttatcgaataatagaagttctttatattcattgtacaaaatgtaaaattcaaaatgcaaacgagtgaatagaattaaaagtcatctgcaatccaataagcagacacaaccatttaaaaaatattatgtgtatactacacacatgcgccagagacaactaattttcacacttcacaatatatttatcacaattagacagataggcagaattcctacatgttatataaataggagacaaagaaatttgaatcattctaaaaaccaatgttggtatcatttatttggcattcattaatactatatcatgaggactttttcatgtctttggatatgcttgtagcatgatttttaaaggctgcagaaatgtttttatatacagacaccatctttttcttaacctaaactctatttatttatttatttatttattgagatgagatctcactctgtcacccagcctggagtgcagtgacacaatcatggctcactgcagcctcgacctcctgggctcaagtgattctctcacttcagcttccagtgtagctgggtctacaggcatgtgccaccacacaggctaattttttttttaaattattcgtaaagatgaggtcttgctatgttgcccaggctgatctcaaactcctggcctcaagctatacatctgcctcagcctcccaaaatgctgggattacagatgtgagccatcgtgcacagccaagattatttaatgtgtttaacatttctctgttgctgaatattaggttgtttctattatcttttaattttaattaatattttgaagaactatctagaacataaaacacagtttgattcttgattatttttattggtaaaactaccaattaaaagaacaaatttccctccaaaaagcttcagccagtttttatttgtactagaagtatagtattaattactagttttaggcttagctagttagaaagataaaaatatcctattgttcttttaatttgcatttttaaaattatcgatgaaagtgaacatttttctcattttatttctttgccttttaaacattggaatgccattttacttatgtttgggaaattgcttcacatattttattaaaatatacattcaaaatatttccgctaatcatttatctattggtttatttgtcatggctttgaatttatcaactttgaaataccaggtaaaacattattcgcattacttatttttgtagggggtatttaccaatgcatttatagtatattttatcatattgttttacataaaagttattatttgacttctttaaacctgtggaatttatttgggtatatatgataaggaaatacaccaacttaaaaattcccaagtaacctctatttcccacaccattgtgtaactctcccatcagtagggcatataatgaactcagtttcaagactgaatagtctgttctgtttacctacctattaaattttatgcaaactaactttttacattattctattttacaacatattttaaaatcttgtaggaaaattacatttttgtatttttcaaagtatctttatttgaataatttaatgataatagccgctacactctgatacccctactacctgtactacaatgcttcctgattacattgaatttaaaaattattttgccaagctctaataaaaatccctgtgaagaggtgttatatgtctttttacatctataaattaatttgagaaaacataaatgcttacactattctgtttttcttccatctcttaatttattaaaaggcacttttcgtttattcaaacatatggtgtatctatggagtgtatctattgagtcactgtgttccagatgctactcttaagttttgggaatatagcagtgatataacagatgaaaaaaccctgccttcatatggtttatattctaaacggaacacaaagacaatgaaaaacaaacaactaaaagtaaaacttatatcacagctttatgaaacctatgtaagaaagcagaagacggaaggaggataaagattatatgtgcctgtgggatgttgaggaaatagctcactgagaaaggaatatcttagccggggcctgatgctggggacaccactagccagtctaatatctgaaggaagagtgctccaggcaaagggaaccaactagttgaaccttttttatttaatgtaacagcctttcaggtttttcttatttagatggactctaatcctaccttgcagagttattttgatgtattttatattttttggtatgaaaagtaaaataaattcctgtaattagtatcattaatattattgtaccatctaggttactgctgtttgtagaagagaaattgattttttctacttctcattcaatttttattggtactagaacactatttaaaatagatacccattgacatgtaagcaaaaatagaggccttgtctagctctccctactcccaattcaggcaccccacaagtaaaaacttactattgttgcctatgtcttcagatggttccatccatatttctaaatactatgcttaggctaccatttagtgaattttcagttttagatacttaagaaccttctcccatcaccatcctctatacatacttacttctgatagtgttcccaatacaattatattatgatttgtattaaatcaatattctgtgattacattactataactaagcaagtattcagatctgtacaacttagttatgatgtttaatttttttcttgaatgacttttctgattttgttttaaacagttaataattatttattttcctgttcattttttcctaggcagactcagatgttttgacttaatgattttttgacttagcaatggtacaaaagcaatacacattcagtttgttcctcaacttacaatggggctacatctggataaactcatcctaagttgaaaatattgttaaatcaaagacacactttcaacatacagtattttcaatttacagtgggtttatcagaacatagccccatcaaggaggggctgtactcgtaagtcaaggagcacccatactcattatgattccttctctccaagactccaacaaaccttataattcttctcaagatcaacacattgagaaatctgtaatttctattttgttttgtttggctttgtttcattgttttctttggtgacatgtctctggggcatatatctggacggtgaaatatattatatctggaggatatgttgaatatgttacgtcctccagatatacatggaatggaggattgacaattaaggctgaaacaagtgtcccagagacaccatcctggaatgtccatcctcctgttccaaccttgactagtggatcttgaggccaactacatcactgttttcttagaatttcccttcatcttcctcctggggattccctttgcctcctacctgtattggattctctgtgtccttgattttataactccctctttcaaagttaattctatccggaaggaactcatcttccagtagctcagtggtcagcaaactatgggcctgcaggataaatctggctctccatctatttttgtaaaactcacaagctaagaatgatatttacatttttaagtggctggagaaagaggaatattttatgacatgtgatcgttacacgaaattcaaatttaagtgttcacaaataacactcatttggaatataggtatacccattcctttatattgtttgtagctgcttttacactacaagggcagaactgagtggctgcaacaagaattgtattgtccacaaagtctgtaatatttattaactgtgcttttacagaaaaagtttgtcgacagctgaaacaacccacaaagtgtggagcatgacatggaattgttctgaaatttttgcatctaaaaatgtctttattctaccctcatgtctaatttttagtttagctaattatgaatttctaatttgtaaatcacatttccacaaatattcaaggtcttcagtgttcagggctgttattgagaggtctaataacattttagctctctctcctggtatttttcctctttataagttatgttgttatgttttctcaagtgctttagaatcttcttaatttattttactgagatctcagtaatagtgtgttcattttttattatttttaatctggtaatacatgttcttcaattctgggaagcttctttgaagcattcctttgataattttctcccttccattttctcagtttgcccttgttgcaactctttttatttagaaattgggccttccgggctgatcttttctcttttatctcctattttatattttatattttatctcctgatattaattcctttatattttagttgtctctgggatgttgtttcaaccttagttgtcaatcctccatttcatataaatatacctcttacagatataacatatttaattctccagatatatacaaagacacatacacatgaacaaacacaaaataaatagaagca

SEQ ID NO: 2511 - DNA, 6778 bp, Homo sapiens
gcctgttcttccacttcctcaaattcacaagagtaaaaaagacctcatagacaataaaagaggctgccagtgtcttgcatcattctagctgagcttcttcattctccttcttctccttcttccacaaagacccatatctggagaaggtgtacaactttcaaacacaagccccccaccccctgacccttggccttccctcacaccatctccttccaggggatgaatctttgggggttggtttgaggtcttagaactctgggggatattcccctgagcaaaacaaacaacgtgagatttttactcaaacagaaacaaaacatgaaggggcatcctcaaaatcctttgctaatgacctggctttcaaggcatctgtctggcctgatgagaatggacatcctggatatgctgggagaggcctgaaaaaagccacacacacagtaattgccattttatgactgtcaatgccgttactttaaatgttgtcatttttgcactggctactgatgatacagccatgctgacattcatcaccgcaaagatgatgattccagtctctggttcctttcctgagtcaggaacatttgttttctccaatttcctttcagacttaaaattgttcttatgctttttttcccacttctgtaatacagaattctgtttgttttctaaaaaagattattctataggaatctttatttgatggctaatttattttctctgtgcattcattagtataaacctgaatgttcagctggtgactgtactgttgagtgggaacccattgtttccactggtagcattgataactaagtggttactgaaatttttaccactggctggacatcttcttttggatatctgtggttttatttcatcactcttctttttattcagtaaagtgctaagggaattagtatcagggagatatggcagataattctttgcattttagtgagtttttaaaaatacaagatagaagtggattaatagcacgaataaaaaataagaatagtagatgtagcatggaaagagaataacattgcagcccccttgagaccaaattacaggtgggatctaagggagtgcaagtaaagtgggattttatgagtctaaatgatgtgatttagataaaagtgattcttaaaatgtggttattggtcacacaggaatctctgagtccttcccaagagtgaagcacatgaatatgctgatgatgaagtggggattagtaatagaaagagagctaggcaataggtttaagtgtattccccactacagatttaatttctacatgaaaaagcacgagaacagatatttaaacgtccttttattactaaggtgaaatattggcattttttcaggcagaaagaaagagactgtatgtggtcttcctggacctttgccttgccaaaatgttccccaacagaaagatctgaagaactttgtagtatcgaatgcacaacagcatgctgatatttgaacagatttcttctgtcagctttacattttgccttggagaaacacttagatttttctgttgtgctccctgtgttcataacaatgacctcaccacataatgtggccagaaattcaaatgacttcaggggcctagcaggtcaagtaaatgaataaagcaagccatgtaatatcacagtcattgtggtaaatggcaattcatagtgggcctttgtatcagcaagacaggaaggagcaatggggactgtgagaaattggagagggtgggtgctgtcaaaacagggtagttggtaggcagcaactgaatttgagctgtgtggggatgggggtcctagatacctaggatttgatataagctctctccaaatttttacatattgacaactaactcaaaaacttacaaacactgtgctaatcaaatgaaacatgcctgtgagctgcattcaatccatggggcattggtttgcaagctatgttcttagaggtggtatgattttgtattgaaattaaatataaccaagagtatgtcaatttttgaccttggaacctggaccttttacctcatttatattctgtatttttgtatgtggggctttttggccagtcaaaatagaaagtctacagcttccattttataatctaacaagcaacaagaaacaacatttgaaaaagaaacaggaatatagccattttttctagcaccaataaaaatggaaatgtttttcatttgctttaagtcattaatcagctgaaaaagaatagaaagagaatttcattccataaagaacttcacctaaaactctcagtgaagcaaaacaaaactccatgtaactcactcttagctttaaatctttaaaaagtgtttcgaagggatattgagtaaaaatgcagttatctattaaaaatacaaaatgctatattatatgatgctatgaattgatactggagctgataaaacattaaagtaattattccaaatcagtgctgactgcaaaagcaatatttccaaagctctagcttattttctgcggtcttttaattcccttgaaatagctttcttcaagttgagcagcaatttgggacaaacattattctattgcacagattatggcatcttactctggtttacacacacagagcaagggcttacacacctgaattaagaattaactagcatgtggggacagcaatagggatagtcctaccacagacgaaaccatgcgctctacacgtccctggataaaatgtgacaagttagcccttgaatttgggtccccatgtcaccaaatagctctatatttaagttgtgttaatgtggtacgtttcagtggcataatgacccattcttatcgaggcctttgttccatattttatttgtgccaatctttcttaggttatgagccctaatagtttatggcagcagacaagagactcatttctaacccattaaattcaaatggactttcttccactgtccatttcatttttggagctgttataaactaccgaaaacatttgacaggatcccattgtggatctgatacacttaaacagtaaaatgatatctaaacatctgaaagccaaagaataacctagtgcacgtgttcattcatttgtagaatttaagccattgtattatattttccacttggaaccatgcctttagatacaaaagtgtaaagtaaaaagcaacattatcatgggatgtgagacggtaatccaaaagttgaagaccaatttttgttatccatattttggaagtatggatactgtttattttaatatcacttctctcatgggtcacttttccttagataggtaggtaggtagatagatagatagatagatgatagatagatagatagatagatagatagatagatagatagatagatagatagatagatagataatataatatattttcttctttcttaacctatgagcagagactttgatgatggaaattactttgtaacattccccatggagcctaggaaaaacaatagaaaaaaagcatgaaatctttttctcatagtgaaatagagaagattctaagattggaaatctgtgtatgtggtgttctatcccaaataaagagaatttagggaattcaggcaacaatttttttcctaattggaaactttgttctgatcctgagatgcccacacaccccacaggagacgcagtgctggcccaccacagtgtttggaacacggtcagcattcaggaaacacattcaaaatcgtctaactgaattccactatccacttgtgaatgcaaacaaaattcaaatttccctgaaaatttattcaacttctatatgccaagcacactgctaaaggcttatcttctaagtatatgcaggcataccctactcacacaaatagcttattaccagagataggaaattgcaggtaatttgggagaaattgtcatagccaaatttatggaaaaaataaaataaaaacttctctatggcctcttgatttaagaaaaaaacagaacaatacaaaaaaaaaaaagcactaaaacaggatttatctgagaatgtctttccaaaagggaagatgacaccaatctatataaaacgtcagtggatttactgagaatccgagtggaaacttttaaaaccttaaacagactctcctacagcaaatagattctctatgtgcagcatgaggaatcactgcatagttctgctccaccaataatatgattggtacagcaccaaaccatggcaaagttagatgttaaagaacataatgttgcaataatgatgttatattggatcttatgcatgaacaaatggaaagtaataatttatcaactgtgatccatgattaaaggcctcattatcactaagaaaatgaacttaatgaaaaaaattataatgagcaatgacaatattcctataaaacctccctctgggtatcaagagacatattacctgccaaggccagattttactttttaaggtttcctctctctcaccaaagacactagtgggcacagaggtgacactagagttagaatgttaccagagtcatttgcattagacagtttatctgatcatgaacatgttcccagggagattagaaaaatgggaagcaggcctctaaagatcctccttggacatttgtaaaaaggctggctgcttctccaggaatgtctgaattaagcaagaattgtgccactgaaatagcttcttgtttttatattaaacaaggaacgattgtgcagtggatgacctggactgaaagatgtatgatggtcaagtttaaacatattaattcctgattgttttcttaaatacccaccctagtcattttttggaaaatattgccagacatatttgacatgaattcatgtttattctggcttctgttcccaagcagaagtggattaaccctggcaatggctggcttcactaactgtacttgcacccagcctgggctgccatctgctcagccaggagaagcagggagtggggtgtgggccctttaagttcgctcagggcacactcattcagtctcccctgaggagaccttgtccccctttgtggggtgaatgctggctgttgcaggccagaggcagtgccaactggagactcatcctctcagctttggtcagcttcagccacgtattcttcatgagtgctggcttctgaacctgcaggatcatttctcagtcagtttatggtgcagggtaattcatttaaaataaagcccattaaaaccccatggctatagaatgggttttaaatagattgtcctggagacacatcattgtatagtctttgcttccctctcatgacctatcttggagtagaatttgtgtactactgtccttgtctttgagtgggtatatgtgtgatggtacagaaatacagtcacatattatattaatatatatagatggataggaaaaacctacagccataggtattgtccaataactgattctagaggtagaactatagagtatacatttccttttttcttgctttgatgatatttttatacaattttatatgctataaaattttcaaaaatatatttgctattttcatttgtagagcttggttaggtttttatcagctcttgtgcccactgtacaaccagattcccctcatctaatttaaatgtcttccctttttcaaactctcctttatgttttcctttttttttcctcccatttttctacccttcacaaattccttcttttgcttctgtccaggtaacccattctgcttgcagtatcattttagcacgtacaaacacaaaataatgggaaaaataaaagcaccttgttccatgcaattcgtatgggaaagttttgggtgtcaaaggtcgctggggatagatggggaggcagaaatagcttgggaaaaggaagcaggaaaaaaggaaatctttatgggaaatcaattacccaaagcaaggtgagtcacctagaggtgaatatgatgttgttattgtcctcccttagtgtacagcacagtttttgctctcacagggtttttctctttaggatgcgtagcaccctatgcattaaatacatagcatcctaaagacaccctactcaccttgagtctgtaggctctttcctgatgagggcactggccatatatgaatggaaaactcaactcatctcctcagctttagatgttgctgctgttcagctggatttgtgagaaatatctggattactatcaagaacatttagcaagactcaaaagagagaggcaagcagaaccaaaacccaaacctcaaccaatgactagctgaataaacaattctttggaggaataaggaaggtatttctggatgtattctgagaatgctcttccaaaagggaagatggtaataatggacttgttttgatttcatggttgtgatagaatgtacttccatgatgtgaaatacacttctggcagataaaatgcaggttgtaatttgcatttgtacatcacagggtaaaagaatggccatccattctgaggaagagtgttctgttctctaagatgctgcttaaccaatgttatccaaatgccatagcatcatatctccaaatacaagattaaatcataaggattcatgtaaaacagagtatactgagctgttctcagaaaaattaatgatgtgtttattgtaaatctttattgcacagatgagcctgacagtccttcaatgtataattttcccccagcatctagtaatgcataagtacttgtatgttcttctgattaccaaataaaaacaatgagttaacctcttaattggaattggaaaaatgaaaa

SEQ ID NO: 2512 - DNA, 363 bp, Homo sapiens
ggtccgagaatgtcgaccggggcgcgggctccatccgggaagccggtggggccttcggaaagagagagcaggctgaagaggaacgatatttccgagcacagagtagagaacaactggcagctttgaaaaaacaccatgaagaagaaatcgttcatcataagaaggagattgagcgtctgcagaaagaaattgagcgccataagcagaagatcaaaatgctaaaacatgatgattaagtgcacaccgtgtgccatagaatggcacatgtcattgcccacttctgtgtagacatggttctggtttaactaatatttgtctgtgtgctactaacagattataataaattgtcatcagtgaactgtg

SEQ ID NO: 2513 - DNA, 3009 bp, Homo sapiens
caacattctttgacaattttattagttcttggaatccaaaacactgaggcctgagacatccaagtggagacacagctaaggccgggattatctgtgtggtgttggaggcccttcgcaagtgcttaacagagcccctccactggctgctgcaccctctgagtaaacatccatcagactgagtgaatggaatgcaatttagatgagttccttctgaaaagctgtcagagagactgtgaaatgtgactactttgattgactctcctactttctctctccccaaataagccagattggcaggattcaaaggagacataaaattagttattattggctgattcagcaataaagccaggaagcaagatctgctaagtggaaagtattctgggactaggaatgagaaattatgattataaggcaaggcttaactagctgaggaagtttctccatgccggcagctgataaactgctttgtaactggataaaatgttggtcttagtcaggctccatgtcatcagaagatccataagttgcagaaatttgagcagttggaaactaaattgatattgatgatttgaaaacattatcagaagaaagtaaaaagtagaaattaaggaaataaggataacaaaaggaacacttcagagacccaactcgaatgtttggacttagaaagtattatagcatttaaaataccagtattaagagttattttcagaaatgctctaaggaatgtttctattctatgtgcatccctgtgcccttgtgttaggggttgaattgtgtctacctctccaagaaaaaaaataaattgaagtcctaacatccagtacctgtgaatgtgacctcatttagaaatgagtctttgcagatgtaatcaagtaaagaagaggtcattaagtggactctaatccaatatgactgatatccttctaggaagaggaaaaatgccatgtgaagatggaaatataccataggatgacagaggaagagattggaatgatgcagttgcaagccaaggcatagcaagatttgatgtttatcactggaggctgggaagaagcaaggagagattctacccagagtctcagagcaaccatggccatgatgacaacttgattttggatttttggcctccagaactatgagagaataaatttcttgtgttttaagctattcagtttgtgatacttagtaggggcatccctaggaaactaatacaatttatttatctctttcttatatcatcacatcacttaaccagcaaacttttattaaacatctactctgcataggtaattctgccccttcatttcacagctttgagaatcacactcttaacacaaaatttgtcacttagaagatttacaagtaagaagagacagcacagcacaggatactttgctttatcttttttccctcaattgtactgaagacattcccagtagtgccatctttgagaaagaatgatacatatagatgaatattttccagcatttatgggtttttggctcaaaggtgtgctaaaagtgtcaagttgctagaagatctctagataaatggtatgcacgatgctaggcttaaaaggcatgtttagtgataagcccaacaccacctgttatcattaacatgacaccagagttagaaggtataaaaggttctcagctgcatgtagagatttactaggatttactaccatccccaccaaaaccagatctgcttcaaggtttggttgttgtggggcaaaacaatttcgagacaattgctgaaaatttgattggcatggtcttttagggcacattagtgtgttgtgatgagaatgactttgaaaacccttggaaagttataaactgttcacaaaaggaaggaaaagaggaatatatataccttctaatactttactgattctgtttgtgtctcttctattcacaaaataaaaatttggaagagattcagatgatcttttaagtccctatgttgattttggttttttaaggagaggaaaggtacttggaagcagtaacctgtgtcaggagaacacttatcaccacccctagatatgacacctgaaacacagactaatgcaaggggacaggtggtagagaaggttgtttgaaagaagcgattgtgaccttccagatgcagaatttcgggacataaagatgtcatatagaagaagaaagcttaggatcctggagcatgccttagaggttctgcagcagtggcaggtggtactgaatccagaataggcaacagttagggatgactgagtccatgattcagacatggagatcatcatacttgcaagggaaatatttaagggattgtgtttgaatatttatgtaatactcatcatcataaaaaacacaggcaagtgtaacacccacagtcttataaagcagttacacaatcaagactgcaaaaacaattaggtaacaattaacattatgctatgaagaaaatttcacatatcaacactaaccttaaacataaacaaactaaatggtccacataaaatatataggctgctggaaaatattaaaaaatcaaaatccaaccattggctgcatacaggaaacccacctaactgataaatacacttacagattcaaagtaaaggagtggaaaaagttattccacacaaatggaaaggaaaagtaagcaggggtagctatacttttatcagataaaacagaatctaaatccactacaggtttttttttaaaaggccattatgtcatgataaagaatcagttaaacaagaagatataacgactctaaattatatgcatccaacactggagcacccagattcataaaacaaatactactagacctaagaaaaaaatagaaggcaatgcaataatagtacgatcttcagtatcaaactgacagcactagagaaatcaccaaggcagaaaatcagcaaagaaactctggatttaaattgtaccctggacctaaaagacctaacacacatttaaagaacattctatcctattactacaggac

SEQ ID NO: 2514 - DNA, 762 bp, Homo sapiens
tctatttttaaccctaatcctttcctttgctgtggttatggccctgagtccttaaattataggctctcctgcagtttcaaaaagctaattcacactactgtgtgcattagaaaggtggtatatatgatattccactaagggaaaccctaggaacattaaactcctactagtaactggtcacgagtcagggctagaactgacactagtcatttttcttcactgacaagttttcattatgtggctttcccagaacaatttagaaattgatctgcaactgatggaagctgggatgaattgggcgcataagtgaacccaaagcatcagagcaaagtcaaagcgaacatctggctccagctttgagtacaaggagagatttgtgtatgattgagagcaaggaaaaaaggctttgaaggggaattcaaatattgaagacacaagagaaaaaataaataataaaatactgtgatctctttgaaattgagaatgaagtgaaatgaaagaaatataaaaagctagtttggccctgtaggaaagatgatctgttcttcctctgacacagaaaggaaggaagaaagaacatgctggaagcagagcaaagaagagagacttgtgtttccatggaataatcttgggatccatgtggagtgcaagagattggaacagaaggagttctcaaaaaataaaaacttcgggcgggtgcggtggctcacgcctgtaatcccaggactttgggaggccgaggtgggcggatcacgaggtcag

SEQ ID NO: 2515 - DNA, 388 bp, Homo sapiens
cgggagtgcccacacctgatgtctggggtttgggcttcacacacaaggaggagcctgacctgcagatgctctgctactgcacctccagatttttttgcctttgtcttcatgttggaggggaggttcggggattcagataatcaagtaatacaaggtaattgaagataatcgaggaaatgaaagaaaatgaaaattagtcgtgccctgtcattcgattattcagctttaactagcatcaacattctggaatgttgctttacttttatgtttatggttgtatttatatattaaacatctattcataatatgtcatgtacaatttttgaaactctagccttacatttttttctctggatttttttttgagactgggtctcgctctgttgcc

SEQ ID NO: 2516 - DNA, 8191 bp, Homo sapiens
tgacaagataaatgaggccctatcagccagcaataagtaccacactgagcactgagacagggtaatgagatctggcattgctgggtggctgctttccattggatggtcagggaggcttcttggaggaacaggatttaacttgaggccaaaacggcacaagggtagagccatataaaactaaggagaaaccattttaggatgagggaacaaaccctgaaggtgtgaacaagctcggtgcatctagacatgtaaggaaggttccagcatgtgaaggagcgaggacggagaagggtccggtgaggtcttacagcaacagagggtccagccacatgaggctgagcagccaagtgatctgcctaggccagctccccttcatcttctgccatgagtggaagcagcctgaggccctcaccagaagcagatgttggcactatgcttcttagacagcctgcaaaactgtgagccaaagaattcccttttctttataaatgacccagcctcaggtattcctctatagcaacgcagatggactaagacactcatgcttcctttcattagctatttcaagctcaaaaattgtgagactgtgccaagaattagggcaggatcttgtcattgcgaacttacaacttttctatctaaagcaaaaggtcctaatcccaaaccataattggaaaggtgcctctactccaacctcattgcccttcaactgccccttctctgcctcccattcccctcttactcaccgaaagacaaatgagtttaggctgggcacagttagccatcgttctcagaaaaacaaaatcttgctgcttggtattctcacttagaatcccttcacttagcttatggatcaccctacacagattcctgacagctcactgggccagggaaccagccagatttttgagctacatctgcagtatcttttctactcaggcagctggcataaggtgggaaaattcattaacatgctaatgatgtcctatttaaaattctagtcctgattattctgtgattaaatctctccccttgacgtcggtttcctttatagctgagttacagtgcgaaatcaacaatattaataaagtacaatacagattaccaatttatacacaagggatggtgaaaaactgctgcgtaaatctgagggctgtccttttaacttgaaaagcagttgtaggccgggcgcggtggctcacgcttgtaattccagcactttgggaggcctaagcaggtggatcacctgaggtcaggagtttgagaccagcctggccaacatggtgaaaccccgtcactactaaaaaaatataaaaattagctggcctataatcccagctacctgggaggctgaggcaggagaatcgcttgaacctgggagacggaggttgcagtgagcagagatcgcaccattacactccagcctgggtgacaagagcaaaactctgtctcaaaaaaaaaaaaaaaagcagatgtagcaaactgtaaaagttgctgatttttttcattccacccttctttaaataaacacacacattggaatccacaataattaaatgtttatagttaatttccataaatattcaaggcttggaagatagatttagcttttccttctatttcactgcacttaacattgctccgaattcaaatgtgttatcctgaagtctcaagaacagctgacaggagttaaagcacacttctttatcatctctttatagagattgtgtcttggcaacaaaagccaatggattcggtgatgaggtctgtctccctttgcccttgagtaccttggcatatttcagttccttttctatcaccgtattgttctattactgacactccaaactgaatatccaactcagacaactcaagcaccttccaagaaagacaaacttatcactaccctcattaatttggaaaatgaataaagaagcagaagattcaaggtccagatctgcaatctaaaatgcaggaagagaggactcattcatgtgtcattttaacatctggccccagtaaatgaacaaatattgatggtatagtatatttactattttaaaagacatcatgctggacaccaaagcagtacagtgaaacctaagaacaatgttctgacctcggtggactcacaatctagccagagacacaagatacaatgatattttaagtgatgcatgcagcaaattcatctcaggtgcatcattagagatacacttcacatcattaaaaggtctctgtacgagagacactgctaattgttccctaagactgcaaatctccccttttgctatggaaacagaattcatcactttagtggggcacattgctgcccagggtaaggacagctcccagcccctcttgcaagtagctgttaccatataacaaggttaaggtcacagggatgtggccgtagcagagatgtgtgcagatttctaaaagcgtacttaaaggggatagatgagctctcttccttctttgttttttttctgactggacttggacatgcatgtggctgggtcagccaggttggactgaatggcacatgttgtggggcagagaagaacaagatagaagagtctgggttcctgacaagcagggtggcttgatcatccatgagttgcctttttcccctgaacgctgcattccacaactattgttggaaatcaaaatctttttttaagaatactacatattgctcatttcttaaatggtttcattctctaaggctaaaaagagtcatggtacatgcatgcatatgtgtatgtgcataagtacactctcctttgtactttctctacatttaaacttgaacacagagctccctctgaatttttaaccctcaaaacacaaaaaaagctgaatatggactttgccccagttttatcacattttaataaataaaagcttcaatgtattcaggaattcattatttatttgtttcccacactctcaaccctagattattaatttggttcacctaaagccaactcacctcaaattggttaaaaaaaattaagcacgtgtaaatcaatgtatagggaaagggtggctgatccagcaaaatccaagtgtaaaaacataaagagaggcttcacaacagtaatgagccatctgcaatttagaatcatccatggtaacaatctctcattccatttgtttatgttttattcatcattgtgaaaatacttagtgaagtgacgatgatgagattcaaaaatactgcatggttctttttttaaaaagagatattaatggctttcaggggctcaactattcaaatgaaaatattgctggactaaatttgctcaaatttgttcacttcctcttcattcttggatataatatattcttcattttatgacaaaaaactatgtggtgaaaacatgagaaattccgtagtttccatcgtttatacatttaaaaaatcaatagcagaaacctatttcaaatgtacaatcctcattcctatcatgacagagtaaaccaggctgcggtgtcttgggtgagcgtgttgtcattccctagtactacagttatttagcctcaaacgtactgtctctagttacatatacggcaaaaacaaggcttgacctttaagaatgaaaagaaaaaaagataagtactgagctgttaagccaacttaagggtattcattacaaagaagacagaataactactgaacatactctttgattctaatatctctatgaagaaacctctctctacacaaattgatagacattttaaaagaaaatttattcatcccaaattgatgcacttaacttcagctagctgattttatatttctcaatctagcttataaatactactcttcatttacttcaatttacggagtatttacaaaagccctatttcaaatctggttcctatcagccccgttttttcttatttcttcttaaataagcatactttgtaaaatatagccatttattcatatatatatttctttcatttgttttagtaaatgacatttatttaggaaccattttttaagaaataagtttttaccatctcaatttgcactgaaccagcgtcttctgagaccatccctctgggtgcaaatctcagagtaagctcagttactcctaacgactggaaaaggaaagaacacaggaacacttgaactcctctgacaagcagacactttggctaaggcggcattcacatcttctacatcatccttcctggggaaagaagctctcagaaaagtccacacatagaagagccactttatggtcttccctcaattttctcagatcagcctgatttagtctatgattgtgcagacaaggagacggagccaagggacaaaaggaagataattgtcacacaaagaaaatgctcaagaccttgccaagggagagactgctctaaataataacaaggctattagcaaacacaggttgagacagggaacagaaaaagaaaagatgtcacatgtgaatatgaaaacaaaagctgacaagtaattccattcggtttgccaaggcacctgccaaaaatgtccccaaggaaaagggccatgtgctccatgacgctcttcacagtgacgttcacataaggcacagaacattctgcctggccacaaaacacaacaaatatcatcaatatcttgccggggaacagttgtgcactacctaccataggcagtctcctggtgctccacttctcttctcagtctgttgtaatcttctttaacacttcccagctttttgacattcctggaactcaacaccaacagcttgctgaggagtccctccagcccttctctctctgatgttaatgatctaatctcctcggtgaggtctttagccgtccagaaatggtttcctacagcacgttgtgggagagaagaagggaaaacaagctttacagcatccacacacatggaagatctagcagcagctaatgtacattcacagcatgggcaaagaaactgcactttgagattatgtacaatttccttagcagtcctctggggaaagaacctggaaaaatattgctctccttaaactggaaaaatcaccgtcttttttatcaccttattcttgttatgtccattttaggagttccattggtgaagccatctcccgtaaagtatgatgacccaaaaatgtcccagtggaatccagagaaaccacaatgtgtcactccattccaataatatacaaatgtcaaagagatgacatattatagcagtgtggaaggggactgggccatataatcagagttgacctaaattaaattcctcccctgttactcaaactgtgtgacctggagcaagaaaattagcacatctggggcaaatttcttataaaatataattgcaataacacctgactcataggtagttacaagaataaacaagaaattctgtaaagcactgagaaaaatatatgataaattaaatgtagcaagattgcaggatacaaggtcaatgtacaaacatcaatcttatgtctaaataacaaaaaactagaagatgattttttaaaaaatacaatttacaaaatattttaaatctcataatactgagggatactttctttaaatatgtgcaagagctctacagtgaaaactatttttcaaaaactgctgagacaaattaaagacaaataatttaaaagatacactgtatacatacactggaagttcaatattggtaagatttcaattttccccacattgattcattgatttaatataattccaatcaaaatgttatgaggttcttttgtagaaatttatgtgcttattctaaaacgtctaagagtgagctgggcatggtggctcacacctgtaatcccagcattttgggaggccgaggtggtgggtcccttgaggtcaggtgttcaagaccagcctggccaacatggcgaaaccctatctctactaaaaatataaaaattaatctggcacagtggtaagcacctgtaatcccagctactcaagaggctgaggcaggagaatcacttaaacccaggaggtgtaggttgcagcgagctgagatcctgccactgcactccagcttgagcaacagagtgagacttcatatctaaacaaataaaatctagaagaatgagcccatgagtttgaggctgtagtgcactatgattgcacttttgaacaggcactacactcttgtctgggcaacatagcaagtccccacctcaaagaaggagagggagaaagaagaagaaggaggaggaggaggtgaaagagggagggagggaaggaaggagaagacgaagaagaatgaagaagaataggaagaaagaagaagaaggaagaggaggaggaggatgaccaaagcaatccttaaaaagtgagtcttggtttcaagactaatgctaaagccactataaatcaaggtaatatggcattgaatatacatagacaaacagatcgatggaatagaataaacagtccaggagtggattaacacatatacagccaaccaaagtgccaaagcaagtcaatgaggaaaagaaagtattttcaataaatggtgctggaacaactagctatctacatggaaaaaatattaaccttgattcatacctcaaaccacacaaaaatttaattaaaggtggatcacaggcctacatgtaaaagttaaaactataaagcttctacaaaaaaaaaatgaatatttgattgactttggagtaggcaagaacttcagataagatacagaaaacactattttaaaaaggataaatgggctttatcaaaattaaaaacttctcatcaaaagacacaactaaaaaatgagacgacaagtcacagacttggagaaaatcattgcattatgtttaactgacaaggaattgaatactacaacttgacaattaaaacacaaatggtgccattgaaaaatggtcaaatgacttaacaggcattttacaaagtagacgcacaaatggctaataagcatatgaaaaaacatttgacatcattaatcattaagaaaagaaaaattaaaaccataaatattccactacaagcccactcaaatgtttcaaattaactcaactaaaaatgtcaacattcacaagggtatggagcaactggaactctcacgcatgtaaaatggtcccttcaagaaaagttctgccagtttctcataaagttcaatgtatacctaccctttaatccaacaattctacttccaggcatttacacaaaagaaatgaaaacatgtcatcaaaaatatttgcactcaaataaatggtcacagtgtcttatgcctgagagccagccccatactggaagcaacctaaatatccatcagcaggaagatgcaaaaataatactatagctatgcaatgaaagactactcagcaataaaaagaaacaaactcgtcatacatgcagcaacatgtatgtgtctttttctttctttcttttttttttttttgagacagagttttgttcttgttgcccaggctggagtgcagtggtacgatctcagctcactgcaacctccaccttccagtttgaaactattctcctgcctcagcctcccaagtagctaggattacaagtgcccaccaccacgcccagttaatttttgtattttttagtagagccggggtttcaccatgttggccagactgttctcaaactcctgacctcgtgatccacccacctcagccttccaaagtgctgggattacaggcgtgagccaccgcgcccagccaacatgtacatgtctttagaaaagatgcaaaagagtagtgccacatgattccattaagttctagaacagccaaaattaatccatggtagaagatatcagaacagaggagggacgatgatgactgggacaagatagggtgttgtttcttgagtgatgagactgttctatctcttggtagggctgttcgtaacacaggtgtcaaaattcaagaactgtaaacacttaagacctgtgcattccactgaatataaaccatacctcaattaaaaagaggaaaaattaagaaatttttaagcatgaacattgaacaataaataaatatataacattaatgagtgtcccataaattagttagtgttaattagaaaaccccactgtgttttctcagaatttatagtaaccataatcacaataatagctacaaactttctcacctttaaatgtcatcacaactttaggaaacag

SEQ ID NO: 2517 - DNA, 6755 bp, Homo sapiens
agcaggcactttgagggtggggaggatgagacaggaatgtgctgaccgtggtggctgagaggctacaggaggcactctttgaagggaagttaaagacaaagaggaagaggctgtatttcattctcccagatggctcctgccagcctccagagaaaaggcagctttcttctttagaaaattggcaggacaaaagaaggaagtcgacttggaaagtccagcgacagacctcgtgcccctgctctgggaggccgcaggtcaatggctccccctggcttcaggggacacagctcaagcctggaaggagcccatggccagcctgaaagccttgctcacacccagcatccgcagctggggcaagagcggctactcccaagacaggaaaagacacacagcctaactttgccactgtgaagggagacttctctctaatgcctaactagacacttatcttccaacctcctcaaaatgccttcaatagaagtcccaggaagacacggagccccagccgcccactgactcctacaggatgcagctgcgccaggcagcccatcccagggggcccaggccaaagaggggccagggtgcttcccctgagaatgaaaagggatgtcgggtagagggggagggtgatgtgggactcgctggtggctgttaaaggagctcgcgtctcggttcctgcaggaaaagtgctttgagcactcgcctggcctggtgaagaaggaaggcagttggcgggcatttttggaagctctcaccccccatgctggtcctggtaccccttctccagggatgcggggcccacattcatcacagtggggttccatagatgatggtcctgtcatatcagggttcccattgaagggggccctttttggcactttcttttattccattagtctgtttgcctggtcacacattttattgctttttcccgcaaaagaatcaatgtgggaatttatttatttatttattgagacggagtctcactctgtcacccaggctggagtgcagtggtgcaatctcagctcactgcaacctccgcctccctggttcaagcaattctcctgcctcagcttcccaagtagctggaattacaggcatctgccaccatgcccggctaattttttgtattttttgtatttttttttttttctgagatggagtctctctgtgttgcctaagctggagtacagtggcgtgatctcagctcattgcaacttctgcctcccaggttcaagcaattcttcctgcctcagcctcccaagtaggtggaattacaggtgcccactaccatgcctggctaatttttgtattttttagtagagacgggatttcaccacattggccagattggtcttgaactcctgacctcatgatccacctaccttggcctcccaaagtgctgggattacaggtgtgagccactgcacctggctgattttttatatttttagtagagacgggtttcaccatgttagccaggatggtcgcaatctcctgacctcgtgatccacccaccttggcctcccaaagtgctgggattacaggtgtgagccactgcgcccagccaggaatttatttttaaattaaatttgatttatttagtttcctaacccttttattgtttttaggcaattttttgaagtataatatgaataagaaaattatggtgaattgttacagcatcgagacctccaagaccaggacatagaacaatcccagcccccagaaacctccaccccataaggctccacaacccctcttctaacacacagattaccttcagctcttcttgaacttcatataagtgtgaaactcacccatgctgttgaacacagcactgtttcattcatgtaagcggccttatagtattccattatgtgaacgcagtttattatccgttctgttaatcacagtagtttttacctgttgtgagtaagggtgtcacaaacagcctcatgtgtactttgtggcagatggaattcttgtacagatgtggaacatacactggatttgaagtgctgggttatagagtatgcacatgctcagctttatcaaacagggcttaacagcttttcagagtggctgtgccaactcacactctccaacagtctatgggagttccagttgccccacacccttgccaccacttgcaattgtcagctgtaaattttagccattttgtcgggtgtatattggtattttattgtgtttttgatactcgttgctcccgcaatcgttgaagttgagcacggttgtatatgcttattggcaatttggatactgtctttgcgttttcaaaaattgggtttttgtcttttattgatttgtagaatttctttattctgaatttgagttcttagttgtgcttgtgtgtgtgcacatagtaaacacacacacaggttaaaataattgggagatcattagaatgagatgaccccagcgccttgggtttcaactcaagcaaaccaaagtccatctcagtgtacatggttatagttcaggtaagcagaaaccaccggctgatctctaacacggggcttttgactggaatgatttctttccctttctttctctttctttctttctctctttctctctttctttctctctttctctcttcctttctttttttctttcctatctttctgcctttctttccttccttccttccatccttccatctctttctttttcttttctctttcttttctttctctccctctctctttctttcctccctccctttcttccttccttccttctttccttccttcccttcctccttccctccttcccctccctccctaaaattcatagaataaaaaaatgcctgaatagccaaagtaatcctaagcaaaaagaacaaagctggaggaatcacattacctgacttcaaattatcttacaaggctatggtaaccaaaacagcatggtatttaggattgttttcccaattctttgaaaagcgatgttggtatcttcataggaattgcattgaatctgtagattgctttgggtagtgtggtcactttcacaatattgattcttccaatccatgatcatgggatgtatttccgttggtttgtgtcatatacaatttctttcagcagtgtttgctaggtctccttgtagagatatttcacctcttggtcaagttatttctagttattttattttactttttgcagctattgtaaaagagctcgggttcttgatttgattctcagcttggtcattgttggtgtatagcggtgctactgatttgtgtacattgattttgtaacctgagacttcactgaattcatttatcagcaattcattcatttttagaggatacttggtccatgcacatgtcagagattgttgtaatgtttctttcttgcaatgatctcatcacattttaatcacaaagtcaggctagtcttttaaataaagttgcaaagcattaatcattttttctcttctctggaagagtttgtgtaagattggtgttttttctcccacaaacgtttggaagaatggtttgctggtggagccaactggacctgaagttttctctgtgggaacattttaaataagattgttcaggactcataaatttttcttgcatcagttttggcaagttgtgtttttcagagtttgttcaatttttctaaattgtcaaatttattggcataaattgttcagcatattcttttattattaacttagtatctgtgggatctttagtgatgtctccattttcatttttgatatagttaatgttgggagaaaagctgagtgttgggagaagctgaggcagggcttgcatgtctgacataatgtaaaagagtcttggaacatgtccggggtccaggatctaaaactcctcgtggcctttggaacaccgagctctgtgctaaagagtggaagcctaccctgatgcaccataatctaagcccagggcataaaacccctcatggcttggatggaatccaggtcagaaactatgttctgtatgttttcaacaccaccaattttggggggactctttaatgatccaatgggccattagttttggtaatgttccttgtctacttggagaaattcataggctgaagtcagtcctcatgcacggggctctgtccatgctgaccaagtcaaatttgttgatcatttttcccaaacattctgctggttttctgtttgcatgagacacctttcctatctgttgggagcaggccccccaaaatctggtcataaactggccccaaaactggccataaacaaaatctctgcagcactgtgacatgttcataatggccataacgcccacactagaaggttgtgggtttacgggaatgagggcaaggaacacctggcccgcccagggtggaaaaccgcttaaaggcattcttaagccacaaacaatagcatgagcgatctgtgccttgaggatatgctcctcctgcagttaaccagcccaacctattcttttaattcgtcccatcccttcgtttcccataagggatacttttagttaatttaatatctatagaaacaatcctaatgactgatttgctgttaataaatatgtgggtaaatctctgtttcggggctctcagctctgaaggctgtgcgacccctatttcccacttcacacctctgtatttctgtgtgtgcgtctttaattcctctagcgccactgggttagggtctccccgaccgagctggtctcggcactatccttctgcctttaggcacctgcactaccgagtaccatctaaaggaacatatcatttgttttgttttatttttataatccagcatgacaatctttgtcttttagttggagtatttgtgtaatttatatgactacattaattaacgatacttctgtgcttagatttaccccattacagttttcttcattgtgacctcattagctggttttcatcttttcctgttagtttttgatgagttaatactttttcttatttttctccactaagcttttagtcatgtgcattttaaatcattctcttaatgactcctcacctgcattggtgatgtatcagacttagcacacttgctcctggatgcaagcacgttataattctttaacctcattttcctatcctggcttttgcatcatttttctgtatcctaattgtatgcatatttaattctacaatatatcattatttttattgttttcagtgggtttgcccacaagtttaccttttctattgattttcaaattttctcctattttcttgtgtttgaaaacaagatatttttggataatttgcctttggcctgaaaaagttcctttacatttattttagtgaagattagtggtgataaattccctcaaacttttcatctgaatacatcttcagttcatgtttattttcataaaaatattttaactggatataagattctaggtgagctgttatttttaaccccagaatttaaaaatacatcattcagttgtctttcagcttccattattttctgttgagaagtaaaacatcagcctatttactgtcacaatttttctcttcctttttatttttgactgtaagatgcccaggcgtggttttctttgcattcattttgcttcatgtttgcagagcttcatagatatgtggtctgatgtctttcattgattttgggaatgtcttaaccagtgtttctttaaatattcttctccctcattctctctcttcttcttctgggactccagtccatacatgtcatgcatttgcatcatgtctcatacgttgtcacgcccttttttctacttttttccttttagttttgattgcattattctttatgtgttctacctacctagcttctggttcactgatctttattctgatgttcaatcagttgctaaccccatcttttaagtactttcagttaatacagttcttagttctagtatttccatttgattttcaaaaaacaaaagacttcagttatcctgtagtattgttcatattgtcatgtgattttaactaaagttaatttaaaatcatatttggtaagtccaacatctgctcctattcagttctgtttatatttcctttttgtctcttggtgattggccttgtggtctttggcatagccagaagtttgtattttggatgctatgcatgaaaatagaagttgtggaggatgtatcttcctccagaggtgattaaacccacttgtagaggaaggtgagctcttgggtgaagggaactaaacgcccaagcaatttaaatatcacaaaagaaaaagccacaaactggaaggtgtatgacagacatctgaagcaggtgtgttagaatagacacatgacttaacatgagtaggatgctcatatttaacatgataagaaaagatgttagcggtgtgaaaaagaaaaatgtcctgaaaaaagaacaaagtggaaataatggctgtaaaaaaatacaatagttgaaagaaagaagtattttgagggtataataaaaatagtctcataagccttcagaagacttgccaacaaaacccacaatgaaaacatttatggagaaaacctcaaaatgaaaagaaaaacaaatccaggaaaagctgcaagagatatgaaaagaaagaaagaaagatgaagactaaactctcgtaaagtttgttgccatcattaaaaaaggccaggaccaaagaaatgtgcatagacaaacacacagacacatacacaccacacactacacacacatagacacacaaacacacaccac

SEQ ID NO: 2518 - DNA, 841 bp, Homo sapiens
gaccattccattaatagctttactataaatacttcatcataagacagtttggcacattctccttgttttttacatgtggtttagctctttttggaaacatgatctcttttcttcagtgctacattcatcaaatttaaaggattaaatattttattcctggaataaaatgcttttgcagggggttggccatgcaaagagaattcatgcacatagccactgcaaaccacaatcaatttttcacttaagagaacccaaacattttgctctgacccaattatccaaagtgactgtcccaatgtactagattcactaggtagctgtgactacattttccttgggttacagaactgtggccttcagtgtccttggaatcctaagggaagaattcactctacacaagataaaattttgatcaaaattctgttttgttgaaatatttttaaattgttaatatacactaaaaaaagcaaagggaccacttgacatttcaaattaaatatgaagcaaatgccgagaagcacactgtcactgcaggtgtagaagttcggactgccctcaagccatcctactgcctttgcaggccaacttcgcagctttgagtttcctttcctagtcacaaggatgcagtgagaaatggaaccgatgtcttagagaaagcctgtttggtggtctctccacatggaagcgagtgaaatttggtgccatgactcggatcgggggacctcccttgggagatcactcccctgtcctcctgctctttgctcggtgagaaagatccacctatgacctcgggtcctcagaccgaccagcccaaggaatatctcaccaattttaaatcagg

SEQ ID NO: 2519 - DNA, 1103 bp, Homo sapiens
cgtctgttctactccgctcttttgtatttttttccaaggtggcgtgagctcattatgctgattacatgattggctagtgggttaggacctgcagggctggagcacctgaagacaattcacaaacccaaaggcaaagacccaaaggcaaggcacggtgagacaaggggtggaagaaagcaagctgccctgacagttgagacagacacagataaataaacaagaacaaaagcccaggaccacaggcgggacacaggcctccccgcgaggggtttttggagattgttgggcaacggaagccaggtgactccaggccgggaaggctccatagaggtggctgcatcaccggggaggcactgactttgaactcagtggcatgaaagcatcccagaacgttcagatgtgtgcccagccctgtggctctcacgcatctcctgtgctagggggacgatctggatcagtgcctggcccatggaagactcctgacccaggcttgttcactgaatgaaggcattccacatgttctgtgatgcgggcaagtcattcattcatttatgcatttagaatgagctttgagaatatggcagcctacaaaatggacatggtcctgccttcagggagcttctggtccagcctatggcctcttgcctggaaagagatgttaccacgttattaggaggtagtgtggtgtggtaagtgctttcgtgggaaaagcagaggggattgtgggagctcagagtggggtacccaacctggatgggaggtcagagaatgccacagaatctgtttggccttcaatcactaatctgtatagttagcaatatggacaagctggtctttaataactcataccccttcatttctaattctctgtcatgtgttctatgtggttcctgagggagatctccaaccagggagacaaatgaaagaatgaggatttagctttatggaaaaaacacctaaaggtggaacagtctccaggtacacaggctgcctcacaaggtagttattggtagcagcacagtaaaatgtctaggagatcaatgacttaagccaccgactgttttgttattcttgtgattctgtggggtgacagggctcagctg

SEQ ID NO: 2520 - DNA, 6815 bp, Homo sapiens
tttgagtttatttggaaaataagttgactgttaattttcttgctctttaaaattttatagtcataagtgtcattctgtaagctttagagacatgggactctggattttgttgctagtctagcgatgtgtgttttcttacctgccggtaccatcgtgccttcatccagcaggtgccgcagggttcccggcctagagacgtgggactctttatttttgttgccagtctagtgatgtatgttttcttacctgccggtaccatcgtgccttcatccagcaggtgctgcagggttcccggcctagagacatgggattctggatttttgttgctagtctagcgatgtgtgttttcttacctgccggtaccatcgtgccttcatccagcaggtgctgcagggttcccagcctagagacatgggactctggattttgttgctagtctagcgatgtgtgttttcttacctgccagtaccatcgtgccttcatccagcaggtgctgcagggttcccagcctagagacatgggactctggattttgttgctagtctagcaatgtgtgttttcttacctgccggtaccatcgtgccttcatccagcaggtgctgcagggttcccggccatgctgtgtgcggtgtgactgcacttttcatggctcctttgtatattatgaattctagtttaccagaagtctcctctggatctaaagttaaagagaaaactctttgcacctgttctcctgtgaacagtctttctgatatggacgggttcactcattaccgctgaattgaactcctgttctggacaaggagggggcctgggccttgggatgaggctggtggggttgtgggtccgagctccaggcacaactgaggaaccatgaagaacagaacgcgatgcccatggaaaagccagtgccagggagatgctcagagccaagattctctctgaaggccccaaatggggacaggcactctctgagtggtccaaggccaagggtctgcctggggacccaggaggaaggaagccaagatgggaggctgagccggggaaggttctggagtccagagggagaggcctcctaggaagagaccctctgtgcagttcttgaaactgctgagctggcttggccacctctaatgaagataaacttcacctcacagtgaagatggaaaagtgtgcacagttcctcatgaccatgttctaaacattggtgcttattacaggaggttgaatgaatgtctgtgcaacccagaaaaaccctggaagttgctcgacccacctcctgcaacacagtagcctggcggttttcttgtgagttgcctcatgtttttaaaaactgactacaggaaggatttcttgccggtaatgacctgcgtggtgaagccacagtcagccagtctgtgggcgtgccgtttcgtgtgctgctgggccacgctgctgaggttctgatgggaccttcccacctgcgtgtgcttcagcactcaccgcacagtctgctttgcttccccaagaccttaatggaggcatttttgcaagaaaccaaataagccttcttaaatgcttgaaagcacgggatgtgtaaaatcaaaaccagctttaagcaaactaatataatttgcaatgtagccctttctattcttctagtgaagacaaacacaaattttaattcatattcatctcactttctagctcatttattgtcttctgggacagttcccaaaacaaacttcctgtggtgaagtacaggccgagtgacttgtggggcccttctgtcagtagcggccgtgcttcccacaacgcctgacgtgctgtctgcatcctattaagcgtccatgaatgtcctggatagaatgaattaaactaaccaaggataccaaacacattcagcaagaaacacaaatcttacatgagaaactgggcataaacaactcccaccacaaatcatcccaaaatgctaaatcaaacataacaataatcctttaaaatgtgtagctgggatttcaagaaagtaagaaaatctaaaaaaaaaaagagctgagaaccagagtgaccgcagtggcagcaccgggccctgggtcgtgtgcggagtcctccgtgcagccctggatgcaggggcggctgcttggaatctgaccccgggacagcaggaaaaattgccttatatgcctttgctttccacaaagaagatttttaaagtccttcccaggaatctcacgatgaatatgccctcctaaagggcaagttcctttttaccctcggtacagaagccctgagctgagactttggcgttggctgttgctgagtgggcagccctggaggtaccggacaaagcaaacaggttctgtctggagggaaatgtccaccaggcctcacaaaattcccatgggtaaactccaaacatcagctcacattccgggttgacaaactacagaaggaaaaagcaccatgaacaagaatcagccaacgacagacagtaaaattacacccaatcttcagctcaggaaatcatcaggcaccaaaaggaaataaatgcatttaaaatgttttttaaaagggggaactgggggtgaaagtgtgaaccagaaacaaggtactctaaaaagtatgggttacattagtttcccttatttggggggaaaaatggagcagatgcattaaacagcatattagacatgatgcaaagagggttctggaccaggaaggatccgtacaaagaaaccagcccaggtgcaggcagagagagggacagaaaacagggttggagaccaggattgaccaaggccagtcacaggcttagtagaggttttccagagtttttgtgaggctccaatcctcagattcaaaaagcctgaagaccctaaatacagtgaataaaaggaaataactggccagacaattgtggtgggtctggaaagttctggagacaagagatggattccgcacacgtgaggaggagtgcagcaggtgcattgttgtctggggcctacagccgttcgttcccaggagtgcatacccagccagactgcacgtgggttccagaaagcagggactggcagggtccccagccagcaaccctcactcggagcgcctggagaaggtagttcaggggaaactggacacaggaggaagaactgacaggaagaaaaagtgagcagggagaaaggcccccatgagccctgagcacagttgctgaggcggtagtgaaactggagacaggtggagtggacaccgcacagccaggagcctgtggggagatggaagccctgtgaggagtacctgcagattaaggctgcccagtgaggtaccagaaccagaacggttcacgcggctcagtgaagcctaaggccgtagtactgcacagcccagagacaggggcctgccagcacccactgagattttattcctgtgcagttctctttctgctgtttgttagtagctgcgtgtcttccttatattgttttctatgcttttggtaggtttgaaacactgttttctgactgtttagtctgaactctgatcacaagataattggtgaagagcagccattccactctgctccccatgggaatgtctcagaaaggaaattggaaaggagacagtggcctcagtcacagctgtggagacgccttcagaaccctcctcagaccctgccttctttctgaggccgtgctgttgcacccgccgtccagaagcgccactcctacaacaaacgtcacagcagccaacagcgggatctgctttctccctcacactcaggcctgtcctggccccggcaggctttgtcgtgggtgccagggctgtctgcgctgacttcagaattgaacaagagaacagacaacccacttctaaacacacacgctgtggaacacagaaggctggccgtgtgggaaccctcttcctgcattgagccctcgctgttggctaattagaaatgggtcacggctgctgatggtgttctaggggaaagagcactgggtttggggtcagatggctttgccattaatgctgagtgtgcttgatttctctgacagattttaattagttctattccccttaaaggaaaaacatgtgaaaagagaggggctgtttttttaaaaggccttgagtcccaaaggcaagaaccctggggctgggctgactctcccctcacggaagtgaggacctgctgctttgggtcttggcacactgtctacacactgttggggcagggttagtaatactcgtatctaaggccaggttctaggacgtgcttgatattttcagtaaacacaccactggcctcagtgtttttaaatttctgagccggttgctgttcacttctggagttgggtatgggcagctccccagcggttagcatgcaggagccgcagcctggattgctcaagaaggacctctgcagagaggggctagcggcccccgcagcacctgcccttcctgccctgacagtggctctgcccagccacaaaccattgcaagtgacagcagcaaagtacctgcttcctttaggcaagcccaagtgatagccttgaacctatgagattatctttcacccttctccttggcctcgacaggatcttggttccggggaaagaacttgaaggtctttcaaatccttctttccaacatcagtgctggaattaacttctgctgtgaccgagccactccctggaattgcagctgttagtttaggccctttctgatcatgaacacttcctgctggattattctttctttctagtaggaaatcatggtgtttttagaatcctgtaatgatcagagctattgtacattcttcagatttaatatacccacattgagcagagcattttcttgttgcgaggaaatctgaaagcattgagctcatgggatgagtgtagcttccaggtgtcaggccggcgccagctcctcatgcacgctgggttctgggccgttggtggaaaggttagtgctgttcaaatagatcatgctttataagttctgggcattgcccatggacctgcccccacacacctggaatccagagctctgtgttgggaataaatcctatagctgcacagcagaggtgatgactttcaaatgggtcagagcatccgtttggctgccctttatgtgagactggaaaatacacacatgcaaatgttgattaacagagggaaggtgctcgtgtgggtgaatggtggtcgtatggtctctgtgccaacagaactgtctacgctgatgggaacgttctttatctgagctttgtcgagtgtggcagccactggccacatgtgaccgtgagcaccaaaatatggctggtgcaactgagtcactggcgtgtcaattttacgtaagtttaattaacttcgatctcagtatccgcacatggcaggcacgtgctggagagcgccagtgcccactcacaggagagttccactcagtgtggatcttggttttcctactgaggtttaacaaggcaaaaaaatcccccttctaaaactgtattaatacattagtttcccagatcaaaattgatgtcaaccttgattacctgaactatttgaggagttatactaacaaatttagttttcttgctaagtatttatcagtattgtctttctaaaatgtgttagcccaccactgaggctttgtaagtagtaatgagcatagggaaacttgccttgaaatatcatcactgagctctagttcttgcaccacaaagatgcagggagtggaagcaattcagacaaatctgcttggtccaccaagccatcccagagcagaggctgtccaactaggccaagtggcctcccagaatgccatggaagggttcaggagcaattatcctggaatccacgggatggtgccctgaatcccacagaatgctgcaggagcaggcatcctggaatcccacagatggtgcgggaacaggcatcctggaatcccatggacgctgcaggatcaggcatcctggaatcccttggacgctgcaggagcaggcatcctagaatcccacggatggtgtgggaacaggcatcctggaatcccacagacgttgtggaagcaggcatcctggaatcccacggacgctgcaggaacaggcatcctggaatcccgcggacgctgcggagcaggcatcgtggaatcccatggacagtgcgggagcaggcccctaaaggaaaacctaccccagcagccctcttttaatctctaacacatgttgggttaaatgaatttgcttcacctgcgttttctgtctcaggggaggtcaaacctcacagctctgtgctctgtgtggcttctttcattccctaaacgcaatgtgtgggtcagccctgagcactctgtagtggacactgtggtcgagaacgtaactacacgtgggccacgggccacagaaaaccagggtactttctgggcggagggtttctgagaccggaggagcaaagcactttcaataactgtgtccctgatgtcttctcgtttcctgtgcgatctcaagttctaaaaccttagtgttgaaaaattttcctggtcaatctgatggtctttttatggggatttgagttcataaaaaatgttattgtacatgcaaggaacagtgtgtcgattcagggttcaaacaggacactgctggcacacgccaaggataaaactgaaaagagcttaaacgcagagaatccttacagaggtctgggcagtcacggagccctgtgagaactgtgcagcctccactctccagccacgggaagccggaaccctggccagaggggcagggaagggacccgagacaccagggcttgacgtatttgagcagccacggagggccagagcctggg

SEQ ID NO: 2521 - DNA, 3905 bp, Homo sapiens
cgagaggtaaatagtcttaaatcggaagggagctgcttctctgtggtcttgacaagcgctgcctgggctccgccggctcactaataactgagtgaccttttctttggctgtattatgtctggctgggaagggattgcattttgcagctgagagccggagcttccttcagctcggctcctcgcacgctgctggggtaagttgtcttgaaccaggacggagagagacagcctcggactgcagttgcctaaaaggaggacacctgtggctcagatgcggtcaacaccattgcttggcgtatccttgaggacctcattattttaaacttaaaaaaaaatagacattccctcccccgtcttttttttttttttcaaacaatgcttctttttgacctttcccaaggagaagcgctacaaagcagccactgtgcttactgaacggcctccccctgtatcgcttaattgagaaggtatacaaatgctctcagtccagccagacaccaagccgaaaggttgtgctggctgcaaccgaaagatcaaggaccggtatcttctaaaggcactggacaaatactggcatgaagactgcctgaagtgtgcctgctgtgactgtcgcttgggagaggctctttggtgtaacgggaaactgcgctgcctgtagtaagctcatccctgcctttgagatggtgatgcgtgccaaggacaatgtttaccacctggactgctttgcatgtcagctttgtaatcagagattttgtgttggagacaaatttttcctaaagaataacatgatcctttgccagacggactacgaggaaggtttaatgaaagaaggttatgcaccccaggttcgctgatctatcaacatcaccccattaagaatacaaagcactacattcttttatcttttttgctccacatgtacataagaattgacacaggaacctactgaatagcgtagatataggaaggcaggatggttatatggaataaaaggcggactgcatctgtatgtagtgaaattgccccagttcagagttgaatgtttattattaaagaaaaaagtaatgtacatatggctggatttttttgcttgctattcgtttttgtgtcacttggcatgagatgtttattttggactattgtatataatgtattgtaatatttgaagcacaaatgtaatacagttttattgtgttaccatttgtgttccatttgcttctttgtattgttgcatttagtacaatcagtgtttaaacttactgtatatttatgctttctgtatttaccagctattttaaatgagctgtaactttctagtaaagaattgaaaagcaaatctcactaatgatacacagatagataaagcaagtctatcaacattaaaaatactaaaaaataaagacacacacagagcattttagtgacatccactacttattgccgctatgagttagagtctatcagtgttcttgttataaccccctattttcagggggttaaaaatcagctttaaaaaaatacataaaaatttcatcttaaagcactttcattttataccaacgtgaaaagtgccatttttagaataactttaaagcttaacaggtttccttttaatatcctttttttgtgtgctctttacttacacaatggctttgttttgctttttcagccacaccccttatgtgaactagtgcctttgggtatcacgtaaaattttttccaaagggttactttaaaaatctgttaccacaattatgagatgatttttaagtgataaattaaacttcttcttgtataaattctgcccagatctctccacaagagctgagggtttcataactttatggcttaataaatgtatgacactgaaaagatttgagtgtgaatctactgaaatcactataatgcacattgaagctatgatggtatttgagtagtgaggttacttttgatcggagcaacataatgctcatagaatcttctagaagaagagaaacaaagggattgataaaatgctgagaactagtgattatatatttttctgtatttacctgacatttattttaatgttcaaaaagtaaacactttaagtttgatgtgttttactctctcattgttttaagtaattgccaactcagaatacatcattcttaggctgaaatttgtctttccattttttaaggtgaaatagtactaccttacgtgatagcatacaaagaagaaagctctagaaagagaaattatggagaatgattatttaaattacaattaaggaaatgagaatatgatcccctcttccgagttgcccacaaacttgcttctttgcttttgctccctgtaatagaactacttttcaacaaatctaattttgcacggcaccgttaaccatattttcactacagcaaacttagtgctatgggttttctttttctttgtttttttcttgatcacttgtataggaaacaatattttccagtgttatttgcatatatattttgtccttccaatatatgcattacagatgaaaattaaatgttatacctgaattcttgggttggggccaaaatattaagctgaaaataatgctggtgtggatttgttttaaaacaaagctttattatgaacatgcatgtgaatctggatattgcctcttatttttaagaaaatggttctgtgaaaagtgaatgatatgtatttttccaaatgcttcatggttaggagtcttcaagttccatgttccccagatttgagatatactaaagaaagaaattcaaaagtagctatttggggcccacaaaaataactattattttagccttagagccttacacttgtttcatgaagagaaaggacttgcataaccaaaataaacaaagcaagacaaattaaaaatatgtgggggagagatcagtgaaaagtggttttcttaatgcagccctgctggtccccattaacaattgcttgaaattcacatggatgtaaaattataattgtcaggatcttattcagatgatcttttaaggtttaactggttttgcttttgtttatctatatgtcaaaatacttgtaaattgggaacaaacttctctcagcttcttgaagttgttcaactatccttgccactggaagaccaaacaaggttttcactgctttttcttttacataatatgctgagaattatttcttatgctttttactacaaacaaaattactcacctggattaaagattaaggccttaatctgtttagattatctttaatctccatgaaatcgtgaaataagacaagaatagtgtttcagctgtaggccattttacagctaattgcccataaattgtagcatttattgacctgaagtactaagctaattgtcttgactactcaaagcccctgaattgttgtcaactttcccctttgtgttgtgtagccctaacgtcatttagcttgttgtctgatgcctccagtaggacacctccgatggagctttgatttctgagcagcgaaagctcccttcctaagatgcatctcgcataggctgcctatgatgaaggaccgtgcacctccactccaacagagtgctgagtttaaaagttgacctgtgtttgtaatttcactttcatcttgcttaataaatatctgctggattctttcattcacttttttacatttggatttatgtttttaataaaaggggtgttacactatttgattgcacttaattggcaaaatttaagatgatctctagaaagcatatgttaagtccatgaaaagaaaaaaaaggtgtgtaaggacatttactttctaaagctaagtcataacaagcatagacaaagcaccccaaatgtttctctgaatgtaatgtttaggatctctgcgctaggtcgtttaccgctatttatttttatg

SEQ ID NO: 2522 - DNA, 3585 bp, Homo sapiens
aaaccacttaggagtctataatatgatgtttgcttttaaagcgataagacactcaacgagaaatgacagaaaaacaaggtgtggatggagaggcaacatgaaagtggatcaaacaacttatacatgggtgctggctcagacgtgacacctgaggctccagaactggaagtttatgccgtcaagttacaatggccaacattggaataaatggaaatcattctctggaaacctgtgaaacaacactttttgctctccgaatggcaacatggaatcaaatcttagatccttgggtatatattcttctacgaaaggctgtccttaagaatctctataagcttgccagtcaatgctgtggagtgcatgtcatcagcttacatatttgggagcttagttccattaaaaattccttaaaggttgctgctatttctgagtcaccagttgcagagaaatcagcaagcacctagcttaataggacagtaaatctgtgtggggctagaacaaaattaagacatgtttggcaatatttcagttagttaaatacctgtagcctaactggaaaattcaggcttcatcatgtagtttgaagatactattgtcagattcaggttttgaaatttgtcaaataaacaggataactgtacatttttcacttgtttttgccaatgggaggtagacacaataaaataatgccatgggagtcacactgaaagcaattttgagcttatctgtcttatttatgctttgagtgaatcatctgttgaggtctaatgcctttacttggcctatttgccagagaacatcttaatgcagcctgcatagtgaaatggttattttgagatcaccgctctgtagctaacccttataaactaggctcagtaaaataaagcactcttattttttgatctggcctattttgcccctcattgtgtagcctcaattaacacatgcatggtcatgacacccagaattcatgatggtttgttataacaacctctgcatattccaggtctggcagacaggttgcctgaccctgcaatcctatctagaatgggcccattcttgtcatatttgacaaataggactgcctacatttattattatgaaggtcgattgttgttggaagtgttttttcatgtcatagattagcaattttcaaataattattttttctctgaaaattttgtgtgtgattgcacaataaataatttttagagaaacaaaggctctttctcagcacattgatgggcaactagaattacagcagtttcaaaactctaccatggataatgcaaacaaaccgaagctacatgccaatgataggtgcaaagaatattggcaaaaggtgctttaccttgagccattatttgtgtcagagaacaaaagaaacagaatcaatatataaaattcaaagactatctgcagctagtgtgtttcttctttacacacatatacacacagacatcagaaaattctgttgagagcaggttcattaaatttgtaagatggcatattctaaagcctgtgctaccagtactaagaggggaagactggcaatttgccaagcacttggggattattataacaattaactaggagatcaagagataataatctctccccaaattttccaataataattgagactttttctttgcttgtttgtgtaattcaaccaaaagaatttcaatacccattcaaattgtcctaggtctatcagaaattagggaaggtagtcctgctttataataggaaaatgtatttctgtataagagttctttgctttcattaacttggattcatttaaaaattaatcttccctgttaggctgatttcagattctctaggaaatctgtgtaagtaaccagaagacctttcagatggtttatttgctttcagcagagaatttatttcatacagttacttaagagtgttgatgtcttgtgaacagagatataaggaaccattctccatccttccttatcatgctgggtacaatgcttctatgaatatttccatgtattttgactggggagaggcatggagaagaaactctcattcaggggctccaggatccttctccttgaggcttctaaataaatggcagaattcttgctgtattgccatgatgtcaccctggccatgtgtactgacttgaggagatcttgcaacatggccatgtgcaaggctttaaggagtgagagagatgtgtacatatcttaggagggttatctatgttatctgagtatatgtttgggtaaccaaattggtcttaaaaatgatgttaacccaagaagtagacatcaaaaattaaaaaaaaaaaaaggaatgtgttttcattgttttaagtttttcttctgagtaaaacaaaattatagaaaacaaatgcaacaatgtgcacatctgacttaagagtttcatttctgttattatatgtgttgcatgtagcttggcgatttactgtgtaatgaataatagactggaacatctaccaataactttcacataaatgttcaaaatagaagtgtattttttcaggtttctggaaataaatagtaaaataaatggcacaaatagtttcaataaatttaccaatttgagtgttttcagctctatttcaaaactcataactaatcttcagaattactgaatttccttttgaactgggtaaggcattatccaagcaacttcacatactatttaaacatgatttctcggtaattatatattctgggcaaataacataaacatgtcaggatttttacaggtgttagtgaatttttctaaaaagatgagacaaaagcaaaaatatcacacataggtttttatgactatgaatacaaagataatgctgattcacaattagctatgggtaagtccaaaacatcagaccttttactgatgggttaactaggtgaaagaaatgggcccttatttttttttttccctagaggcagaaagttacttctaatgatctatatagctaaaacgaaaaatacctgaaagttaatacatacatatgtagatatattttgttatgtgataaatgtttcttgtttgcacacttttggacttgagaaatctgcttttgttttgtgcctactctgagtttagaacccaaataagaggacttgttaaatatagagtgtactttttgttaaaactattgctagcttcacctgtataccatcattgttccaaattaaataactgttttgggtcagaatataaatgctgggaatatacattttattacttcttaatctgggtgtcaaagattttaccacctggtaaataatgttggacttcaacttgttactggcacattttaatagtagatgaaacatgtttttcttggttatgtgaataaatgtatgttgtgctcttcatacttgttggattgtatagagattaaatagtgatatgtatattttgttgtttgctttggtatgcaactcatgtaattttagtgctttgactagcttaaaacttcaaacaagtaattttataataaagttggactaatgtttttcaagagtgattatttttagaaggaccatataaaacttgaaacgcttgaacctaaac

SEQ ID NO: 2523 - DNA, 4671 bp, Homo sapiens
acaacagctgcttcagtgtatccactgagcatcttctctgtgcagctttaagcttttggtggagaggcaggtggaaagaaagccccacctttagcaggcatggtgtggatagaaaaaatgcaaataatagtattattgatttttccactgttatgaatgaaatggagaaaggaatgctttgggtggatcagggagggctctgaggaggaggtaactcctgaactggttctgaatgatggtgcaatctgcagaaacaggctgatggtgaggaatgtctcttttaggcacttactactaataaagacgatgataatattctcttcagagattctgcaaatgcgacaagcctcccaggttcaagaagacgtggaagctgcgggctctgaaggaaggcaagacaagcatgcatccgccgtactctttggggcagctggtcccggagaggcctcgacccaccccagtgcttgttcctctcatctccccaccggtgtcccccagcagcctggggtctgacaatacctcgagccacaaccgaccagatgccagggacccacggagcccttatgacatcagcaatacagactacttcttccccagatagctggctgggtggcaccagcagcctggaccctgtggatgataaaacacaaacgggctcagcaaaagatgcttctcactgccatgccagcttatctcaggggtgtgcggcctttggcttcacggaagagccttgcggaaggttctacgccaggggaaaatcagcctgctccagctgttcagctggttgaggtttcaaacctccctttccaaatgcccagcttaaaggggctagagtgaacttgggccactgtgaagagaaccatatcaagactctttggacactcacacggacactcaaaagctgggcaggttggtgggggcctcggtgtggagaagcggctggcagcccacccctcaacacctctgcacaagctgcaccctcaggcaggtgggatggatttccagccaaagcctcctccagccgccatgctcctggcccactgcatcgtttcatcttccaactcaaactcttaaaacccaagtgccttagcaaattctgtttttctaggcctggggacggcttttacttaaaccgccaaggctgggggaagaagctctctcctccctttcttccctacagttgaaaaacagctgagggtgagtgggtgaataatacagtatctcagggcctggtcgttttcaacagaattataattagttcctcattagcattttgctaaatgtgaatgatgatcctaggcatttgctgaatacagaggcaactgcattggctttgggttgcaggacctcaggtgagaagcagaggaaggagaggagaggggcacagggtctctaccatcccctgtagagtgggagctgagtgggggatcacagcctctgaaaaccaatgttctctcttctccacctcccacaaaggagagctagcagcagggagggcttctgccatttctgagatcaaaacggttttactgcagctttgtttgttgtcagctgaacctgggtaactagggaagataatattaaggaagacaatgtgaaaagaaaaatgagcctggcaagaatgtgtttaaacttggtttttaaaaaactgctgactgttttctcttgagagggtggaatatccaatattcgctgtgtcagcatagaagtaacttacttaggtgtgggggaagcaccataactttgtttagcccaaaaccaagtcaagtgaaaaaggaggaagagaaaaaatattttcctgccaggcatggtggcccacgcacttcgggaggtcgaggcaggaggatcacttgagtccagaagtttgagatcagcctgggcaatgtgataaaaccccatctctacaaaaagcataaaaattagccaagtgtggtagagtgtgcctgaagtcccagatacttggggggctgaggtgggaggatctcttgagcctgggaggtcaaggctgcagtgagccgagattgcaccactgcactccagcctgggtgacagagcaagtgagaccctgtctcaaaaaaagaaaaagaaaaagaaaaaatattttccctattagagaagagattgtggtttcattctgtattttgtttttgtcttaaaaagtggaaaaatagcctgcctcttctctactctagggaaaaaccagcgtgtgactactcccccaggtggttatggagagggtgtccggtccctgtcccagtgccgagaaggaagcctcccacgactgcccggcagggtcctagaaattccccaccctgaaagccctgagctttctgctatcaaagaggttttaaaaaaatcccatttaaaaaaaatcccttacctcggtgccttcctctttttatttagttccttgagttgattcagctctgcaagaattgaagcaggactaaatgtctagttgtaacaccatgattaaccacttcagctgacttttctgtccgagctttgaaaattcagtggtgttagtggttacccagttagctctcaagttatcagggtattccagagtggggatatgatttaaatcagccgtgtaaccatggacccaatatttaccagaccacaaaacttttctaatactctaccctcttagaaaaaccaccaccatcaccagacaggtgcgaaaggatgaaagtgaccatgttttgtttacggttttccaggtttaagctgttactgtcttcagtaagccgtgattttcattgctgggcttgtctgtagattttagaccctattgctgcttgaggcaactcatcttaggttggcaaaaaggcaggatggccgggcgcggtggctcacgcctgtaatcctagcactttgggaggccaaggtgggaggattgcttgagctcaggagtttgagaccaacctgggtaacatagtgagacaccatctctattatgaacaataacagttaagaaaaaaaaaggcaggcaggcggttatggtggttccctcccatcccaccacataaagtttctgagacttgagaacagcaaaatgctgttaaagggaaatattaagaatgagaatctgcagtaagggtgattctgtgcccacagttcttcaattctttataccgttttacccacatgtggtgttaccaaagccgggcagaaccatgctagcggaagatgtgaaatccagatagctcattattgccaagagctaggcagctttgatctccaaattgttattgctttcatttttattgtaatggaattgctttgttttgtttttttgtttttgtattgaagagggttgttttccctttatttttcataagctaatgtaaatgaagaaaaaatgtcttctctgggctgtaggcctggctcagcgtacacaggtatacatcctaagctctctatgttctctaatctgtggtgactgaacatgtgtctcaatgcacggggcatttctacctgtgtttctgcagcacccccactgccttgagtccccagcagtgctgttatttgcctaacacctgtagccatctgccacgcagccagacgtgaaacgctgagacagagaccatttaggttaaatacgacagcttatcctgctgggtggggaaagtaaaaaatatgctggttcaaggcctaaagtaaaatgatcaataatgtttgtagcattaatgaaatattttcaagaaatgtgtccaggggtagcactggctatgttgacgaggcctttggtaactcagagagctcttggccctgatggggacttgcccttacgctttctttatcaggctctgagttcacacggagcctctggcacttccctgctgtcttgggagaaaggaaactggttgccgcggcaggttgtggaatctgttgctggaaccaggctggaagcccacctggtagtgaacagggcccagtggggcaggctgggcatgttgtggtctatgggtttgtttcctggagaatgttcaggaatgtcttcccagctgctttggtgctgagctctattatctcacagcacgtccagaaggctaacccaggtggggaggatgctgacaccagctccaggtggagttggtggtcttaatttggagatgcaggggcaacctgtgaccctttgaggcaagagccctgcacccagctgtcccgtgcagccgtgggcaggggctgcacacggaggggcaggcgggccagttcagggtccgtgccaggccctcctcagtgccctgtgaaggcctcctgtcctccgtgcggctgggcaccagcaccagggagtttctatggcaaccttagtgattattaaggaacactgtcagttttatgaacatatgctcaaatgaaattctactttaggaggaaaggattggaacagcatgtcacaaggctgttaattaacagagagaccttattggatggagatcacatctgttaaatagaatacctcaactctacgttgttttcttggagataaataatagtttcaagtttttgtttgtttgttttacctaattacctgaaagcaaataccaaaggctgatgtctgtatatggggcaaagggtcagtatatttttcagtgtttttttttctaccagctattttgcatttaaagtgaacattgtgtttggaataaatactcttaaaaaata

SEQ ID NO: 2524 - DNA, 429 bp, Homo sapiens
tctctgcaaatctgagagctcagtctctcttctcacttcctcttataatggaaattgggaaatccaaagaagaagaaggacttttgtgaaatgagtctattctactttaccttctcgccaaatgattcttgaaggtggtgtagacatgaatctctacatacgataaaatttcatagacctaaagacctacgcacgtgagtacatgtaagacttgggaaatctgaataattagttagttatattaatgtcaatctcctagtttgtgattttacattacagttttgtaagatgtttctttgtggggaaattaagtaaagggtatgtgggatctctctgtattacttattatacctgtgtgagtgaatctactttttaatcaaaataaaacatttaattttaaaaaaagaaaaagctaaccaacatcaagag

SEQ ID NO: 2525 - DNA, 618 bp, Homo sapiens
gcattgtgttcttccaattacaggcatggccgaggagggctgggcgccgaatcacttgaaagatcagcaggctcagctgagaaattcatagaaaaaagagaactgactgctcaggtgacatggaggtagatcccaggaaggaaggaagggagagcaggaaagaaattgcctgggggttgaagagctaccgaagagaaactacccagccacgaaaccacatttattgagctcgaccataagagaacaggtggtagtgaaatgaaaattgtaacttttctcttgaacttgaaatcaatttgtagttatatatatttattgattaattcaaaggaatgactgaatgaacaaatgttttcccatccatttattcattgatgctatagcaatgtacaatttttggtctggaagatctgtggatcatccagcttaatctgtttccctagttctcttccctgccagacacccctgtccctgccccttccagagatgaggaaactgaagcccagagaggtcaggtgacttgcgcaaggtcctactaattagcagcagctttgggactggaacccaggtgtcctgacaccaagttccctgttgttctatatttacattgttggaaac

SEQ ID NO: 2526 - DNA, 7268 bp, Homo sapiens
gagttcaagaccagcctggccaggatggtgaaaccccgtctctactaaaaatacaaaaattagccaggcatggtggcgggcgcctgtaatcccagctattcgggaggctgaggcaaagaattgcctgaacccgggaggtggaggttgcagtgagccaagatcgtgccactgcactccagccttggcaatagactgagactctgtctcaaaaaaaaaaagttgttttatttaactaaagttcaaaactcactcaaaagaagcctagaaagattgacatcacatgttgcaaattgaattccttgtaatcaaaaggatgacaaattagtaaattcttaaaagcaaacagggcttctaactacttctttaccaggaactgagtaatgtatcaatctaataaccaatgcatttacttataggaatacaaaggaaaagattgccatttcagcattttagaacaggaagcagaactagcaacagttatttgaaaatatacaaaaaactggtttgaagtcaatgaatatgtatccaattaaattgctatagttcaacttctctctgatttatggtagtatgccaagtttctcctagtcacccttcgaaaataaagaattgaggttttaatacaaaagatatgagtttcatagggtgataacctatagaacctcctactactgagttaaattatccatctgctatagcaacatggcagatagtggatcatcatctcaggcacaaaatatagggagggtgcttgaaaacttcaaaaatgaaaaaaaaatacccgtcttttcaggatgttcaacatcatcaatagatgactttttgtagacttttgttttgtaattatgaatctatgagtgtggtatttaggtagggtgatgaggttgcgggatggatagagagactgacgttaggaatcaaattcataaagaacataaagcaacgtcaaaggtaaaatggcaggtaagagggattcagatggtggccttgccccctgaaggctctgtgacaggatccttcctaaacctcagcttcttcatcggtaaaacagagattccagtggagccagtaccacagtggtccagaggatgagatgactaaagtatgtcaagtcttagcacagtgcttagttctcaagtgcttgagaaacaaaaagaaagagataagtctttgttactaaaaagagggtgacttcgtacaagggatcattccttttcttcaaagaaaacattaaatccacaatagctgtagctcatctgtgcatacagaaatctgtgcccaagaaatacatactgaatatacacagtaaagagcaatggaggaagaaatctgcaaagaacttatatttaaacctctaaggatctatatgaaagataatgtgaataatagaatttggttttattaattccaggcaagttctaatgatcatgacaacatattttcaaatcataggaatgatactaaaacataaagcattaggctgaagttatgcagttaactgagggtggtaccactcctacctgggggcattgaaaaatgggggtgggaagaagagttggatgcaggcaatgaccagggatgtgaaatgttctgcaatacatgatagggtccccatgcaaaaaataatcccctcacccaaaacatggcaaacaggctcttctttaagatcatgaagttccacttaccatcactcttagcttaatcttcaggacattatatgagcgtgtgtgagtacatgtgtctaccaacattatcaaagcccagagtccatatgaaatgtacaaagagactctaatacgcactgattagtaagaataatctacaaagcagaaaatctggcagatatttaagagacacatgtacccaccctattacatagagtcaagtttctgctctaaatgaattagcatgttaaaaaaaactgcctgttgcaatttggtatgaaatataattgaaaacatcattgtatttccacccagggggtaagtgacttacgtattttaagggagtatagaaacaagtagagagacaagtgaaaaaagatgtaacaatagtagggacttttaaaaatatatatggataaaagtgggaaaaggagatcaaaagtagctgagagcaagaaaataaatgaacaaagtataaattgaattgtggaaattcacatacaaggggctagagttaaaagggacctcagtagccacagggactatctaattcatctctggaccatgagggcctgccacagcgcctagcatatcgtaagtactcaataaatgcttgtggaaaggatggatggatgggtggatggatggatggatggatggatggatggatggatagaaatgcaacttcaagatctggttctacagtattacatatgaagcaactgagactcagataaaattcagtgagttgctgaagactattcactcattgagcctcacattctgatgctatatatatcaggtgctatgcagatgattagggaagggcaggactgagattaaactgacaccccctacatcctaatccaggctttttccactgtatggcgatgcctcccaaaagaattatcacagcgacttaataaaggagggagaaagttagctgcaaatttcaagcttagaaattcacaggcaaaaatggctgaagggaaataatcacactaatagtgatgcaaggatgtaactggaaaggaaaaaatggagagaaattaaaaacacaaacagatttagtcagggtcctgataaagtgataatgtaatcaataaggcaaatcaaagataaatgattagagatttaaaacctcagcctatcagaaaaacctgagggaaaagattttgaattttttttatttcttccaaaagatcctatttgacatttttttttaaatctaaatgaccaaagatttcgaatttggaaaggcagacacatatctatttcccatataaacatctacatttcttgccacatagcaccgcaacactcatctggttccaaagcagacggcttggccctctgttatcaagagcactatcaccgttctggcccggagagctaagttttcttatacataggtcgtagccaaagctcagaggaaagaagtgacatttggtgagtgtacaggatatgttctccagccactttttaggtgctaagttacatcttgaaataatgtcagaaattggaagatgccgtatttaaacttcactagcccaagccctaattcacctcgacagtttaatatcttaatgtttcttaaaatttgaggactcttagaatgacccctttaaaaatctgctgaaaaactggatctttttgtgggaaaaactgtccatacctacatatctaaaatgtgtatgtggtttcagtctctcctgtgcacagtccctcctgctttgaagggatccccaacatgtttttttcctagaggtagttggtcacaaccatcggataacatgcttatcacctgggtgataaaatattctggacaccaaaccccgatgacatgcaatttacctatataaagaacctgcacatgtattcctgaacctaaaataaaaagttgtaaaaaataataatacaagtaaaagagctttctgcatgtgttataaatctgttcaggaggactttccactatgctttcaagagaagtgtcttgaagaatttagcatcactctgaattcccaaaaagctctgtgcttttcaaggtgcttttgaggaagaaggatgatgcttcaactgtcttctttgctgtgacttctaggaagttcattatcacatcatattctcaaccaaataattaacacttgacattggcattttcttctgtctttgtttttaaattttattgttgtttgctaattttattgtttttatctttgttgtatgtattgtcccggctctccatttcctccctctccctgccaataaaagagacccatagattttattcttttgttctactttttcatcagtttcttctacatatatctgacatatatggaaaaaagaattactgcctatatatgcagaacttgtaactcacaggatttctaaactaaaagacttttcttaataggtgtgaagtgaaattctgcaagtagctgcatctgggaacttcagagttaaaccgatatctcagtataatctgtcactgctatagtttcttttctttgacctccaaaccttatgttgaaatttgacccccaatgttgaaggtagagcctaatgggaggtgtctgggtctgggggcagatccctcaagaatagcttggtcatcaatgagtgagttctcactctattagtttctgggagagctggttgttaaaaagagtgtgtcatgtcccttctctctctttttgcttcctctctcaccagtgatctgcctaggccagctccccttcatcttctgccatgagtggaagcagcctgaggccctcaccagaagcagatgttggcactatgcttcttagacagcctgcaaaactctgggaaagcggaaatctggagaactaaaatatcttgctgaagatcacaatgcagtaaagcatagggcaagtttccaactcgaacatcaccccagaacacttccttttaaacataaattatgttgctaacttttttattgttacttagcaggcagatttcaaactgatacaaatgttgaaaatgatacaaaatgttttcccaccttaaaggcattctgaaacctagcacataacatctgtcactgaagtccatagtttccaatgccatgattggataaagaccctattgagactcatgtgtttgtctctcactgcttaaaacactcatgtgttttaagcaacatgacaagcacaaaagagaacaagtactgctcctgctctccaggaagttaccataaaataaaggggataaggtgccttccaaagaaaaaacaaatactaggagaggtcagaggagaagagagattattccagaaggagagactgaggcagatttcaggagggaagaatataagagtcccaaaagaagaaacaggaacccaggttagagagcaatgggcaaggggtaggaggtgagactaaactcacaaggaagttgcttcaaaacaatagtgccccaaatgccaagctgatgggttggacccatttaggaaaaacccacaaagtccacaggagagcagactgcacttccatgagcttcaagctgtaaacagtaacctcaaataaaacttttcccggatcggtaatttccatcctgaacaatggccaagtcaaggaagctgaggatcgagccccctaccgcatgccacaaagaacctcaagggaccccatgctctggggagctcgcaggaggaccagcacagaggtgtgactgcgttggggcagggtggccacatgtacaatgttgtaccttccaatgttcctccttaggctgtgcttatgaagtcccaacatgtcttctgggctgtgttttcaaccaagagagttaataaaaagtgggatgggcaccaactatgcctccagagacatcaggcagaatatgccacagcgtgccatgtcctcctgcaaacagtcagaaagaaaagatctctaaaagcagattggaagagactatatatacagagcgagtgccggtacagaagttttgctgcaaatacaccctctaatcccttgcaacccactgcaagctcgagagaccagtgcccttggtaaaacataggagagatcattaattaaagcctaggccctttctttgatcctgagggataaggcttgggaaaatgcacagtgataaaagtgaacattttaaaagagcagagtgagtgtgaattcccaaagagaccattcatatcaagacccaagccatgagaaaatgctacaatgcccttgatcaatactttataggcattttgacctcagatctaatcccatgaggcttagaccaagaccttgcttgatgcagacctctctgactgctgaaattggtcaggagctcagtgatgaaaatttggaaagtcaatgctgatacctgaagaaagtcccatcagagatctgtgacctgaatcttcataactttcacaggccctttctaaatgccaaggaggatgtgtgtggagaagaatatgccacctatggcatcccaatatgcctgtgcccgcctgctcttcaacaagggaatgaaacctgggtattctcataggttttttaaagcacttgtccacatattttattccgcaaataacacaatttaaaattcagctagaatttgccattttctgtcagggttgtgcatttcttccagtcaccatgacttcctgagatagccaaaacacaaaatttaaattgtgtttaaattaaataaacacaatttatgctgaagctgactttacccactctgttccaacattacttatcctcagcatctctgaattcaaatatcagccaggtgtggtggctcatacctgtaagcccagcactttggcaagccaagatgggaaggttgcttgaggagttggagaccagcctgggcaacatagcaagacccccatctctacaaaaaaattaaaaaattagccaggcatggtggtatgcacctttagtcctagctacttgggaggctgaggtgagaagatcacttgagcccaggagcttgaggtggcagtgagtcatgatcataccactgcactgtagcctgagcaacagagcaagaccccatcccttaaaaaaaatacctgccctctgtacttcatagcacctggggcattttgaacagttcttccttcacctgaggtcattatttgagaatccaattttagagactacaatgctctcattacttggattgtatcatttaatcttcccaacaatccaggaaggggagtctcttaatgattgtccttgatttccagttaaaaaatctagacccagaggtaaccttgtgaaggtcacagagtttcagagttctaagatcccatgcgagattgctgaacttgaacttgtttcttctgatctcatgtcaataagtgacttagtcaacacctgggtagaaatcatcactaaagtgagaaagcacatggtgagggggatgaatcctgtgcccacatggtccctttcacctgcccaatcctcaggcctctcacctggggtacccctcacacacatggcactttcctgaactcatggacatttcagtttgtaacgatcctcctaagattatctactttcacctatccacatttgaactatacttctttagtggaaaaaaagaaataaagccagt

SEQ ID NO: 2527 - DNA, 15160 bp, Homo sapiens
aatttttccatagacttgattgaggattgttgcaaactttacaaaaagatacactgcaacaacagattaaagaaattacaaaaaatatagctatacccctatttaaaaatacaacattatacatcacacagcattttctttgtgcaaaatgtttaagggaatgctgtgttaggcatgtcaagcatatttgcttagagggaagtaaactttaatacagttactttgcataatagtataggcatagctaaaataatggatttttccccctagaagttaatatatcttagagttcaacattttacttttattttgtaggattgaaagctaaacttagctttatacaaatatatgtgtgtgtgtgtgtgtgtgtgtgtgtgtatatatatatatgtatgaaaacaactatctgatttcacattgaacaaatccccaacgtatttacagtattttcagagaatgtgttctccaaatcagtctgtgtacattttctctattaaacaactctttagaaaattaaactaagccaacatctgttgattaatggacatcctctgttgagacttccagttttcgctgtgggacaaagagagttcctaaggaggttttattagcaccctcaaaatccatgcaggatgagctggttggcttggtgggtccacctggggtacggaagaaactttcggccactaattgtgaccctttgggtgtcacaggaacaggctgattggaaagagaagaatggacaaaagaagtcaaccacacacaggtacatagtcttaccagacttggaagattgggctggatgaatgtattgcacattgggaaactggcgtatcttgaaattggcgagggaagctttggagaaatggcttgagaaagacatgttgaagaggaaaaatacgttaaggcttgccaatcagctgactgcagcagcagcagcagcagcagcagcagcagtgatgcacagatctgatctgcgttggcaatatacttgtaattcggacatgcatctccaggacaccagccttagcaggaaggggagccaatcaaggggaaacaattatgcaaatttaaaatgtaaactctctggagcccctgccacaacctgatctctataagaatcatgatgtttccaaggcagcacatggtttggggaaattggagagaatactcccgatggaaagggataacatcacagctgccacaacaatgctatccagtgagcaaatgtcggatgttcagagggaccaagtcatcttgattagaatcgtggaggtatgagtttcaaagtggaataatctcatatttaataaatttgcaatctcttcacagtgcactggaaaagggaacatgcttaaaataattccagggacttggctcctgggcttattcagatatcggaatgattgtcagggactggtttattgtcttgctaggatgaagtagatgcttttaaatctcttttctattgtgcatgtctgtgggaacacatgtttgctcttctttttcacccaaaatattaaaaagctgttcaaattgccagatcattttttccaagatgacacttatttatttacaaaaatctttaaaatgttattacaaagaatgtgtttattgtagaaaaaccagaacacatagttattttaatacaagaaagcaaaaaaaaaaaaaaatcaaaccacctctctgtgataaccattgttaatattttgttataagccctcccatacttttccctatggactaaaataaaaaatacaaaggtatatatatccatgtatgtgtattagacatgcataatactataaatactattctctaatctgctttatttttcactgaatggcatattatggatttttatagtctactgaaatcagaataatgtggtggttgacatcacattctctgaagtctggttgtcttgtttgagatttgactctatcaattactagctgtatgatctcgggcaagttacataattgctatggtgcatcagtttcctcatctgtaaaatgaagatgataatgatggaatatactaactatatgataatgatggaatatactaactatatgataatgatggaatatactaactataagataatgatggaatatactaactataggttgttgtgagggttaaatatgttaatgccaaaaaaattccataatacagttcccagcataggagatgctcttgttaaatgttagctatgattatctttccatgttaactcatgtattgccacatcattattttattggctgcagatgatactaatgtatttatgtatgggaacattctttcctgcttttcatttggtgtatggttgtgtatatgtgatttaatgctggtcatgctttaatgctcttattttctttctaacttttattttaggttcaaggaagacatgtacaggtttgttatatgggcaaattatgtgtcccagggtttggtgtacagataattttggcctccaggtaatcagcataatacccaataggtagttttccaaccctcgcgtccatgtgtactcaatgtttagctcccacttataagtaagaacatgtggtatttggttttctgttctagtgttaatttacttaggataatggcctccagctccatccatgttgctgcaaaggacatgatttcattttttaatggctgcacagtattccatggtatacgtataccacattttctttatccagtctactgttgatgggcatctaggttgattccatgtctttgctgttgtgaatagtgctgtgataaatatatgcattcatttgtctttatagtagagaatatactcctttaggaatatacccaataatgggattgctgggtcgaatagtagttctattttaagttctttgagaaatctccagactgctttccacagtggctgaactaatttacattcccaccaacagtgtataagcattcccttttctctgcaacctcaccagtatctgttatttttgactttttaatgatagctattttgattggtgtgagatggtatctcattgtggttttgatttgcatttacctaattattagtgatattgagcattttttatatgcttgttggctgcatatatgtcttcttttgagaaggctctgttcatatcctttgcccattttttaatgggtttatttggttttttttttcttgtttatttgttttagtttttttttaaaatagattctggatagtagacctttgacaaatgcatagtttgtagatattttctcctattctgtaggttgacttgatagtttcttttagtgtacagaagctctttagtttaattaggtcccatttgtcaatttttgtttttgttgaaatagcttttgaagtctttgtcatgaagtctttgcctgggccaatgtcaagaatggtatttcctagattttcttcttgggtttttatagttttgggtttttatagttttaggttttacccttaaatctttaatctatcttgagttgatttttgtatatggtgaaagggaggggtccagttttaaatcttttgcatagcttgccagttatcccggcaccatttattgaatagggagttgttttagtccattttcacactgctataaagaactaccttagactaggtaatttataaaggaaagaggtttaattaactcacaattccacatggctggggaggcctcaggaaacttacaatcatggtggaaggcgaaggggaagcaaggcacgtcttcatggtggcaggagagagagagtgaaggaagccacagatttttaaactatcatatctcttgagaactcactatcaggagaacagcatgggggaaactgcctccatgatccaatcacctcccaacaggtccttccctcgacatgtggggattacaatatgagataagatttgggtggggacagagccaaaccatatcaggagtacgttccccattgcttgcttttgtcagctttgttaaagatcagatggttgagggtgtgcactttatttctgggttccctaagcctttccattggcctgtggtctgcttttataccagtaccatgctttttttagttacagtggccttgtagtatagtttgaagtcaggtagtataatgcctccagcttctttatttttttttttttttaccatagggttgctttggccatttgggctcttttttggtttcaaatgaattttagatttctttctttcttttttttaattaaaaaaatacagagagggtctcactctgtcacccaggctggagtgctgtggcatgatcttggctcactgcaacctctgccccctggctcaagcagtcctcccacttcagccttccaagtagctggaaccacaggcatgcagtaccacacctagctattttttttttttgtattgttagtagagatggggtcttgctatgtaactcaggctagtctggaactcctgagctcaagcagtctgcccacctcaacctcccaaagtgctgagattataggtgtgagccaccgtgcctggccagatttttttttctaattctgtgaaatgctgagttttgatgtacatgaaattggagctgtatggcgcatctgaagagacagcactgaggaatcttttagccctcttgctagagaggtcctgacgatattagtgggaagggagaggaaaggatggaagagtttgtagctatggatctcagcagataagaggtgatgcagtgactgtgcatgaactttacggggtctggtcttgactctactactttctgaggatcatatgcaacttagcctctctaagtcttaattttcacatctgtaaaattaagatttttttgctatctacctttttgggttcttataaattagatcattcatgtgaagagtttagcatttgtctggtacctggcaaagtctcagtaaatactagatattattatttgaaattgggggttatcattaaaacatgatgtattcatgcatgaatatacattcacatagtttagctatgaaacagtcagttgataagttgtacatttatacaggtatactctttttccttctctttccattggtttcttgctactgtgcctcaaattcacacctactgtttaatactcagctttgtgatgctgggatgggattctgcaaaccctttttccttttgccaaatggatccatatcagattccgctattagaaggtgctatgtggagactgcttcctggagaagagaaaagggatatgcctcttcctgtttgcttccagttcctgccagcatcactccaacaatgcttctttgctttggcagtggcagttcatttcagcggagcagctggctccagtcttcatttttttccacactctcagaaccagtcccattgtccctccttggtgatcccagccctggcctgttggcataccttcctcagaggcctgggctccatctctgtgaagggttccttcatgtctctaggtcctagttgccctagactcttctctttgttcctccagccatggtggcatagccactttgtagttatctctgtgaaacttcagcattatcctctctgccatctcagttctccaattcctggtgagcaatgatttacactaaatgatctctgttaaaatttctgatgttatttttgtttcctgagtggaaacttcaccttccctaaataaaccagttgagaatcagttgagaagggaagattcattttatgagtaaatgtgtcaatgttactctgaaggaagagtgctgggagtctagtctttatcctgattgtacttattgtataactctactcattgtagaagtaccggagccagcagaccacctgggccctgaagatgccctggaggcatggcctggggggactgtgctttgtgggctacggctgcttccaagaatgcaggcagggatgagacctcaatgtgagtgtccacatttgggaagcagaataatcctttaaggcagacaaagaggagaaggaggatggaaggagagaggcctggaagagaaaggactactgtgttatcagaggcagaatgcagggtaaaaaattggtcaccaaaagccggcagagggtggggtgtggagagggagagagtcacggaaactattagtcttggtaataggacagtttcagcctttcattatttactgataataaaaaaggcctgcacaatagattggtcaacaccactttcctgcttcattggtttccaaagggatttgatgcttccctactgagagattatttctaggagcccgtttcaggtcactcaccataatgtcctcactcagtgatcagctgtgtttgtctccctgtatgtctgtctgtctctctccgtttgtgtgtctgtttctttctttctctttctctgtttctctgtctttctctgtctctctctctctctctctctctcacacacacacacacacacacacactcaaacacacacacacatacacccatgcttctttatctatatctactgggagcactggaaatcctgccccagcagtggtcctgcccagaggggatctgaccagccaggcttcaagagagcagtggatgaggctgccattgccctctgaccctcagctgtctggatgcacaataaaggatgcctttattgagttcaaagagccaggtggtgctgctgatggggagaaggcagagtgactctggatgggaagaggtggatggctctcaccaccaggcaacctggtgtggggttttatgagccgaagcagagaagctcctgcccctggcttaaaaattgactatcctggctaaaaacaaaatattccctttgcttcttcagagaagattcaacaggaaggacaatagcatctagtgcctccattgagattttttaaaaataaactttttattttggaataatttcacttttacagaaaatttacaaattaatacgaagagttctcatgttcccctctcctagttttccctattgttaacatcttacatcaccacagtacgttcagaaaaactaaggaacaaacattgacaggttactattgttagttaaactctataatctttattcaggtttcactagcttttccatgaatgtccctttttcggttccaggatttcatccagcatatcagattacatttagttgttgtgtcttcttagttataattttccagtctttccttattttgatactttgataattttgagaagtattggtcaggtactttatataatgtccctccatttgggtttgcaaagtatttttttcatgattacactggggttatgggtttctgggaggaagaccaccaaggtaaagtgtcctctcatcacaacctgtgggatgtacccaggtgctgtccacatgatttacctgtggttccaccatgatttgaaggcagagggcaggctctgagaagcctcctacaggatgagggtcttgattcagagtccttccctctggatgcacaagaccatggattgctgatcaagaaggaccctgcaaagctggagatggggtggagtggggcagtgctgcacatgggaagagcaacagactagaagccaggtctgtctggcactagtcctgacttcaccgcttctgagctgcgtgatgttgagtgagagtctttaacctccctggcctcagtttcctcattcaccaatcagtatgtaaccccttcccctcccttccttctagggttggcaactggatcaaatgacattagatttgaaaagactttaaaaagtataaaagacagtacatagatgggaagtcagtctttaagcctgctttggattttccagcatttcagctccagcaggaggagaaagatttactttctatttacttatcactgttaacaagcaaacacatacaagtcatatgggtgtgtgtgtgtgtgtgtaatcttttaacttttttaaaagtctgatttattgaaatatatttacatatagtaaaattcatccttcttatgtgtacagttctgagttttgacaaaaaatacaatcatgtaatccttaccacaattaagatagagaacacgagacatagaatacttccatgacctcttcacccccaaattccctcacacttctgtcatcaacccattcccctactcttagcccctggcaatattgacctgttttttgttcctattttctacaatgtcatatgaattgaatcatgttgcctttattgtttttagttctaaaaacaacattattgaggtataactgatatacaataaaatgcacatacaaaagtatacaacacgtaagtcttggttatgtatacatttgtgatatcatccccacaatcaggacagtgaacatatacccatcaccctaaaagtgtcctcaacttctactgtcactgcttttcagcaaactgatggttctctgcatgtactctgaggcacagtgctcactcccactgttatgccctccttcaggtggctttctttcccttaagctaccacctggcccttttgatctctccaaatcctgcccatccttcaagtctacgctttagccctccccaccacccaatgtctaaagggtcctttaaagttatcctttgagaataattcagcccacacttgctacttccttctctactcctaatgtacttacagacaacctctcattgtggtctttctttatataacagtgtttgtatcttactgtcctaaggtgagtggcccagtgtttagcagcatggtctctggggttagatagttaggttcatatagttaaccttaggctcctgtttaacctctgtctctgtgtcatttttccttatctgtaaaattaggaagacaatacagtatctaccacaaagggtcttgtgaggattaattgggtttatctgcataaagcacttagaaaagaatcttgttatacagtaagcacttaataaatgtccactggcttcatcagtaccattaccgttgaaagccttttaacagcaaaaactacaactctcactgtgtccacagtagtgggcttgtggatggagctcagatatttgttgggcttttgatcaagggaccattccagtgaatcagaaagttcctgtgaccacttaacatattacacgcttgcttgtgtactgctcttagatgatataaaaacaaatcaaattcccaaaccaaaaagctgcactcttttgtctgggtaaatacagctatgacatgtctatttccatggtttagaatatcaccagtgggaatctactgtggaaaattgagtacaacactatcatcatatgatttgttttgctcatatttggctgtgccattggctgcggagccaggcagcgaactccacacaatgaggagcctgtgaaaacgcagagaaggcaagaaaggatgcaaacatttaggcagcatctgatggtagctggcttgtggtttacctggcctttggttagataactgtgcctgatccctatggccaggaaggaagacagtgctaatgaaaatgaagatctgtacaacaaaagtacaggcctacctcagagatattggagtgttcagttccagaccacgcaataaagtgaatatcacaatgaagagctgaagaattcacatttgggctgatgggcctggggtagggatgaccaacagaccacatgcttcttgtctcttctactccctgatcctctgatagacagggctaagtgatcatccactccttccaccctccagcctccgagtgggccacttttcaagcatggaattccaggtgggtgcttccaataagttggcacaatagataatacttacttgctgtcaggctcagacattgctccagaagcagatatgatccaagggaccattgcagatagaaacccatgtgcagaaagtaaggcttagccaatgaagtacctcaggcatcaggccaggcagagagcctgaggactgcagaatccaggagctatacacataggataaggccagctgaatctggattggcccaggacagagcctggtttccaggaggctattcatattggatgctggccctgcacaaagaggacatgtaagctggcttcaaggtgcttagtcaggcgggacatctggtactaactagatttgagctatgccctttctttctgagttgccctggctaagcatccagccaaggggcagccaaacaagcccctctgcccactcctcactcttcctactctcacctgagtgggtccagtctcatgacaacaaaggaatgatgctcacatgcataggatgctactgtgggtatgtccaggtctggagtgtgggggtgagtcagccagctgagactggtaaggcaacactggttgctaaaacagtaaagtgctgtaacttctgttggttaaagagccagtgccctgagcccctggaggtccccacccctcccactccacctattgccttggccacctgccctttcattccaagacttgctcttcaccatccagcaattgaaggggtcatgcctggcacagaggcatctccaggactcctctgttggttctgatttagagtatcggcactttccagtatggtgtgctgttcctaaagccctggctgtaacttctccttgtttctcctatccaggaaggcacatcagaatgcctgtgataaatattaagtatttcatgtttgtatatagagccatttttacatttgcccctttattagtagtagcaaataataatatgaactgacacatttgtaatgttttagacacttaacatgtgttaacttgtttaatcctcatagcagccctgtgagctaagtactattattatactcattttacagatgaggagactgagttatggagaacttatctaattatgtaattagcctaagctaacactgcaagttagcaataagtagaagtctcccagggccctcccatgccctcacaaagcacgaaaagcaatagaatgtggtcttgtggattaggaaacggagactcagcaggccatgggtcaaggtgactagagcagcccttcgtgtgaactaatgcctggagaccagacagtccaggacagctctgtgaatgacaaggggacaggtgatgatcaagaacagattccccctccctcctccatgccttggcaacctcaaacagaataaaacaaaatgaccaccacaagagaggagagatagtgaaacaccggactgaataatatcgtattaaattgtctgagattagatttctccctgctgttatacaaaaatacaggttacatttcttgcaaccatttctacttaactttcctttctctgctgggttctgggagggaaacttcagtcagacttgtcacatgcccaggctttacccaggaagtgagcctcagtctcatctgctctcaaatgcctaacttatcctgccccggggcctggctggaccaggggttgggggagtgaacagtgtgcaggcctcctcctcaggggcctccctgcattggagatcattgatttgcttgttcctcctcctctcgcaacagcacctgcagttcttatttcgtggggagtggtaaggagtggttcagactggtcacggtttcttccaggtctgttgtttacagcatcaacttcatccccaggctgcttgcaggactcaggcaactgaagctcaaaagcccaggtcttgtagctcaagagtctggaaaggtttgcaaccttaaattccaagggtttggctgtacagctctcctctgttctgctgtaatcacccaatcaggaggcaacaggtgcttcatggtccagtttagcagctttaagagatactggaggaaaatacatcacttaatatcatccaagtacgcacctatttgccattcctaggtgactcagcctgggcaatattcccgcctaccagcaatcttttcagctccctcagtaaaataccaacacaccctgtggctcagtgatgcattgaagtcccaatttagtgataccttatttacagattttctaaataaaattgctaatacagtcaacccttcatattcacaggttctgcaccctcggattcaaccaaccaaggattgaaactatttgaaggaaaagaacaataataatacaaataaaagccaataacaatataacaactatttatgtagcatttacattgtattagatattataaataatctagagatgatttaacgcacatgagagcatatgcataggttatatgcaaatagtatgtcattttatataagggagttgagcatccacagatttgggtttctgcagggagccctggaatcctgtggataccgagggacgattgtacattttgagaaccgaagcccggtgctaccctgttgcagcgatgaagtatccaggtcacctggagaaagctgacataagagcaggcacacagcaggaagctttgatcctcatcttctctctggctgcagccctcagctcttgtgcaccaactctgaccaatgactaggactggctgctcggagtacagctgtattgagaaagattctgaggctgggtctgcattcagcaggaaaaaaaatgaagaggtgtaacactatggacgagtgggcaactggctcttcaggcttggaaccaagagggggcagcagagagcagagaagaattggttggcttgggctgacccagacctaggaaaacttccaatcttcttcttcttccctcaaaaccgaatccttgtggactcactcttgagactattgtccacacaagtggtgtggtccaaggccacagcaagaaaggtctgagggagttctttggggttcaggtggagaaaagcctgtgctggatgccaggctgctctgagaacaggaaggaagataataatgttaacagcaacagttacaattacccagcccctgtagggtgccaggccctctgccaaggtgctttcttttcattctctcaaagactacttgaggtggggaaacccccagtttacagatgagaaaacagggtcccagagtggttaaataccttgcccatgatcacgtgactaagggagggccaagccacattttagactcttgcctgtcctgccctctgtgttatggtgcccttccaggaaggaggcagaaaggtgcacctggagttagaatatccttggggagtgtcccggacccaagggaaggcaaacggtccttctggtacagactgctgtctcctgatggccacgggtctcttgacagatttagccaattcactggctcacaggtccatgcaccatcctcagcagagccggggtaaggtagctgggctcgaacagccccagaaaaaggcaaaaagaaagataacagaaacttgtatggaactttcaagtactcactgtggaagtcattgatttatctgcctactgtgagagttatgtcacgttggaaggtcacattagaacgcccctcacctcctgcagcctcagctccaccctgggctcagagatcaatccttgccttatttagggaagcacatccaagcatatttgaaacttttgggatgggcttggggatactggcaccagggacatcttgctgtcagtactgtcctgattctgagaactccactaacgccacattcctcaatccaagcctggatctgggactcaggctgctgcctcactaaatgccttatcttttgggtcactgcagaccagggccctgccttctttagccaatgtctgtttccctcatctggcagtaggacatcagtctaccaaaagagtcacatgttcatatcccagcttaggtccaagttgtgaaccaacttcatttcttaatgtaatcacttttttggtattgctttttttctctaaaaagtatgtatattttctgatcctacatgtaatattttctgggccagttgcagtggcacacacctgagctactcaaggaagctgaggcgggaggatcccttgagcccaggagtttgaggttacagtgaactatgattgcgtcactgtactccagcctagacagctagcaagaccccatctcttaaaaaaaattgttagaaaatactttaaagcatcaaggagaaaaaaatttctcctatctttctggatacatttttctcaactgcgcttattactatctaacaccgtcctttacttaggttttcattgtttgtctccttctctagaatgggagcttgacaacatgagggatttcatgttttgttcactgcaagttccttaattcccagaacaatacctggcacatttacagaatgaatgaattaattcataatgccatgacatcagatataattttatttaatattatagagggaacatttttcaatgtcaataaaattttttcaaaagcatcattttaaatggctgataataatctagggtatggacatctaagcatgtgttaagtatgcctgcagttttggatactgaaagattacacagattaatttgattccccatttatcaagctacagcagggccaggctcactttgttgtttggtttcttagtttcttgttcctggtcgaatgaacagatgagactggtgaattatggagaatttctgtcactgccctctctagccttggcatagcactgtggctcctctctccaaatttctaggtgatccagccggctgggctctatgtactgaagcataggctgcccagcgtaagcagaattgctaacaggatactattatggtacccacctgtgtggccttgtgggggtgggggaacttacctttgttcctgtcctcctctagaaaatcagttacatttctcttgcctccctcccaaggatgatttccagggaagcaaattaaaaagcggtgaaaagcctttaacaattactcagaaatctatcatttcatcctctttcacctccagttcaagtttaagaacagtcctttcaaaaagaaaaaattaagcactaaagtcagaaacattttctttgagacggagtctcgctctgtcgcccaggctggagtgcagtggcgggatctcggctcactgcaagctccgcctcccgggttcacgccattctcctgcctcagcctcccaagtagctgggactacaggcgcccgccactacgcccggctaattttttgtatttttagtagagacggggtttcaccgttttagccg

SEQ ID NO: 2528 - DNA, 4847 bp, Homo sapiens
ctctggtcctctcttgggctctttcagcgttattcggtgttttgtgtttgtgcaccttaactgcgtggaaaagtgctcggtccttgggaacaagggccacagggcattgcttccttccccagggcctggcacctaccgggcactagcaggcagtctggccatagtagctgagtgatgagtgaactgcttggaggctgtgcatgttgcccagactcttttaggtctatctcccctaaaggcatctgtgaaaacacataaagcaacaccctgaggcagcaacggctccagtctgggagtctgaggagcagaaagaagctgaggtggccataggagccccatgggcagtgaggtgaggccagggagatgggccacggccggtcagccagggccttgaagggcacggtaaagcgtatggattttgtcctgagaaacgagaagtcagctttgacaggggagggccatgctcctgtggcccgagtcatcaggccgtgctgcctgctatactgctggatgcccctttaagtcaggagccccacactgttcatggggtaactccagggcctggctctcagtggcgtgcagaggcatttattttattttacttttttgctgctttgcacctggcaatggaagaatgaaaggcaacccagagtgaaattaggattacaattttacaaacgtctgtttctgacgcaggaagcacatcatttgtccacatcacactctcttggaatttatgacaaagccaggtaaatgaaaacttggaaagataaacctcagataaggggggactactgtattcattccttcaccatggcatgtctgtgtctgagaatctacccttaaaaacaatctggatgcaaagaagccgtaagatagagcgcagtcccttcatttcataaaagaatgaaactaactcaaatacacaatgcaatgggtgagtaaagtattgcactacccttaatgtaatattgtggggccactgaaaacatgctcacatgtttatggaaatctgagaagtgtttctatctatggcatttcatcacatttaagacactgttgattagagaacacaccaccatttcacgtacctttaaggaagaaaaaaatacccagaatggttatttaataagggacgtctaagtaaagctgggatcctaaagggctatttctttggtgggaggagaatgataaacagcctcgtcaggcagaaagagccagtgtcccagccatggacccggatgcagggagggaacaaaactgcccctgaggacgtgcacaagccagtactcatgctggtttgagtctgaatttgcacaaacatatggtctggaaacacctcaagcaaatgctgtaactgaatttaagtttaaggttatgtcaagttggcagtgcccccaggtgactggcagaaacaaatacaaccacctctagaaagaactgaatgttaacaccagctgacagtgcctgtaaaacatcagccactgtacagtgcaagatccagagacgttaaaatgtgaagtgagttttagaattaaccataagtaaaaaagcagaatcaaatgggtatgtggaggatgacatctctttgccgagtagaccgactggaaggaaaaacacagtaaaatgttcacagtgatcttctgtaggtgctaagactacagcattttctttctttaaacgagtctgcgttttccagctttttctaaagtgaccatataaaaaaaggagaaataaggagacgcaagtgagagaatgactttgggtggggtagtcaaggaggtgaccctgaaggaggtgacacctgaactgagaagggaccagcacaggagaagccacctgaagagttcattgctacatgtgtatccaggacaaggacctggggcacagggaagatgcttgatatgtatttgttaaatgaatacacgggttaaggaaggaaaaagctgctaaaacaggagcctaagtctcaaggggtcccagccagagtctggctcttcagggagccattctcactggactgagctgataaacagggcagggacgcccacctggccaacagcagggccctgtggaaagtatgcagctgcagagttagcagagaaccatggttgtgggtcttgggcctgtttccccatctgtcaaatgaggttagtgctttgccacctctgtctctgaagtcagctccagatgatatcgtgctttgaaatattaagccacgtgcgagcgtgaggggctgtcacgctccaggaggtcctcatgcgagcccagcagcacctccctgtaacactgggaactgtcagcacctccctgtaacactgggacctgtgagcttcagacaagctgctttgtctcaggaaggttcccgtgctcgctgctcagcccacaggagatgtcacatcagctcctgtcttcctgcccgcatgcactttccagattcacttaccatgtacgagcctgtgctggaaactgctaacagagataagagatgggtccctgtccttgagaaagtcacagggagtccagagagtcagatgagcaaacaggatgataccctgtgggacccgagggaggggacacacaatctgctgctgagaggcagttaacagccaccactggggggaaataatggaggcattgtaggtttcctacattgtttccttttgctgtcacagttttgggaggttatctccatttcacagatcggggctggaaactaagtcatctgtcaagttcacagagtctggactcgcacctgggctggggtgactcaagtccatgcccacgggcatactactgcactggtatgtgtgtgctggcagtgggggggggcagggagatgggaggaggctattgtagaggtgacagcgtgctcttcatttagagactggggccaaggggtaatggtgggcaatgaggctggcacaagggccaggtgggctgtggattccttgtgaagaagttgatatgagcaaatccacaaatccggccaaaagggaaattttccctgggctttctgcgcaggtcatccccctgtcccaagccagcccctcagaggacattcagcaaaggcatcccatgtcctgcagccagagggctacagggaaaacttaactcccaccagcttccagctgctctgactgggaccatgcccaggtgtcactgtcaccctggtctgctgtggagggtgccaggcaagagttcgctctccctggaaacccagctcagctcttgctaagcagtggctgttgtggggcaggaagagccgagctgggcctgaccgctggtacggagcagaattctaaggaatttgcagatggaattggggttactaacaggctgaccttaaaatagagaggtgatcctgggttagctgagtaacccaaagtaatcacagaagccctcaaaacaaggaaggcagaagagagactccagacataaggacttaacccaccacgggtggctttgaaggaggccacaagtcaggaaatacaaggggctgagaatgaaccccgaggcccatggctggcaaggcaacaggaacctcagtcccacaactcgatggaactgcatcctgccaacacagaactcgaatgcaggttcactgccggagtgcccacaccgagatcttggccttgtgactcaagcggagcactggctgggcatatgatgctgacttctgactctcagttcatggcggacagtaactgactgctgctttaaactgatacacctgtggcaattggttaccgaggaagaaagatcacctgggctggagagtggagggaacagggcctaggatgctggtgatgaaaggacacaggtcccactatcggtgccacgctggccacaggagcatctcctctgggacaggagcatcgcagtcatgagtagtgttaaatgcattccttcactcattcagccaacgtctctcaaacatttgctacgatataagtgctagctgggtgtctggagctcaaatctcatgaaaggacagaaggccaaacagacaacacccagggaaatgagtcccaggataggaacaaggtccccgcctgcccctaccccacctctggcacccagatgctgtgggaggtgagagaagggtcactggtccaccaggggtcgaggtttctcagggcttgaagccctgtcgtgggtcttggtgcccaggaaggagacagaggccatgtcggggtgggccacactcagggggaagcagcagactggctgggctggtacatggaccataagggacctggccaccaggtgtgccgggatcagctcaggagagccttacagttcagacaggaaagttgggactgaggatgccaagcaggggaaagaggctggggttaggacacatcccaggacttccccaaccgttaggacagtgaccttcaaaccatgtcagcccctgccctctggggccatgtgcccccgcacaccctgactgggggatagcagcccgtgccggtggcctggaacaccacatccacacacaccacctgtaagtgaatgaattcacactttggtttgtgtaccagccttggggactgctatgccgccagcacctggcacatagcaaacaatccatgttagctttacaggtaaataaaagacaaaggcgggtgtctgagagactggccgcatcagggaaaacagtgaaggaggggtgtctgatgcccagggcatgatgggggaggggtcaaggcctgcaggccaaaggaagccagctggggacagatggcagacagcatccctcaccctgtggcacaagcctggaagctgggtctgccctccctcaggagctgtgcagcagagccactgttgcactgtgacaggac

SEQ ID NO: 2529 - DNA, 3798 bp, Homo sapiens
gttatgggttgaattgcatctccctaaaattcatatgtttaagtcctagcccccagtacctcagaatgtgaccctatttgggaatgagtttgttgcagacataattagttaagatgaggtcatagtggaatagggtgtgtcctacttcggtatgactggtgttcttataaaaaggggaagtttggacatagagacacaaatacacaaggaaagctccatggaagataaaggcagagatttacaagccaaggaatgtcaaagacggccagcacaccaccagaagctagcagagaggtatggaacagattcttcttcacaacctcagagggaaaaccctgctgatacctggatttcaaactcctggcctccagaacgaagtccctggagagaggacgtgatgtctgaagctatggcagccatcttgtaactatgaggccacaaacaagaaaagcaaaaaccagagtgaagcatggcagagcagaaagatggaaagaacctggatacataagagtgtcactgtgcagctgtacccaccctagactgcatatacctggactttaacatcttgtttggacttgtttgtgagcaccaaggagacacctctggggacttacagatctacttggacagcacttgaccatggacctgccccccagcagatggggcaagagccagtgaaatttgggtatttgactgcaaccctgtttgttcccacatgtagaggagatctggtgcaactccagttacttggagcagtataacagcacagccactgctgtcgtatcaacatttttcgctagtcctctctcatgtggggcttgtctatggggcatgttggcattgggaagtcctcatttcctgatttactgtctcatgatgagataccaatcaaagctaagatacaaagaactctttgaaaaatagccttttcaacttgtccacacacaatcagaaacatactgattttggattaactcattattaatgattttgtctattttgaaagaggctgccctgaacaaggagtcaggaattgtaggtcttagctccacttttgctattaagttatgctgcaaaccttagaatcttcgctgagcagttctctgggcctctcttaatctgtagacgaagaaacagaggcagatgaaacacatctcatctaattttgcagacacgctcaaccctctacactacaataaagggttaaaaaaggacataaacctataaagaggggagaagattggaagaagctaagagagacaaaatttaggagtctgaaaggcatatgaacaggtagtaatcaatttagcaaacttgagaggaaaatcctgagctaccactgggaaaagcaaagaaatatatagccaggcaaaaacctctccccattccaacagaagactggaggattttattttttttctccctgcggaaaacacagaacaggatgtgtggacccagggacaccagaagcaattgaggtaaaagaaagagaggaagtaaatatgtatatactagatgctaagacacctgttcctgccagatgtcccagaaggctgacagccaggcctttctcctccaagcaagaaactggaagcatctcctatagggagtctgaccagctcaatagcttgctggtcaacaagctctgctcaagtgcttaagtttccagtcagggatttttttttttttttttttttttttaagacagagtcttgctctgttgcccaggctggagtacaatggtgcaataacagctcactgcagcctcaaccacccaggctcaagccatctgagcctctgagtagctgggactacaggtgtgtcactgcacttggctaattttaattttttttgtagggatggggtctcactagtattgcccaggctggtctcgaactcctgggctccaacagtcctcctacctcggcctccaaatatgctgggattataggtgtgaaccaccacacctggcctctaatcagttttctagtctcccactcaagccttagttgagcagacaaatgaagatttccaaaaatctgaggaaaacctccagtatagaacatgtagactacaaagagaaaaaggcagcctggatgaaaaccgagactaaaaagggagaagaaacaaaattcagggcaaaacaaaaaacataatcctaatatcttcaggaaaaaagagaaattacaatcatgaaaaaaggaaagattgctaaaaaataaaatctcagcgaacaaaaaaagaattcttataaaacatggtaatggaaattaaaaactcagtggaaggattaggagatgaagttgaggaaatctctcagaaactaggacagaaacataaatagatgggactgaagacagaaaagtagagaaaattggaagacaaatccaggatattctgtatgcataaaaggaattacaaaaaggaaaaagaaaatagagaggaggaaataagaaaatagtttagaaaatttccccaaactcaaaacatgagtttgcaggttgaaaaggtcccctgagtgcttagcatgctggctgaaaatagacctgcaccaaggcctagcatcatgaaatactgagactctgagagaaaatcaaagagtttacaggtttctgcaataataataataataataggaagaaagaaagaaaggaaggaagaaaggaaggaaggaaggaaggcaggcaggcaggcaggcagacaggcagacaggcaggcaaagaaagcaagccatttacagaagatcagaaatcagaacagcactggatttctcaatggtaattggaaactagaagacaatggagccaagccttcaccatgttgaaaaaaaaaatccaaaatatttgcaatctagaattctatactagttaatctatcaatcaagtgttagggttagaataaagacttaagacatgcaagatctcaaatattttgcctgcaatgaatatttttcatactggaggattttcttctggaaaatgtgttccaccaaaatgagggagtaaaccaagaaagaggaagaagcaaagaggaagatgtaggagatgacaaacaacggaactgatacagacaagaggttactagaatccccagaatgatggagcagagaggccccaaagtaacatttgtacatcaggtcctagagggcaaccagttcagtccaggctggtcagaagtgtctggcggaaacttctgcaagacaataaaaggaacagaacctcatgcacttaaatggtttgagaagaaatgaagacactggtggaaagcttagggttctattaaggaaaaatacacagaaaactaagcaaaccgaagaacaaggcagtcatttattacaataaaaacaaaaagtcacacaggaaaggaaactgaaacatagtatatgacactattcacaaagccataataaaacactcaatatcgatcggactacagtcaagatgtaactatacagggaaactggaagggtgtaggaggagggggtgggaacagtacacatacgtggtatgtgtcgggtggagaaaagacagctaaatcttcgtcttctatagtgggcagttattagctaatgcctacacccaatagatcaagcaataacaatataagcatgttatttagaaaaaccaaagtaattgccaaaggaatcagctcaaagagttgaaggtgattgcacatgaagacgtagggggaggtggactacggcttgctctttttcttaacacatgttacacgactatttgttaaactctgggcatagagttttgttacaaaaataatttataaattttaaaatcaatc

SEQ ID NO: 2530 - DNA, 2212 bp, Homo sapiens
ccggggcacttttggtaaagaggctgggactctattccctggggtgatggaagactggctcttgagctgcatccttggtagcttttccttcttcatctcattgccagtgaggacactgaggaggagaaggaggtgaggaggaggaaaaagatgaggaaaaggagaaaaccaaccacgatccactgtcaccaaatgagcatgccaggttgccatgctgcacagctccaagaagcaccactgtccatgtggtcaacatggatggatccctgaggaggtgtccagcagcagcctgcatgccatgcgtggctctgaagtcaataatcctggaaaaagggtcattccttcccaataaacgacagtgggctatctcccgcagacacccacgaaatttccctccttttccttccatggaggactggtgaaaacgtcatcatggacctgacctgcatctggagaccatccctcagaggtgctgcagagctcctttctgcccaggcatttacggtgggtgagaacttggagaggcgagctcacgagggagttggggttttgacttggccatgactactcagctcaggatgaaagctgatactttctgagtgcattctttgattaacccttcaatcctcacaatcaccccatgtcaccaggaggaaactgaggcaaagtccacacaactggcaaatctggtatgactctctttctgtcacagcagtttgctggcaacagacctacagccagatgctcaggagccggcgcaggcgtaggagcctccagcggcgcaggagcagttggggtccattgcaagccgaggtgagaccggcgttcccaagcgagaagagaagaggcagtggaacacgtggagggcgtcgtggattgattcaaactttaaacaggaaggagattctgacacctgctacaacatggatggactttgaagacattatgctgagtgaaataggccagtcacaaaaaggcaaatacaggccaggcatggtggctcacacctgtaatcccagcactttgggaggccaaggcaggtgggtcacttgaggtcaggagttcgagaccagcctggccaacacggcgaaaccctgtctctactaaaaaatacaaaaattagctgggcgtggtggcacatacctgtagtcccagctactcgggaggctgaggcaggagaatcacttgaaccagggaggcagaggatgcagttagctgagattgcaacactgcactccagcctgggcaacagagcaagattccatctcaaaaaaaaaaaaaaaaaaaaaaaggacaaatacaattccgcttatgtgagtttcctcgaggagtcagattcatggagacaaaaaactggatggtgggggaagaggagattggggtgttattgttgaataggtacagcgtttcagtttgtgaagatgaaaaagtcctgaagacattgttaatgataaaacaacactgtcaatatacttaatgccatgaaactgtactctggttaaaatgataaaatttatgtcatgtataattttactatgataattaataatcttttaaaaagacccatccataaccacccatttgggctctatggttccactcatgcctttggctttgccttgaggtcctatttctggagaaatcttcaggtatgaatcttggcctgcctcgaggacttagctgtgttccttgactcaggtttgagtggcaccttctcgtgttccatttgttcatcatcttgaacctaaagcaaagaatccactcttaattgttgtcttggtttaagtcaggggccagcacgagagggttctttattacggttttcagttaaccattcagccttatgcaggtcccttggaggagaagttgaagagattaatggaagccgaaatggctgggaactatagattgtgattattgtactactaagatggtgttgcagctaggaaggaagtaaataattcaatacaatacatatgtatatacacacatcaacttctgagtccatatataaatgagtaggtgacttgggcacttgcttatttatgtattatcctagagcatatatgttatgaaaggagggattttttgttttgctcattattccattcccactgtgcctgttatgaattaggtggccaatcaacattagttaagtggatgaatgagtacattttacacacacacacacacacacacagacacacacacg

SEQ ID NO: 2531 - DNA, 34427 bp, Homo sapiens
gccgcaccgaaaaaggttggactcgggactccgcaggcccccccagccactccgcggggcgcctcggaggctgtgacctccagggaggtccggctgggtgcagcgtgacacgccggggcggttgccaaggacctgcccaatctgcgggtccagttgctagggcctccatcttgggggccagtggccgtggcgcccccggaaggggttgccgagtggggcattcacttccggtctggggcctgcggcggcggcggtgtcggcggcggcggcggcggcggcggcggcggcggcagcgggtcggtgtagaaaatggcgctggtgcagcggctcgggcctctccccgcggcgctgcggagggcttgaggctcgcgagcctccttcgccgcgccccacttgctcgtgcactttacacacatgagagaattggaagctaaagctaccaaagacgtagaaagaaatcttagcaggtaagatgggcgagctttccgtctcccgccccacgataatcgtatatttctactccgattcgccttttctgggttgagaagttcccccgtgacattttcttccgcacccggagagcagacattcgggagaagcggcctgggggaatactggagggattgcggggagatgcgtaattacgcgtgtgtttctttctttaaaaaaaaaaaaaaaaagcgcaaagcaattcttgtaaacttagttaaagcattctcacccttttagaatttaattaggggacttgtgcattaattactattgtaaatggttgcaggcattgtgtgactcatgattgaggcggcccttatggcgggctgtcaaactgttttggcttccccgttattactttgtagctcaaattgttgcttttataaaaagatactatgtgttcgcattcccccccgccccccccccccccccatacattgtagtcaggcggattctgttgcattggacacagttttgtccttgaactttaccaagcataagctgcgttttgttttccttcgaaactccatttctgtccatgttcggtgtgtgctctttttatcagctggtaaaataattaaaaatcttttctccagaagaggttatcgttcctgttgggccctgctgcttttgcatcaccgtgaagggagaatttttttttttttttaaacgatgtctttatggaatggaaatatttagcttcattgagctgtaattgcttaagcatcaaggaattgtactgtatttaactccttttcacattcattttctttcctaccgtcttttcctttcttattcccctttttcttttgcatcatattgggacactcagggaaacttagccaattaaccaaatccgtgaatagctttctttttttcttttttttcacttgttgaaaataaaatgaaatttctcctatctcaggttttaatgtagtttgctcttgatgattgcgggttttaggtttacattggggtttttaacactcacatttcaaatcgtctgaatattttgcaccgcgtagaattgttccaaattgctggcctattgagtttcataagatactaatctgttcaggtgatcgttaaagaatgtgttcagatggtgaaggataggcatcattggtttacccagtaagggattctctgttactcaaaataattatgggatcatttaaaggaaattaagtctgacatcactgactatttgtggtatatttacataaattttgtcaaaatctagtaaggaaatgttaagatatgaaaccattaaagaaaacaggttgagccattaaggtgtaatatcagcagaacagagcttagaggtctgtttctccttccatttttgttttatcaggtaactatatcagtataattcctatgaaggtgctctagtacttaattaaaaattgtctgtgccacaggtataattttaatattaggtagaactcgagtctgggttggctatttatcagagtttgaattccagctctgctacttgcaatatgaccttgactcttggcaagtcacttagcctctctgtccaatctataaaacgagcggcgtgggccagccagttgctgaggtctgttaggccctttgggttacataaaaggagtaaagtgctgtccgtgttcacagagggcatgtacagtctagtagaaagactatcataaatgcataaataacagtagtactaggtagatgacgtaggaatcaaaagataccatcccattcatgtgcttgagaatattcagtcggtcagaaggcatgaaaggaaaaacaaatatcaaagagattgtaaggcagtgtgtactaaggatccaatgagaggggagcatttcttgcaggttaaaagtgttctgaggaaggagagaggtgattaggtgggcagatgcttccttcatctccatctctagctgtgtttcctttttcacaaaaaagaatgtatctgtctttacccatagtgctctctccaggaaatcaaggcattgtattcattgagtaaccattttttgagcattttcgatatttcaactgtgggactgggcactaagccagggaagaatgtaagtagttaaatttattgattgcttactatgtgcctggcacacttttcctaagattttacatggactcatctgatccttgaaaaaccctgtgaggtaggtagtattgttatctccgttttacagatggagaatttgatgtataaagaggttaagtaacttggaggagaccatatcactggtaattggagtaactttttaggcttcgaacttgcaaaatttgaaaatttcttttggtaggcgggacccacagatgcatgcaatacttctagatcagttttttcatctgggcacttgacattttggaccagataatttattattttgagggttgttctgtgcatcacaggatgttcagcatccgcagtagcactccccgtccagttgtgacaatcaccaatgcttccagatattgctagatgtccctgggagtggcgcagaatcgaccctggctgagaaccactgctctagatcttcattaggaattgtaacgtgaaagcctccaaacttttagatgttgagttaatttaaacatcttttggtcgagtgctgtggctcacacctataatcccagcactttgggaggccaaggcaggtggattgcttgaggtcaggagttcgagaccagcctggccaacatagtgaaacctcatttttactaaaaatacaaaaattagttgggcgtggtggcatgcgcctgtattcccagctacccgggaggctgagtcaggagaattacttgaaccctgggagcggagagccgagattgtgccactgcactccagcctacttgacagagtgaaactctgtctgaaaaaagaaaaaaaaatcttttaataacatggaagcctagaccctattatgtagatcctcaatttggaagccctggtttctgaatgtcaaagatgtgttgccattctccttttcctctgctaagctgcaaatcctcaagacagtgtgcctggtagccagtgccagttaaacaacattggcacaaataataaatttagtttactatcataggtaaactgtcttttaaaattcacagttggccattaaaattgtcacattatgttagtatcatgggagccataatatctacatgagggcgattaccattagaactgaactttgaagaatggaatcagttttgaaaggcagataaaagggcattgtaagaacaacaacagaagtaaggacacaaaaatccagaaagtacaggagattttgatattgcagtgggtagttcaggttatataaggtatttgtagcaaactggttaaggccagatatagaggttcttgaatgtcaggttgaggaacttgtgcataaatttttaggtatgggagctattgcatgctttttgttgcgtactgatgtgatagaataatcttctggtctgggattactaaccaggtgtatttatgggagaaaactagcgatctaggcaagaagcgatggaggcctgaattgaagtggtggcaaaaagaggtgagtgaggctggacccagtggctaacgcctgtaatcccagcactttgggaggccaaggcaggaggattgagcccaggagtttgagaccagcctgtgcaacatgataagactctgcctctacaaaagaattttaaaaaattagctgggtgtggtggtgtgcacctgtagtcccagctacttgggaggctgaggtgggaggtttgcttgagcccagcagtttgaggcttcagtgagctgagtttgtgccactgcattccagcctgggaaacagagtgcaaccctgtctcaaagcaaaaagagagagaaaggaaaaaaaagatgagtgtataagatactgaggaagttaagaatctgggatttgacagctgattaggtgtcagaggagtcaaaaatacataggaatcttcatcatgggtgaatgagagtttgacccaacctctgaacagaacaagtcagagcagaaataggagtttggggagagaagatgctaagttacattttgcagttgtaaaaaaaaaatctaccagtactggtctagaccagtagaactcagctggtctagtctgaaaaaatattttggaggccagaatcatagaatcattgaatatttagagctggactatgactttagatagagatcagccagcattctgacttcttcatttctcaagtgagaaagctgtggttgaaacagattcagtaacttacgcaagtttatattctctgtcaagtgacccagctgggatttaaacaggccttttgactctaattctagtattcctcccatgtgcagtattttattttatattgcacaatagataaaatataattttggtttctccttttttattctaaaagagtaaaagcagttatctcaatatgttatgttcattctagtgatgactttactatcatgtactaaatgtgttttgtttaaagtagaagttaacttcacgttatactgatttgtccccccataaaccaactgtatgtcatcatataacaaaagttgttaaaagtgctatataccatataatgttgcatctaaactgggacacttatctgagatgcttttgcgtgggacaaatgctatattagaaatgactaggactggccaggtgcagtggctcacacgggtaatcccagcactttgggagactgaggcacgtggatcatttgaggtcaggaattcaagaccagcttggccaacatggtgagaccccgtctctactaaaagtacaaaaattagctgggtgtgatggcatgtgcctgtaatcccagctacttgggaggctgaggcaggagaatctgaacctgggaggtggaggttgcagtgagccgagattgtgccactgcgctccagcctgggcaacagagtgaaactctgtttcgaaagaaagaaaagaaatgactaggacagcaggagtaaaaccccaaggcattaggtctccgtagctaaggtggatcccactcatgcaattcatcaacctttgtctgaaaaaaaagaaagaaaatctgattttgttaagcttttcttttgctttgctgtgatacggtttgcaggccaacacatgcatattgctataggttggtgcgaaagttaattgtggtttttgctcatttttaatgtaccaacccaatatgctttttttccagcttaatttggcaattaggtggtaaatcacttgataggataaattaatcacaatctgtaaacttaatttaaaaatgtgtaacaaccctctgtggaaaatttgaatataaacatcaaaagaataccattctgtaagctcttttgatttttggcatctgaaatgtctgaaagtataaattgcaaaacatatttacaattttaatgacaactgcaaaagtattgcccatgattggaaagactaaaatggtatgcgttatatgtattctgttcaggctgatgcatgataaatctctcactgaaaaaacagaaatccctatctcattttaaaattttaaaaaattggccgggcacagtggctcatgcctgtaatcccagcactttgggaggccgaggtgggcagatcactggaggtcaggagttcaacaccagcctgaccaacatggtgaaaccccatctttactaaaaataccaaaattagcctggtgtggtggcacatgcctgtaatcccagctacttgtgagggtgagggaggagaatcgcttgaacctgggaggcgagggttgcagtgagccgaaattgcgccattgcactccagcctagcctgggcacaaaagcaaaactctgtctcaaataaataatcaatcattctaaccttaagcaaaattggaaaaatgttgcaactaatacctgtatctctttacctagttttagtgattattaatattttgccacatttgttctatcgtgacattgcacaccaaagtatggcagtaggtatctcacagaataagggcattctacctgacagcaatcaaatgatcacccacaggaagtttaactttacaattctgtctggtccctattcagattttcccaattttctcaaaattttttttaaagttgtatttgttctttcactcaattgctgtatcctgggttgcatttagttgtgtctgaagtttctcttacattaggagcattttcctgcccttttctgcttctctcttgacaatgacattttgaaatagtccagtctagttgtttttgcagactgaaatttgcattttttgggtcttgtctgtatgattaggttcaggttgaccctttttggcaggagtatcccataggtgatgatgtgtttgtcttcagtattccctccccacagcattttgaagtaaattaaccgaaaggttatccaatattcttacttctacactgacttggtgtttctttcattttaggaaatgccaaacaattggtttaaaccgagatgtaattttaaatatttgaggttacagtaattacaggtctttgtatttaaatcgatcagccataatgattactgcttttatgaagatttatgccaaaggtagctcccttactgtgggacataaaagttgcttgttttcagctttgaccagtgatgaactgataaccctggtaggaaaatgaaacattggggctgggcttgtaatacgctttcttaaaagaatgccccattgaaattagagtggcacggtgccaccagaccaagggttctcatcccgatgccacagagggaccacaggtgttatgaagtggtttgcaaaattgaatgtatgccaaaataaaataataaaaataaaaataaaaccccacaacaaaagcagatatggtctttagtgctcattagatctcaaagggtcattactcctcaaagattaagaaactgcttctttatgaggaggttgtcagaggagctgaatagtatcaataagaggaagatgtttgagattcaaaaggaagtaatattcgactaaggcatagcttctttccatcttaaaaaaaagccacccatgaaaataaatatagtttaaatttcctatttaagatgtcttattttaaaaatgatttgcatactctgtgtgtttgagttggctatgaaggagaaatcctagcatttccactcttgtaactagggaaaagcattttgaatttttagcagtagtatattatgtgatgatgactcagctgacttcccgtttcaaatggaatgttcaaaacagattgaaacctggttgaagaattttatactttgaaccttacaagatattttctgcaaacagtgactgattggattttgtataataacaaacaagattaagccaactcagttgttttgctgttcttattagtggttttcagtcagggagcacttattgagcagtttgctgcaataatattgaatatttttagagttatgacgtctgtgttttgttgactttggtcccttctttctcccattcttttgaagtttccctaaaacatgtgtgcacagacgggagagaatggtagttaagtgtgtgctgattttaaatgtccttttaaatatcatttattccttgataattgactgtataactgatgtaagagaaatatgttttatatgttattccacttgtgaatctctttgcaatgtgaggcatatagtgaaaatcttacaaagatagggtcataaaatgtgcattctctacactgctgcaggttaatcgtcctcgagccacgtttctgaggcctgtcagtcactatttcttagaaacctttgttggctccttcccagtgactctggaattaaagcccagactcttgttttttgctcagcttatcaatttagcactgtcccttccaccttttgccctgtccctaactcttccttctctgaatgtacctttcagtttctctcaacttttaaataacagctttattcagataaaattcccatatgataaaattcacccttttaaagtccacaaagtgtatgatttaatggtttttagtatattcacagagttgtgcaatcagcaccactgtctaattctagaattttcaccccttcacccaaaaaccccataatagcagccactccccatttgtcccttccacccagcctctggcaaccactaatctactttctattataactctatggacttacctattttcgtttaagtggaatcatactatatgatacttttgtacgtgacttgtcttatttagtgtagtgttttcaaggttcgtccatcatgtcgcatatatcctttattcctttttatgggcaaataaatttcattgtatggctattgcccattttgtttgtccgttcatcagttaatgggcatttgggctgttctaactttggggctattatgaataatattgctatgaacattcatgtacaaatgtttgtgtggacatatattttcaattctattggttatatacctaggggtggaattgctgggttatatggtaactttgtttaacttttgtttgtgttgttttgttttgtttttgagacggactccctctgttgcccaggctgacgttcagtggtgcaatctcagctcactgcaacctcccaccttccaggctcaagccatcctctcaccactgcctcccaggtagctgggactgcaggtgcatgccaccacgcctggctaattttttctatattttgtagagatggggtttcactgtgttgctcaggctctgtttaactttttgaggaactgcccgactgtttgcaaagcagctgcacagttctacattctcatcagcaatgtatggaggcactaggttctccacatcctttccattgccagcatttgttagggttcttgtttctgattttagccatcctaatagatgtaaagtggtatctcattatggttttgatttacattttcctaatggctaatgatgattagcatcttttcatgtccttattggccattcgtatatctgatctgagaagtggccattcagattcttctcccatctttaaattaggtgatattttttgtcattgaaaaaggtctttatatagcttagatacaagtcccttattagatatatgatttacaggtattttttcctattttgtggcttttcctttcacttttttttttttttttttgagacagagtcttgctctgtcgcccaggctggagtgcagtggcatgatctcagctcactgcaaactccacctgccaggttcaagcgtttctcctccctcagcctcctgagtagctgggattacaggcacccactactatgcccaactaatttttgtatttttaatagagacagaatttcaccatgttggccaggccagccttgaactcctgacctcaaatgatccacccgcctctgcctcccaaagtgctaggattacaggcatgagccaccgcatgcagcctcttttcactttcttgatgaagtcccttgagcacaaaaatttaaaattttgtaaatctagtttaccagtatttttttctgttacttgtgttgttggcaacaaatccaaggtcacaaagatttacttgtattctaataattttatagttttagttcttaatgtttagttctgtaattcattttgagttaagttttgcatatggcatgagggctccaatgtcattcttgttatgtaactatccagtaattccagcttcatttgttgaaaagactttcatcttggcaccctgttgaaggtcacttgatcataaaatgaagaattatttctggactctcaattctattctgttgatactatgtgttcatcattatgccacttccacactgtcttgattacttcagctttgttgtaataagtttggaatcagtatgagccttccttcaagattgcattggctggataaccagagactaattattaaaaaaaaatttttttaaagattgcattgactattctggttgcatttctatgtgaatttttggatcagcttgtcaatttcagcaaaaaggcagctgagattttgataggaacagtgttgaatatgtaggccagtgtggacagtattgcattttataatattaagtcttccagttcacgaacatggaatctttttctatttatttaggtctttaattgttttcaaagatgttgtgtagttttcagtgtgtaatcatgcttcttttgtggaatttattcctaaaactttttgatgctattgtaggtggaattgttttcttgatttactttttgggttgtccactgctactgtatagaaatacagtagattttttttaaagttttttaaaaattgtgaaacacgtaaaatttaccatcttatccattttaaatgatgtagtttggtggcattgtccattcacattgttgtgcagccatcaccaccatccacctctgcaactcttcatcttgtaaaatggaaactctgtacccgttaaatcataactccctattgccttcagctcttggcagccacaattccaccttctgtctgtatgcatttgattattctagatacctcattagtggagtcatagagtgtttgtccttttgtgactggcttatttcacttagcatagtgtcctcaagatttgtccatattgtagcgtgtgtcagccaattgatttttgtatgttgatactgtgttctgcggctgtgctgaacatgttcattagttccagtagtctttatgtatctggattcattaggactttctgtgtacaagagcctgtcatctgtgaatagagacagttttacatcttcttttccaattttcgtgcatgcttactcacacacgcactctcttttttctgactggaacctcgagctcagtgtcgaataggaagtggcaagatcagacatccttgtcttgttcctaatcttgaggaaaagtatgcagtctttatcattatgtatgttgtgagctgtgggcctttatcaggttaaggaagttttcttttattcctgttttgagtgtttttgtcttgtaaaaggatactggattttgtcagatgctttttctgtgtctcttgaaatcatcatgtagctttgtccttcattctattaacatggtgtatttcgttgattttcatgttaaaccacccttgcatatctgggataaatccactttgtgtagtcctgtttgttgctagatttggtttgttagtcttttgttgaggagttttatgtttgtattcataagggttattggcctatagatttatcttttgataccttggttctcttttggtacctggtacctgatttgctctggtttgcaatctgggacctttagctgttggttttgcgtccacctaattctgcattgtacaataataattgtttttatgtattcagttttattttctactgtatgcacttcctcctttggttgcaaccttctttgcatcctaaccttagcttagtgcagtgctttgtgcctagtctctcatggctagcaattagtgtacactttttacattttatttatttattttttgggggacatggtcttgctctgttgcctaggctggaatacagtggcgtgatcgtggctcactgtagcattgaattcttgggctcaggtgatcctcgtgcttcagcctcctgaggagctgggactacaggcatgtgccactgtacctggctaattttttaatttttgtagagacagggtcttgctgtgttgcccaggtttgtctcaaactcctggcctcaagtgatcctaccaccttggccttccaaagcactgggattacaggtatgagccaccacacctagtcccactgtacactttttacatgcatctgttaagtacttcatctgcattacccaattaaatcttcacaaccacccattgagggaggtacagtttgagacgtctcataaattagatgatgaaggcttcagagaaataaaataaattgcttaaggttacacacgtagatggtggaattgaggtttaagaccacttctatttgacatttggacccaggggtcttcactgcatgctatgctgcctaggaaatgcttgtttgaatagattggaattgaactggtccttaaaggaaaagtaacatatggataagagtaagaattaaaagagtgcatttttggcagtggtgttggtgttacagtgttagtaaaggcaaggaagcaggaattggaatctaattagagtgcccagtgacagggagtattgtacaagtaggactgttttttgtctccagagcagtaattagtcctatttggaagagtgagattaacatctaaaataattagaaaatgtctgggcgcagtggctcacgcctgtaatcccagcactttaggaggccgagacaggtgaatcacctgacgtcaggagtttgagaccagcctgtccaacatggtgaaatcttgtctctactaaaaatttcaaaaattacctgggtgtggtggcaggtacctgtagtcccagctgctcaggagtattgtacaagtaggcaggagaatcacttgaaccagggaggcggaggtggcagtgagccgagatcgagccattgcactccagcctgggtgacagagcgagatgctgtctcaaataaaataaaataattagaaaatgagtattgtttaattagaggtcaaggatgaggtttgtttggattggaaagaatcatgaagggactagtaattaagccttaaaagaagagtaggatttgggtgggtagatgtagcaaactgagttttgggtcagccttaccacagccttgtaccatctgacaagtcattaggactttctgatcctcaatctctttaactgtcaaaggggaataataccagtgctatgtttcagggttgtgagttcaaaatggataatatctcagagtactttgtaaattgtaggtgtttctgtccttatggtggagtatctattgttttctaagtttctaaactcactaactttcctcaatctgagcttttaattaattttttattattatttttgagaaagggctttactctgtcacccaggctggagtgcagtgtggaatgatcttagctcactgtgcgacctctgcttccctggctcaagtgatcttcccgcctcatcctctcgagtagttgggactacaggcatgcaccaccacacccagttaatttttatatatttgtagagacagggttttgccatgttgcccaggctggtctcgaactcctgggcccaagcaatctgccttggcctcccaaagtgctagaattgcaggcatgagccacctgcagagctttttattttgagttaatttccgatgtagagaaatgcaagaatagaacaaagaacttctgaatatccttaacccttaatcctcaaacattaacatttaatcacatttactttattccctctttttatacatactgttttttaccatttaagagtaacttacagacatgatacccctttactcctaaacacttagtcaaagatcttttcttggtaactacagtaccattatgaaaatgggcacagtaacattggcacagtcttaatagcagatctacagatcttactcagattttgccagttgtctcaataattccctttagagccaaacgaaatctattttttcttggtcaggtcttcaatcgaagatcacaagtagcatttagttttcatgtttgtttagttgcctgcattctggaagtttcttagtttctgctcttcaggaccttgatatttttaaagaatacaggctagttactttgtagaatgtccctcagtctgtatttgtccgttatttccttatgacctgatcaggttatgcagttttggcaggaatagtacagaattgatgtggtgttctcagtacatcatgtcaggagatgcctgatatccttttatcccattattggtgatggttaacttcaactgcttgggtgaggtggtctctgtcgggtttcatcactgcaaagttagtatttttccctttgtaattaataacactattgttgggagatactttgagagtacgtaaatgtcttgttttctcatcaatgtgcttgccttaaccagtagggccaagtagtgatttttaaagtcaaccattcttcttacattagttgatattttactgtaagatttggtacttctctccattcactcactcaatcattcattcatatcagtatggacccatgggttcttattttattcagttgtttgtaattttttattagcataatttatcgctcaaattatggtgctagtggaagcccctttcaagctcaacttcccactttttgagatccatactgtcatctggatccttactgctacctgtttgtatgctattctccttccttcctaaggggaagacatgccagctaaagctaagctaagaaatatacagcattgctgccactctgtctgttgtcctcttttgtgctcatactctgtcacaaatatatattttttattaatttgtatatgtacacgtctccagaatttctttatgcacgtacaaggacatgtaaatatatatatattcatatccctcccaacacaaaaagatagcacactgagccttagattttgttttgtttttccagttaactttaagccttcctgatcctttcacatcagggtgtagaggagacctttgttttgcagctgcataatattccattttatggatatatccattttatttaactactgtatttgcagataattgtcagttattgtaaatagcatgttccccacccttcaatacgatgacccctttccacttccagataactattagttgtccttactttaaaaaatatgcaaaacttcattttatcctattctcttcattttacagctgaagcttttgaaaaaccgatccaaatctccaacttccttacctatttttgctccagttcagttttcatctctactgtctggtgaattctatagttttgaaggttgctagtgacttcctgttgtgtagtgctagacaggttttggtgattaatttaggtaggaggataaaaatgagaaaaggaatggggggtggcaatcaaatgggaaaagaggaagactggaaggaaatagaagaaggtgggatctgcatgggagaaagtaggagaacagaatgttttttggcagaagatgtaaagtgtatttttatttctagcttgtaacatacagctggcttctatgtgaggatgagctagcttgtggtgtgttgctgactgataggctagttgggccctcaggaaagttgcttcctgttttctgtctcctaaagcaaaatagagacacctaaccccttgtcccattattgtcatttctccctctgttgcccagggtggcatgcagtggcacaatcatagctcactgcagcctccaactcctaggctcagttgattcttgggcctcagcctcccatgtagctgagactacaggtatgtaccatcccccccccccccagctaattgttaggatattttgagttatctcagatttattctttgcttgcttttttcactgccaccatgctagtttggggaactacacattcacttagattttcgcaacagtcttctcacccttgtttttgccaatttattgcctattcttacccaacattttccctccctttttcaattccagtcagtgctggtccctgcaattgtcatgctgacaagtctccatacttcgcttgtgcccacacctttctgtgctcctaaaaaatcttgcctcttttgcaagagccagatcaacttcttactgctccataaagccttccacagttgaaacagctcttatacctgtcttacttcactaatcttgtttacaacctgtaccaaatgtttgcttgttttcttatttcagatgtgttcagttgtttctacaaaattgtaggaatttttttcctataaaaaaaatcatgtttcctagctgagtgcagtggctcacccctgtaatcccagtactttggtaggccgaggtaggaggattgcttgagcccaggagtttgacaccagcaccacctcattccagctcggggcaactgagtgagacttcgtctctaaataaataaataagaagtttagtgcttgaggtttctattgggagctggttctgtacactatggaaatctactccccgccccactttaaaattactgtgtagtattccttggtgtgattacaggatgatttaacttttccctattgattggtttttggttatgattttatgctgcggtgtctatctttgtacggttcctttttcagaggcttagatttgaattgatggatcataagatagtgacatttaaaaattcattgtgaatagatacttccaaattgctcaccagaagcttagtgctagtccatacatacttctgatagcaagtacaagagtacccttcagaagggattaattttaatgatattcagggctgggaatgtaggaaaaattgaccatcaagtgtcaggaggcgcaagagtaggaaggggcattctacctccaaggtgtaccctgctcccttgataggcccttgaaatagagacagactctcactatgttgcccattctgttctcaaactcctggcctcccagactcctgggattacaggcctgagccaccatacccggccagaaacgcattcttgaacggtacaagtaaatcatttgtagtggctactggaagatacgggcaaaatttgaagcttagcttgatttgttgtgtggaatcctaatcttgatctatttgttttttcagatcgagatattgcatttcccctagtcaatgtatgaaaccaactttaaaatacaatttacatacagtaaaattcaaacattgagtgtgtaggtgaatgatttgacaaatgtatacacccttgtaattatcactccaatcaagttagaaaacatttccattttcctagaaagttccctcagtggcattgacttttacaggccacctcaaagcctttatacatgagatgcaggacataagtcaagttctgataaaaggggagtctggtttttacagacaacgaggtagattcatagaacttacagatgtgaggtatcctgcaaagtagccttcagggcatggatgattgctaactggagtgttgtcttggtggcaggtgcatcaaacagggtggcccacttaggcctttcaaatccatcagtccttgctcctcttgatagttgtggtaaatgatatagtcagatgtcttaagtgagtctctatgaacatttaactcctggaagctgacgtgtttgggcacaggtgttgttgttgtttttccagttggctttctctgaaggaggagatatgggaaaaagcatgactggttggctgtgatgatagtgttgaagaacaaaacttactcccctctgtgcttacagtatcggctgatactgtgatatttccttgagaagaaatgtctggtacatcttttaagtactaaaggggatatttttggccaggaaaacacttgctagtaacctcatcagaaagtcttgaaaatgaagtttgagaaaggagaaaatactccagatagagaccattacatggagtaaaattatagtgacatagaagatcagaaaaggacatgtctgtaattcacagcagaacatgaagaacaaatgctgaaggtgctagatgtttctgaataagtacctgtgctattttgacacaagaagggtaaagacagccttttgggtgccactgaggactggtgagttggattcatggctaggcaattgagtgcttactagataagctttgtgctaagtaagcagtcctaattcttataaaaatattaagacattgacatgtatggtcatttgcccccagttttttcatgaagaaacagaggctgaagaagattaagtatttttaactagtaatcagcttttaatcttgacttctgcatgtctcagggtaggtaacatgacagtggtgtaacctagttgccgttgtttactgattttactctgctgctctcatatgctgtggctttcttgctccttgacttccctgggattgtagtgtgagtgagcttgttcagtcttactacctcctgcacacagaattcaaaagagagtgagtcatggccacagttggcaggaatctgttatgttactccattagccacatgacacttctgcttgtaacaaaatgacagcgaagtatagcaacagttatcatactcttcttccagttatccttttagctgattttagtagtcctatactttactaagtttttatcaattgtgcataatgtcattcatttcatttttcggtgtctgcatctcctctcagtctgttccatcagcaaagccaacttaaattttgtttaatctcattgcagcgcacctatagcaacaaccccttccagtttcttaggcacttgtctttctccttttatcttcttcaacatccctactgccatatgcattccagccttgataaataatgtgcagcttccaaaatgtctagttcatatctccaaatctctctttttctgcctgatattccttttttttgaaacagagtcttgctctgtcgcccaggctggaatgcagtggtgccatctcagctcactgcaagctccacctcccagtttcacgccattctcctgcctcagcctcccgagtagctgggactacaggtgcccgccaccacgcccctgcctgatattcttagtgtcccctctggaaagcttcctcagggcagagttaggtattttcattttgtgtgatgcttttctttgggtaactggttattttggttgttggtattatgaatgaaggtttagggtctagactttagggtgatgactacaggtagccggagtgagtttcttccgcctttgcaaaggttttttttgcccagtagactccttccctgaatgggaaggctgatctgtgtgaagggtgttgattggcaagctttactttacagtgtgatggagggagtggcagcagcctccagtaagatgggctttgttctgggacaaccaaacccattcaagcacctatcagactcctgtggaaggttttgtttctttagagagtatttctttggcttgaggctgcatttagaagcagctactatctgtggctgtgtaggcatctggatgggaagtgggtggggttgagtagctatggcttttctattccttaggcagtctttttgcttcatgctctcttgctctggtcttctggaaccctctctagagctccaccagaaaggatggtgcctaaaacatctatttcagactgctcttatgtttattcttgggtggggtggcttttgcttttgcttattcatttgctttgaatagaataaaaaagtaataaccctttttcctgaaaggtaataacctgtttcctgaaacacatttgcgcagtctgtcactttgaaatcctgaaccagaggttctgttgacaactttaaccatttgagatttttaaaatttaaacaaactaatatgaagaatacattattagaccaggcgtggtggctcacacctgtaatcccaacactttgggaggtcaaggtgggcagatcacttgaggtcaggagtttgagaccagcctggccaacttggtgaaaccccgtctgtactaaaaatacaaaaattagccaggcatggtggcaggtacttgtaaacccggctactcgggaggctgaggcaggagaatcacttgaactcgggaggtggaggctgcagtgagcagagatcatgccactgcattccagcctgggtgacagagcaagactctgtctcagaacaaacaagagtacgttattgtttcccaagaattgatagaataccttggaatgttgatagaatatgaaattgttgtaatgctgaaatacaaatcacctatttattaataagttatattctaaaaatatttacaaagctttttagagcaaggaaaactaaaggtagcttccagaaacctaggtgagagaggattgtggggaggtctcaggcattgccattagctactaattgatacttggggccagtagcaaggtaactccagcttaaatgatgaagtttacattctaggattggaggaaattgcttgtttcccaatgtaaaatttgctaattttaggttgtcttccttgatatgatattgagataaaagctgtgctacttgtggcttattaaagtgaattgtaccatatagtggctatatagttagggttaggttgcaggttgtgttttatttcaatgaatgataaaataataatttgccatgtcttctaataagagtgaaaaagtgaaaatgaatctgtatgcaacattatttttatttcttaatacattttgggaaacttaattgcaactgtgtggttcagggatttagtgcaagaagaagaacagttgatggaagaaaagaaaaagaaaaaagacgacaagaaaaagaaggaagctgctcaaaagaaggtagtatgtgtgtaaactatttatattaagcagtttaaacatagaattaaaaaaaaattactcttacagattttgaaggcatttatttgatttaatgttttagctttaatggagattcattttaatatttaatgtctttgaatatgcatataaagtaacttgctgagtttgtacaatttaatgcatatttaatcttgtcaatagtttttcaaaggtaagtacattttatggatctttatctttcaaatagctgttcctaggtgtttcataatatatcattttataagtgggaagagcatggaatttgcagccaagttgagagtatttgaaatctcactctcccacatagcacatagaatggtgtgactttagattttatttagcctctctgggccttagtttccttgtgttttgttaaatgagggttgaattgagatgatgttattatatgtaatacagaaatagagtattaaaggaaaatgtaatagacataataggaagtaaagtgtcagtttctttttccctctttatttagtacctgggctgatttttaaagtgtgcagtgtacattagccttaaaataaacctcggacattgtttactgcaagggaattctaaactagctaatttagtataggaaactataattcaatgcaaagtaagttaaaaaaatctgtaattattaaaaattttccatttaattgttacataccaaacaattgtattagtattgttaatactaaaaactgataatagttagctaaatgggcactcatctcctactatgtcaaggtttcaagacattaaaatgctctaaaaacctagtgaaattactgtttcaattatctgttgtaatgaaaaattattttaatttctaatatatgccttttttgagccaggcattgtgctaggaactggatgtagactatagcaagatacttatgtccacattatttaataggggaaaacacaggctgtaaaaatggcaggtgaggcatttatggggaactgttgcagtacagagagagaggtgcataactcaggctgaaatggggcagagggacagagaaatttcgttagagtagaaattaggtgaataaggagcagaatagaaaaggattccaaacagtgaaaactcagaaatacttggtagcctgtatgcattaaaggatgggttttgcttgggggaaagggagggaaccaagggtagaactctgaagagttgaactaggaaaggctaggaggttttctcaaggctttggggaaaatgctgaaaatgttttagtagagtgacataaaagtttgtattttagtatgtttaccttggaaaattgtggaattggtttagagggggtagataccagagtgtgaaatactggtgaagggactattaaagtaatccacagaatttgtttaaaggatatagagggagagtcagcttagattgactcgcaggttccagatgagtgactacatttgagaggagttaatcaggctaggggatacaaagaaaggagaaatgataaataattcagttctgcatgtcctgagcctaggggtgtcatcagcaagtattaggggaggagaattaagtatgagatgagaggagatgatgtggccctagccacctgccttttgcttgctcttaggggtgcctgggaagggatgcataggtatatgccatggttagggttttggtaggcttctcgtggtttggtattgatggatgtcttgggcctctgtcagaggctgtttatgtaggacagtctttgcagtctggtcggtcattgctcgagatttcttatgagaaagttgtgtcctctgtaagtctgaggttggggtaaaggcttatcagactcttgttccatggtgtgaaaggccatttgcccaatgaaaagagcttctaagaaacttaagaggtttattgaaaaggatggttggatatactttatgtagattcagtagtttggcaagcatctgagtgttgaattaggctctgttggtccctgtgtctaaggagttcaagaattagctgataagtcagaatgtatgtgaaatggctagagaagaggcctaagacaatatataagcgtatttgtttggaatttattctatttactgagaaattttaagaaagggaggggtcacttgaatgatgtctttaaatattgtatttttgtgaatataattttaaagttgtaacatatacagcaatggctctaattgttacaagtaaatctttacattcttgtataatcaaatctctaaatcaccaagtcagtataagtggtcacttatgtgtaggcagcttataaataagcctgtaacacatgagtggtgattattgtgccatttgacttctcaccaaatctgaagtgacagcttttcatactgttgcccacttcattcctgtctcaccccatggttccagtctctcacctcaaccatgtccttactagaaccatcatcagaagcttagggatataagaagtttttccttcttttgccagatcttcagcactgatagggtattcctgtgtgtctcatagacacatcatagtatctacccactgaacacaatataaaggaaggtttaatacctctaataaatgttaagtttagcaggctaggccgctactgtaaattagactgttctccaaatttcaaataatcagcttacaactgaatttgaatacaacctgtcggtgaagtgaggacagctggtatttccatagagtgttaccagatagctcttgaaaagaaaagaaaacccccaaatgacacacttatagcccatatgaggaattgtgagtcacagggtttttaagacaggtttcctggaacttgtcttttgtcgctagtaggagccagcaggtgtatccaggcagatatctacatgagccaggtgggcaggcccatttatataaatgttggcacataaactcactacagtaaaaagtattttatgtaatttatattttcttatttttgaaaaaggccagatattatctgttctaatacatttgttcatttttaatataaggaacctaagcatcagaatgaattaagtgattgaccttggttttatcatggtgacagaaccaggaatataattgaaatctctctcctccagctggtgctttgccaaaaccctgtgccatgactttatccttttcatgcagaacattatcttatactttgctttattttttgtcatttaaaggtgaactttaaaattggaaaataatatattgtgataatttttataatagggtataaaataggttcttataccatgaatacagaaaatgcatacatttaatggtccccagtagccactgtggtttttttaaaattaacaccatgggttattttctattttaaataaaaagccagataacacaacttcctataaaaacaattagacaccgacgagccttacaacgatattttcgttttgatagtttttattatcctatcatttaaatattaatttacatatttagattctttaaagagctttttcacattaaaaacagggtgatttgtattgtatttcagccccaatacatttctaattaatatggagaccgatgacttttgttcttaaaattttttgaaaagccttttcatcaaagattatgtataacactcttttctgtttcatatctaagaaccagggctattattttctgattcttgggcttagaaaataatttgacagagcatggaaatgtagtttccatactttaaaaaaaggaggggggtgacagtagtagcagtaggttaccatggatttctctccaggttctgtttttagaagaaatttctccaagggatcttaagggaaatgtaatgaggaggaaaatagaggttgagaaataggttaattatagaggggtagtttagtgtaacctttacttgaagcatgcaattgtagttcctagaaagcatataatcgttgaaggccgaggggaagcaacaatacaagttgggatctcttggtgttgagaatgtttcaacatccatgggctttttgctgttactgtgttaagagctgaagggatttttataggtgttattgacttaaatataccaaattcaagtttaaatgagacctaggttttagagagcttccagctttattgccatttttgaggatcatattcagcagcttaattagtaaattttctcagtaaccttggtggtaacatgaccaggcctgagttgtgctctcatagagggcagttaggtgttctcttacagtcttgcccctcattgcaccttacacttctcttttcctcttttataaaactcattttattcaacagatctggattctagactgagtgctgattgctaagtcataggaaagctctctgagcactaggtgtctcatttaaaatcagtgaattgagctagattaattctttattcttaatgttaggttgtaatacttggcactgttaagacattgtagatgatcagaaaaaaagaaaagcaagacctggaagggatgaatgtagagtcagcttatttccaacagtgagagccaatactgagccaaagcatgggcagataggctgaagatagcagccgccagcgccacagcagcagctgatgtctgctgaatgctttctatatgtcaggctttgtcctaagtgcttttatatgagttaaatccctttaaccttacaactctgaggtgggtgtttttgccacagttctatagatgaggaaactaagctttagagaagttaacacatttgaccatggtcacacagtgtaagtggcagagccaggtaggcagtcaggctttagatcctgaggtcttaacgaagtgtgcttcaggaccatgttgttgggacaagcagtgcagagcctgacaggcaaagcaagtggagtgctgtgctctgccactgcactgctgtcttcagtaatgaaggaggcagttgtgatcattgctggtggaaccatagctcagattttttttttaaagaataatgtattaaaaatggaaatcattttgcttctagattggccagaatcttttaattatctgtatgagaggatttacagtgatacttcacatttgaagtagtgttgtatagtttttcaaaaaaaatctttcacattttattatttgaccctcataataaccctgaaaggtaagcaggacagttattttgtccatttgagagattaggaaactgagacccagagggtttaaatgatcagagcatttcaaagtaaaaataaccagattaattttaatatattttatataacctaatatagctaaaatgttactattttgacatgtcagtataaagtatttttaataaggcatcttgtgttcttttaaaaataccaaatattagaaatttggtgtgtattttgctcatctcagttcagactagccacatttcagtcagtggtcggtagccacatgtggcaagtggctgttgttttggatagtgcagacaattactcttaaaatgactgatcccacctggaaaattctttttaataatttgaataatatactaggtctccagaccagcccgcaaaaacctgttttaaaaaagtggaactcttagttccgtttcttcccattccatgaggagctcttggtttctatactactactttcattccttgtatacattaaatccgattcttaggggcagacacaccttaggtgtctccatggggccattctctgttgatgacagaatactgaatgaggttgaccgttgttttaaagcatctttttccaaaggagttgtatagcatatatcctttatgttgtaaggcctaaaagagcaacatggtatactttgttttgttttgcttttttgtagagatggggtttcgccatattggccaggctggtctcaaactcctggcctcaagcatctgcctgtcttctgcctcccaaagtgctgggataacaggcgtgagctgcacctggcctactttgggtttttatgtggtcattgtttctatgttctgaaacttagtttccattggaagtaaattgtgaaagagaccaggagagtgttttttgtctgtttgttttgtttttttttaagcctttcaacgtgtaaaagaaattttctgctaattctttggcttcagaagattatgcatcttattgtttgacatgacatttctgatacctaaaagtgttcatatactaacttctctctaataagacttgtttttctactctcagattttaaaaatgattttcccagaaacaaatgaagtgttgttagctagttgactggttgtttggcattgtctttccatcaaaattttttttttcatttaaattttgatccatagagtaaaagatgagcctccattattttgtatttcactagtgctctaaaacttagcaaagcacttacgtggtggagcaagactccctggctttctggggaaagattaatgtttggtgtggcttcaatattagggagttactatagcttttacccatatatctataatagtataatttaaaatggtatttttgataacagtaatttcatataactaagcaaaatgaattatgccccatggcagctaagaaaagctttattgctatttagaaacaacaactggttattcagttactaattattcagtcttttctcacctcctttcctgttcttgtatctgttattttcaggattcccataatattgatcttgatcaacagattgatgttttgcttgggtttttctgtctgtggttctttttgaagcccttgggagtttgagctagtcacctcgagttaaccctgctgtcctcaagcccctctcctcagttgtggtgtcagaaaataaaggaagagcagacattggaaggcagtgaaagcagagttcatgtcagttcagcttctgatcacagtaattttaacagattgtcagatgtgtcagaagtgataaatcagtttgaaatttttttccactcaaaaatacttagatacttaaaagttgactaagtttaattgcaatagcagcctaacctccaggagttaaatttattactaatttggctaaagtgattatatgtacagcttttcttacagaaaacctaattcgtctttttatcacttgtaacaatttttgaagccatttaaacatgcaaaatatattaaatccattaaatgtaaaggtgacagtttgtataaaaatcatttttaaaggacatgagaaaagtgcagctcccatttaaaaaattatatactgtcatacagtgatgtcttctatgcttagtgtcacaaaaattaggtattttaaattaataaacatagtatcagggataatggggcacatctgtgggaaaagcatgctttccttgcatatcttttcctgtgcagttcatctatttgagaaattccttgtttaataaaggtgtatatgtcttatattaatatatgaacattttatcataacagtccatttctttcagtttcatatttacattgttttttgtttgtttgtttttattttaggccactgaacaaaaaatcaaaggtacgttgtttaaagctattttttatcccttttttcattaaagcaaggttgtttatgtgcatttttgttcacctcaaggatgggagagagaagagcatgaaagaagcggttgggattagccttcttcagtaacataccctggggtcgtcctttggaatttcatggttattgtggtgtatgtgaccacatttagagtgcactgcctcagacctgccttaaagctgtgtcataggataagagtaagcactgcttcctaatgtactcccttgttttgactcttggggcacaggcacctttccttcagtcttccttctaaaagtcttcttgtgtggggtaacctctaggaccccactgtatcccttaagagttctgcctcctttatttcttgttctctgaagaatgtcccccattccttcttatagacagatagtgacatccatctctgtattatcacttagaatagtagattgcaaaccttacacattgtgtcaggtttgaacagcacccattagaccccaagcaaaagacatcggagtgataaggaaacaggacactaattcctctcagatcctgaatcaggagttcttcaccctcccaggagctacttggtaataaaggtgtaaagctctcaggtgctgaacttattaagcctcaagattctgaatttttattttaagctctatcaaaagtataatcttacccctcaaaaaaaagatgaataaaggaatgaaatggttcaaagaaggaatgaaatggttcaagcatgattcaagacacagagataagaaataacatgatgtggcttgcagtggtggaattccataacatgatgtagtatgcagtggtggtattcctagagcgttaaatattcagtgataagtgggcagggttgaggctgaaaagatagataggggccaggtcaaagtgggttaatttatgtgctgtttgtaccaacaagcttggactttgtatgtgacaggcagttaggaggcattcaagacttaagcagagtgacatggtgctttgttttacgttgttttccattttttaaagctatcaactactgtacatggaaagtattggttggaagacaggtagggatttgaaaggtagagctaagagaagaaaggcattgtgagcagaggaggcaggtagacagcatggggaatacgacgtgcatcttttgtctctagagttggggggaagtgactgaatataggcctggagatagagggagccacagggcttcatgctggttaagccagcaaaggtgtttggatttggaatgtcatggtcataagctgtggaaatttaactttgccagtagtgcctaaagtcaccaatagaagcaagattagagagggtcatgagggtttgaactgaggtcttggcagtagaggtagaaggtgggtgacagatgtgtgagggataattgacaggactggcaactgatgagatcagaagaggagttgaaggcgcatttgtggctttgaacttggaatgtctaagacagttacaaggatgcggaatgtagggaggaacattgccaaattagtaggaatgttaccaaattaattttcctaaaactctattttccccacccctctcccccacatagcaatggtaagttgtccctatttgttcttgcttcaagaccaaactcctttgcttagctttcaaggccctcattaatctaacctcccttgacctaaccagcctgtttcccatcagtccttatactttttagagcattcttagctctttcatgttcattcttgtttcttttttattcaatttatcagccaaagatgtctttatcaggcctttcagctttcctaaacctctcagagttcatccttgaatgggtctctccaagtaccattgatctctccctttccagtttcttaggatgttataatctcaaatttgggcacttggttatattcttacatttttgactgatccttggatatttgtttcttcaacatctttgagtacctagtgtttatatcatttctaaatgtaaataattttcttctagccttacataaaatatgaacatatttagtcttcttgtttttagatttttccacgactctgtagatgataggctgagtatatgaaggtcacttcagaatacattttgttgttttgccagtgatttcactcatgtcatccttcttttcacgctgtctctcttcataattgttcccattttttctgattcatgaaaatgtattgttttatttctgtgctatgtatttgtctaggtagtatttatagtttggggttcacatagtggttagagattacaaactggagacttgaggggcagatgtggcctacttggtggtggtggtgtttactaaactttgtattttggaataattttagatttacaaaaaagttggaaagatagtacagagacttctcatatacgcttcattcagtttccccgattattagcatcttacattaccatggtacatttgtcaaaactaaaaaaccaaccatgatactaacctcaccagtttttccattaacggctttccattctaggatccgatgcgaaatgctgccttgcatttagttgtcaggcctccccagtttctggtttctgcagtgtttttattgttatcctgtacattttaaaatgactgccaacatttaaaaatcagaagagtctgcctattccagaattcctgcttctcttacagttcataatgtcagtatgatttttttctctttctgtgttgtagagtctgtgtaaagaccaagtttagccacatgtggctgtcaagtaccagaaatgggactgtgactgaggaactaaatttttaatcttacgggacaacatagctctaaagtgtaatgggcaacgtaatgacgttcttgaaagttttattcttgtgacttcaactttgaaaaactgtaaagaacacaaatatttgaatatttaaaaaatcttttaaaatatgtctcttacgagtatgtccttgaaacagcaggagagtgaagtgctaaaaaacttcaggtgaggtatagggatagatggataaattttaagatgccctgtggtatatgtaatgtaaaggcaaggaaagagctaatgttccttcttcagagtgtccttgggaacttggttgagaataagaaaattttttaaaaacagttttacaactctggcattgacttttttttttctttttttttaaggagacagggtctcgctctggagtgtagtgcacaatcatagctcactgcggccttgaacttttgggctcaagcaatcctcctgcctcctgagtagctgggactgtaggggcaggctatttttttttctttttctttttttaaacgtgatcatgctacattacccaggctggtctcaaactcctagactcacacgatcttcctgcctcaggctcctgagtagttgggactgtaggcgtgagccaccgcagctggctgacattgggttttttgggaagcatgttgattgtacattcatttcaaaagaataagtaagcactgttgatttttgacagctaattttctctctctctcctgacctctttttcctctgtctcttccccttcttgtctcactccttcatatcagtgccagtgccttttttgagtgatttcatgagcaaggtatcttccaaagagtaataaacccctgagctcctaagggagttatgggaagcccggggagatcctagtgggaaacagcaatggagaaaaaaggattgagattttattttttgggtgataaaatagcgaagtttagtttattactgccgctctgtttctgggttaattaaaaactcatgaaattaagtcaacatttatacattttttcctgccacaattggcacagttattttttatcaattctagccttaatatttgtttttctgtcaaacacaatgttactacatctgggtgataaaaatattcactatctattaagtcagctgcatgtcaaatcatattgtagacattattatagctgacttagagcaccttctatgtgccaggcactgtgctttatttcatttaatcaaggaaaatattctaaatatttaaccactaataatgaatgggtatcagcagttcagaacagggtcctgaaagcttcttaatgtgctaagagttactttagttactgaattttggaaatctttgggatccagagcaggggctgggtattctgggactcacgtagtctatatttaaaaattgatgtgagagtaggccttcagtgtatactagcacaaggtaagtttacgtttaatcctctcagcagccctttgaaagtagatattagcaccacttacaggtgaaattaggctaggaaaaattaactaacttgcccaggttatgcagctaacgaatgcctgagccagaatttgactacgaacttgactgggctctaccgcttctgtttctttaaaaacagcccctgcagttacatggaagacaagatgtgaaggacacaccattgctcatgctgcaacagtagtcactgaataaactaaaacaactcatcttttaaaaggaatccagaaagatcttggaacagattttacagtatttctctattgattaagcgtgtagattttttttttttaaattgtagcaccagtataattttgtgaatcagagaatttgacagctttgtgatgggtgaggcattggctcttaaattgtttattacatctttggttgttgatgaaaatgaacaagagttttgagagccaagcaagcagctgattctaaaatctcctgcatgctttgatctctatgcagtaaacactgatccttctgtggagcaaaaccagagtactaaattacgttcaaagtgtttttttgctacacctgtaagggaaatgtaatgacaattttgctaaaaaagaacccttcatttcatcattcttcaaagggtggaggaccctttctgaagggcttgaataacagttaaatccttttccagtatgcctgttgaccagtacatttgttaaaatcatagcacacagtttagcctctagaatgtgactgagatggctaagtttgtgttgaaggaagaagtttttagtttgtccccttctcattaataaacagagcacctctttactttttctttcagtcatcactgccagtatcatccatgtttcactatctcatgaggtcatcttgagaaacgaaggaaatgaaaaatacttacgtaataatccattattctaaactcaggtttcataaagtgacattatttccttcattcatcattcatgaaatacttactgtttgcctaccctgttttatgcaatgttatggtcactggtaataagcatgaacaaaacaacccccaggttcctgttcccactgcacttccattctcatctttattttggtaaaggtaaatatgtgattaaaggcctttgtcatttacctgtgatctgaacttatcactccattttctccataagatcttgtttattatatatatttaaggtgtacaacataatgttttggtatgcatatgcacagtgaaatgaataccacagtcaagcaaattaatatacttatcacctcacagttaaccctgtttttttggtagaagcacctaaaacctactctcagcgaatttccagtatacaatacaatattattaactatatatcagatccctagacttacccacatacgtgcaactttgtaccctttgacctatatctaccctccctaaccactattctgttctctgtttctatgtatttgactgttttttttttttaagattccacttgtaagtgagatcttggcagtatttttatttctgtgtctggcttacatcactcaatgtcttccaggttcatccatgttgtggcaaatggc

SEQ ID NO: 2532 - DNA, 2243 bp, Homo sapiens
cagaggtccagttaacccaagaagttattctgccccgccctgactcatcttgccgcagaggctcttgaaatgactgccttccacccccttttctcctgtctcctccaggcaatggatttagaagtaccggtattggccaggaacatccccgggaatgctgccgtggtgaagcatgaagtcacagggctactgttttccaatcctcaggagtttgttcatctggcaaagagactggttagtgatcctgcattagaaaaggaaatcgtagtgaacggaagggaatacgtgagaatgtatcattcatggcaggtggaaagagacacctaccaacagctcatcaggaagctggaaggaagcactgaagattgagggccccgcctcatcagacacctgctctctgacacacagctctgggtgcacactcagagacagagttctggatcacgtgggcccagtgcagttcaaataaaaccagcctcagcggaatcctagaaaatgttagtcgtgagtccccagagccactgcattcatcccatatccttctgtgcgttcagatgctgtcccaggcgtgttcaccagccagtcctgatggaggtgcatgagtgactgggttgactgggacagggaaaggggaactggttttcagggaatttgggagagaatttgattacctgccttagggctttggtgtggacaatagaggcttattttcaagcagtcatggttcagactcctcccgcctgccttctgaccaacctctccccatcgttgccagtttgaaaggcaaaagcaaaacagacgtgtcagctgagccgagtcctcgcaggatttttgttgtgatctcaggactctgacaggcacgtgggtgacccgaggcttctctgaacactagaaagcgctgtgagtgagctcacgcccggcacagctcacttttcaatggtggaattgaaagttgtgctttttagaaaagtggccaggctgcccgcaggccccgcccacctcttggctgaatttgagtggaaaaccaggaaggaacaagcgccacgtcacgcatagcctgcaaatcgcccgcgtgaccctgagatggaggcctgaggctttgggtccagggtgggctcttccccttcccacatcagggacccggggatggatgtcggaagggtcaccagcctccagcctttggcaggatggagcttgggtctgcagggctttgcagccacacagcgaggtcagtccggggccagccgcgccatcatggtaatggtggcctcgccccatccatgtcatccatgtcacatgaggacgtgcagtcttccttgtcctctcctagtggaatttgcctgggagaacctccactgaatactgaaattgttgcatgcctgtggattccttacgacaatggggaacgcggtgtttcccacctcttgtgggtagaaagcagtctgctttgaggaggcgagaaggcaaagccagggcagggcgttgctgtgggaagcgttcggtgaaagcgggtttcgacgcttaggagggccgagggagaagattccaccagcattgtccttgcttcaagttttaggatgtctgaactttcagctttcatgttttcaaccatcatttttttaatggcacaacctacatcttgtttttaaaagaagtagcctcaaattaaactccttaaactctgatgccctggggatgagaacaactagcttggatctcgtgccgtgtaattcaatgtttcattccgctgcctccatcatgtaatagaatcgctttccagaaaggcagttaactggaagcagcagaggctcccagccgtgagaggactgctcaacaatgccccccatcgccgcccccccacccctcgcaccccttgtgttttccctctgaggggcccaagggttatggctttcatgtctaggtgtggggacagaggagggagaggcagatcctgggccgggagaggatggcctggtctgaatctggagtaattaatgccacccaaagaaaaggccctgccaggtccaatgttgtcttagatctgatgatgctgctatttacaaaacactgatcgtccgaaagcttgaatctgttcctcctcgaatgaccctgtagatgcctgacctccaccgtacctccacatcactattcatgtccttctaggaaaatgtgcacatgcctcacgcactatgtgggaagggcgtgtttttaaattaataaagtgtgtcaccattagccatacg

SEQ ID NO: 2533 - DNA, 1311 bp, Homo sapiens
gctgggactacaggcgtgtgccaccacgcccagctaatttttgtatttttagtagagacaggatttcaccatgttggccatgttggtctcgatctctcgacctcgcaattcgcccgcctcaggctcccaaagtgctgggattacaggcgtgagccaccgtgccggtccctcatgctccatttttatagtttctccaagaagcactttctgacctctagactagtttgaattttcctatttctgtacccatattggctctattcttcccctaatcaaacccttttcccaattaaccatgtttatatcctagtttatgtgcttccttttagcatgtaccattgtttctctagggccttataagtatttgttatacagacattacatatatgtatatgagagtatgtgtgtgcacatgttgaacaaattcatgagacaaaatacaactttaggttgcttttggactttgacatctgctcttgactttttatgttgagaaagggatgttgagagtatgaagcactatagcaagggagaagaaaagaaagagagaccagaaaagggctgattattgaatatcaagaaaggaacacatagaaaacaagtaagaggctttgaactgacaatttggatggacaactacattccatttctgatcatcgatcctgtctttgcactattgcttgcacttatcttagcaggggcacttaaaaagcctgaaacgcgtatcttgcctgcaatgtacaaacttatcagaacatctcatatagtaacataattttcagtataagtatagataggaattacgtttaaatttgagtaagtattggactaagattatctctccttttttaaaagttggtaagttatgttaaacaaaaacaaaacaatttctaaaatgatgactaaaagtaagggttgtttaaatccattttataagatttacttccagaagatgaaagtgggaagctgaagtggcatatcatttctaagctatttttgtaggttgaattgcatccttcaaaaagaaatgttgaagtcttaaccccaggtaactatgaatgtgaccttatttgcaaatagggtctttgcaaatataattaagttaaggtgatgtcatactggtttagggtggaccctgatccaatatgactggtatcatagaagaggggaggagatacagaaatacagggagaaagctgtgtaaagatggaggcagagatgggagtggtgcatccacaagccaagcaatgccaaggaaagaagcatggacattttttcttactgtgtctagaaggaaccaactaggctgac

SEQ ID NO: 2534 - DNA, 297 bp, Homo sapiens
ctgccctcacctaatggccgataagtctaggtgtgtctagatactcacatatgcatacataatcaaggccagatcttacaaccaagcatgactgaaattctggaggaagggacagggaacagttgatatagatgtggtagggactggtcaccccatagtagagcatttgctactctttgtagtcttttattttcagtttctacatcacgacagaacaaatagaactgtggcttttgggttgggtgtgagccaccacacccagcccctcattttagttcttttacctcaaaaaaattg

SEQ ID NO: 2535 - DNA, 5671 bp, Homo sapiens
cttgtcggttgcttgacctggatgaggtcttcctcacctgagtccaacacatgaacgttggttggcaacagtggcctcctcagttaagtgagagggaactccacctgttgtaaaactattcttagtagtctggattgtgttttttcattttaatagccatataaaattattcagatgattcagaataagcaggatctattttaaggtcccacatgataggttcttacttcagatcaaggaggtgaaaggttttaaagttgggaatttgggataaattctgtattggtggtgtgtaagtttttcttcaccattgttttaattacttacaaaggtaaaacttcaccgtctcctaatgccaaagcctactggggatgggtatttcacttgagattacttcccaatttttattctgtcttccagaggattaaagatggaactctaataccagttatgacaagattcttagtagagagttctccacaaccaggtaaaaatgcaaccaaaaactagtaagttaatttaatgatcgacagttacgaagccaacctccagtgtggcagtgggctagcctttgtgatgggcgggcaccaggagaacgaggatctgtgcctgccccgtaagggtatgtggtctaggagtgatctgtctactccacctggagggataaagggccagctgcttactctcctgcttcagcttcttgtttaaaagaggaagagtttggactagttaatctcaaacatatgagggatttgattttgcagtttattcaataatgagggcaaagctttaggccggcagatgttactttgatgtgtatcagccaagtcacccataccacagctgggatataggggtcccaggcagagaattcatagccaccattctgccagacactggcacacacacacccacagcacccacaaccccaaccctgagacatgggaagtagacggctgtgggttggtggtggggtgcagtctgcggtgccctgagctgcttgcagccctgtggtgggagccagcaggggagagtatttgaggggtggaagtgagagagaggcactcagaaaaggggcccactccagctctgctttcctctccatcaaagaaaagcagtggcgctgggcccagaggaacagacacatttggagcaggaggaagagtcctttcccccggattttcctaattcaaaagccgaaagaggaagactgtcagcaatgtttaagactggaagaaaattagattatgtgtgtgcacgcatgtgtgtgtgtagttctgcctaccaaccatcacatagtaatggctcagaactgttggggtttgcctaccttctctgaggacttgctagaaacacatgacaaacatctccactcacactttgggaggagaaatcccaatgccctgctagtattggcacaggatctcttctgtgcatcctatgatcattcctccaccagcactcgtgtgtgccaggcgctgtgcttgtgttggtgagatgagttgaaggggctgagctgaagtgtgtaggcctgttggcatgaacttgagcacctgagtcccttgaatgctgctaaggataggatggagggacagaggaagttaacatttgagctaaaaggcagaaatgaatcaggctttctggctgaagtgatgaattccaaagacaggaaggattggaacatgctcaggaaactgagaggtgagcttgtttgggatttaaagagctcaaagaaggcgagaagtcaggcaagaaaagaaggctgcccggaaactcgagaccaaggagcttggagtttgcgattgagcatgggaaactagcagggtggtggcctagtcagagctggcctttgggaagggccccagggcacactgtaggaatggattctagaaggaagatgaagaaatgagaaagcatggtaattctagaactgttctctcaaccaggcacccacagagagatgtttatgtgccccactggaaaggcggagaaaactgcttcaggtttcaggtgaccaactcagctctcccagccacaggccctggagatcgccctaagggctaagggagccatagctcacacccctgcaactttccaaccaagttgggaagctctgatctggaagaaatgataaatttggtaatgggttaagtctagaggagggaggcaagggcgtttggatttcaactcttcacctggtgtaccattttatcaaagtgggagtgtattatacttagataaatatagcttctaaaaacctattgggagaggctggctttgactcagactggagggagtaaggagtaagatgggagaagggtattggggagtagaagtagaagtgatgaggtgactatactgttgaaggaatctcactgacgaatagtattgttacaaatttgtatctccatcaccttgggtttccttaacttcctcctatcaacatcttggatatcatagtataggaagtacctaatcagaagaaaggaatattatgcatctatcaaaacaataattatgaaaactatgcatatatgtaaaaaaacactcattttggacacatgcttagaagggtaattattgcttttatattgtaaccttgtatgttgatatataagaataaaagcaaaatacaagtaatacgtagtagtataaaactggctgggagaagtgctaaaaggtaaaatgtaaaaataattcttgtgtcctggactctgtggtcctcactactggactcaggcccttggtattgccaccagagttggatagtgtatgagctacacctgagccccagcagtgagggatcaggaagacatggccccctcagtaggggaggagggagggactcttcctcccactaaggtgcacccagtggataactccaagtaggaagggagttctcatgctgggacatgccctcaaaatgacacatgtccattgtaggaggacaattgagtcatggcattttgtcacaaaattgttttcattttgttgcactttgttttaaaattaatatcttgaaaggtagtgcattcacacgattcaaaagccagaaagcatgaaaagacacacactgggaatgttttcctcccatctttgtcctcttatctgcttagttcctcccaccccagaattccttacgtttccttccagaatgtcttatgtacctacaagtaataaaaacacagattcttattttcccctcttattacacaaaatgtacatcatacacgctgtatatacacaggcatcttgctttttaaatgattttccccaagatggaggagattttaatacatagaaagcttcctcattctttttatagttacatagtattccattgtattaatttgtcataattgatttaaccagtagtcccctgttgatagatactggacattggattgtttgcagatgtttgctattaccggccacactacaactagtaaccttatacatttgttatttcatacatgtgcaagaatctttgtagaattaatgcccaaacatggaattgctgggtcaaagggtatatacatttttaaaactttatttcagtcgtttttggggaacaggtggtttttggttacatgaagttctttagtggtgatttctgagattttggtgcatctgtcacaaagggtatatacatttgatcaaggttgaccaaattgtcctccagtgtgccagttcaccactcacaccaatcatgtaggaaaatctcatatttttgatattttaaaaatgcagttgtagcacagtggctcacctttgtaatcccagctctttgggaggcccagtgggaggatagcttgaggccaggacttacagtgagctatgatcacgctgctgcactccagcctggacaacagagcaagacccggtgtctaaaaaaaatttttttttaatgaagagcccaggcttaggaatcagaccaggctttttccttgcaaatgaaataaaattgcaaatctgtttttcctctctccctccaaacttttttgttttaagcctgttcctaaggtaaggagggcctgaactgctgagaaggaggggtggaggatgggagggaggctcaggaggtttggggaggcagaaggcctcaggtgatttccacacacagaagagtcatgccaacaacttgtccatccagtctggccacagactccacccctcacaccaccagcttggaccgcccagcttcagggtcagaagcctgacctcacagctgcgctccttcacctcccacaattccagaggggagctgtcaccccgaaggaaacaagtctggtcttcttggccccaaaccacacacccagacctattcatagcgagattgcacaacctgctggaggacagcccagccgggcatgggagagcagccctcctcctgtgccaggccctggccctcgggtgcccctgggtgagcctgtgccagctttcagagcagagctgttcctatagtggggggcctcaagggtctgattggctcctcctcccaagtgggagaacttgcttctccaaaggagaagcgctcacgccacccgcccactgccccactgtgcaggttgacacctggttggagggctcactctcattagtgcacacagaagccagaaggcagactgttacagaagaggaagctatgtcacagaagacactctttacgtctctgtggggagcagtgccatggagcggggaaaggagactcaacttgggaatgggacagacctcaatttgaacccagccctgcagtgcattagtagaatggtgacatgtgagtcagttgccttctctgggcctctgtcttctcgtttatgaaatggaaacagggctgcctgtcttgcagggttgggaggctcccatgagaacacgccccggaagtatctgtagcatacttcaagcaggtcaggagcaagcccttcatcaacgtcctcttctctttaaacacatctcattggcccacactccatgggttgtttttttttttagtcttgtaaaacatacaaaattaatctgacattaatgaacctcatcagtataattagattgcaaagtaattaaaaaaatgaaaggtaaccaacttgtaaggtttttctgctcttactattttccttgatgttcttcaggacctgttgacagcaaccgtgctcatggtcagctgcttccattctatgtcctgtagaatcactgtcatgaacaccaagaactcaaacggcaagagagggtgggaagacttgtttctagtcctgactctgccactgaaagctgtgtgtccttgagtgagtcatttccctctccctggtccacttcatgaacattccatactttttaaggggtcatgatgcatgagcccagaaagggagcacacactttacgaactacaaagcaagaaacagaaacagaaccacagacactgctttgagtcagtaagttggcaaatgtgaatatattcattttccagaggggaaactcggatccaaagtggactcaaaggttcattgttacttgctgtaacctgcccttcagcctgccccaggcctccaaagctgacacttatggccatggaaccctgttgggagagttagggtagaggatgcatctgataggatagggaaagaaatggagaaaggggaaaggatggaaaagaggaagaggacttggagatgga

SEQ ID NO: 2536 - DNA, 1414 bp, Homo sapiens
ctagagagctggcgcacctcctgggcctgacgcgggcttcctggattgcataaaggctccttctccttacatagccagggcaaaggtgcatgacaactctgagcaagtcaaaacaaccgtcagcagcgggaaacctcgatgaacaaacaccgggagagtgtttctgcagatcctgctttgtgacttcgagtgaagtgtggaagcgctggaagcacttagaccctgcctgtgccgcagacccctgggaggcaccaacaccccggatcgagaagcccgatgggaaagaatgtctgggaaggacgtcatgcccgaggcttgcgtgacagtttccactcacagtgcgctcactctgaacctctgtgcacacgatgggcctgcatctcttcccactatctgctaggaaacacgaggaatcatgggatttgccgcagtttgcacccaggcctgtgcggatgccccccgactgcccgagatgctgcacctgccactgctgggggtgtacctgcctatgcccactcacaggggcacctccagggtagctgcctggtgcaggcattggctctaagcagagcagcactatgggcccatctggggctggctcttgcctgggcctgtgagcaccatcacagccagccgatctgggagtatccagggtgttcttgtcattgcggacactgaatagccattggtgggtggcgatgggggcttggaagccgagcatcagtggcaatgagaagcaggccctgtggtttaattccgaagcacatgaacccacagagccgccaacagtcgttattcggcaggagggggtacagagacagcagcctgcggagcgttctaggcaggacagggcagcaaacctgacatgcggagctgggggcaggggtaatggggccagggggtaatggcaggtgaggccatggcctagagggttgccatgcttggtgcaggggaggagaggcccaggtgtggctgcagtggcagcaggagtcagtgtggctgtgcccagtgggatgttgtcagagaatggacctggctgctgggaaaggtgattgtgtttgtctgagccacactggactcttctctgaccagcaagcacattctggagatgcggggcagagacgaggcctccgtgagaacctttgaggtgtgagggccttgatctggggtgcagcctccagctttctgcttacagagcaggacctgcaggagctcgctgactgcctgcacagtggaaggaagacctgtttcttttactttccttgaggagaaaaaattaaagttctgagcaaacgcatggcaagggagctcttgctttcctctcttggagttctaggcggctggcgctagtggcacgtggaactggtcacgcacactgggtctcgaggccgtctcctcttctgtaagttgaaag

SEQ ID NO: 2537 - DNA, 6453 bp, Homo sapiens
cgggcgcgggggcggggggcgccgcgcggccggaactgcgggcggggggcttcccgggggcggggggcgctgagcggctgcggcgcggctgcaggagcgcgaggaggaggtggcggcggcggcggaactggcgggggtcccctcgcggcgcccgggacccccggcctccaggcatgggcgcccctgcggtgcagagcagctcagggccggctggtgcgcgaccccggaaagcgggggtggagaggcgagcggagcccgcggggccaggcctccaccatggacagaggccaggccctgcccctcccaggcagcctggctccttctgctgggccctgaaggcagacgggataatgtggttggccaaggcctgttggtccatccagagtgggctccctgagaccaccaggaagagcccccaaccaatcttgggattctcccttcgtgcggttgtctgggacctttttccagggtcaaagcagatcgtgaggaggaagctggtgagtcttgggacagggacattgaggaatgggagctgggctgtttggattttttcccattgtgactgtcatgccaaaccctttggccttgggctgcggggaggaagcaagggtggccgacaactggaggcatgagtgtgcagcttgaccacagctggatgacggtagttggacttgtgaacgctgtgactgagaactaggagaggtgtacagagacagctaatgcagtctagctcctttctcagagcttccccacagggtgtccgtcctcctctcctctccaccccgcctggatgaggcactggtcactgcggcgagtttggtgtccattggggtatctcaggattggcttctgagtggggcccctgagcccccactagttgggactgagtggctgggccaggggcttggcgttctgctgagccctcagtccctggcctgccccgcttgccgggcccttgcccggcctcccagctgctttgggtgcctgagaagcagagctggagagaggtctggcaagtccgccaaccagcttgccacaaacacgctccgggacctgggccagggactctggcccggcatggaacaggcagcagctccttacgtgggaggctcctgtgctctccttcccagttctcaaaaaaaaattttcccctttctgaacgtgagtctctaaacgaatccagagcctgtgactaaaaatactttaacaataggaaagtgcatcagtctttccggctgggactcgttatcagagagtttttattttggaatttgaaattttgcccacgtaggctgggtggagaccttgggcagaggcaagggaatttggtgggtgctgatgttctgcaaggtggtgggagaccctccaaggcgagaggagaagagagctggccaggagctgaagagactgagagggaaactgagggaggttcaaggcgtggggcaacctttcccaaaggaactccgtgatcttgtctgtgttttccagccccgtctggtggttcttcctgaagtctgatcttattcttttatgctgtatgttaatttcttctggcctgagagggagggagggaggggtagagaaatcactggactgaagatagcctctgtggccatagcctgacctccttaattaactagctctctccagagtattaattgaccactcgctgcatacacagtctagaattctcccagtgctgggtagagccacatctctgggcacactctcttttcctctcactcagcccaggagtgggagaagtagagatggggttactgtttgtctgtagttcctggagcaggagggctgccggctcccccgtccagctgaggaccctgctatctcctgcccctgccaccctccctgccagccccaggattctgctgcaggctgctgtggttgtcccgttgcagacatgagttccacagggccgagtgtgggacttgagtatgcatggattttggtatatgtcggggtcctggaacccatccccctgtagcacttccctgtgccctggaggtactgcctgcctcccgacttccaccctcacttgccattacaggtttcccatgacagtgggggagcccaggccccaggcagtgctacatttggatgtggagcctctcctttccattgtgaactgaattctaccagcactgggcctggtgatgtctgcattaggcagatgaggaagcagtcttggagaggacaagggactggcctcaggtcacacatcaggcttgctagctcctggacaaagatgcctctgatagctcttccatatttcgcccctgctgagagctgaggggaggagtgcggccactagctgacctgcctgggtccctgggaggctggttttggggaggtagtgatacatgtgctcatggtagggcttgggcaagggccaggagagcagagcctgggcctgacctttcacccctggttcccagagctgcccacgggaagcccccagggcagtaggcagtgcttccctgcccacagtgcaaatccccctgcctactgccaaagcaggaagaggaagtggccgggtcagggctggcaataggccctggggccgaggaggggaagctcccagggccacttctgagctggagaaggcaaagctcactccttctgcccaccccaggggaagggtgtggaggcccatgggtggggacagtctcagtgaaagtagggcaagttcctgacctctactcagtaggggtggggcccagcccaaggtggaggggcagcgtgggaaaagggctgtgtaattccacttccttcatcccctgtttacccatctccacccctaccctctgggctggggaatggtggtggacattggctgctcacttggggcctgccctgggctacttactactgaggatgcacaaaggatcttcccaccacggactaggagacagtgcccttgtcctcatgttgttcacatactggtcggtgagggatgggtctgagtacatgataaatccctgggccccataagatttgactaggaggggtaagggcctggtgaactgctcagaaaataaactgtgttgtcagcaggaggacccctttctactatgagatattgcattccctgctaatcatacttgtgctctatctgttgatagaacaaatacataatgagaaacagccactgtgctttcagaagaacacacttgaaagaatttgttctcaataaattacatctgcatctggatccatatgaagaaatacgttcctctcattcaggcgtggctattttaaaataaaatttgggccgggcacggtgactcacgcctgtaatcccagcactttgggagtccgaggcaggcggatcacgaggtcaggagatcgagaccatcctggctaacacagtgaaaccccatctctactaaaaatacaaaaaattagccgggcgtggtggcgggcgcttgtagtcccagctactcaggaggctactaggaggaagggaaacagtatgcacagtgggtgaaacagtatgtgcaaagtgggtggtgggaaggtttagctcaaggtccttatatggggtcggtggggaactgcggtgatgagggcagatggataggctgggccgtggtgtgggggcctgactaggtggggctgtctcgtctccatcgtgacatctctccccgcccttccatgttgtcatggccttgccttacctccaggtccctgtctctagttttggatacctctctcattattacctgttccctcctaccccatctccccgacaattagctgttcactctgaccttgttcttgaaggttagacttggaggggtgtgtgctgggagtctgtggccagtctgggaccagcatttgttttaggcctcccaaagtccacgtcaattgtgcctttctccaaagttccactagctggaccccactctctcagaggcccaggccattctcccttgagggcccacaaggcctgggatccccaagcccctttcacctctctcgcctttatcttaggctaggtgctccacacgggaacctgcattggtggccccagctgtgtttccacagagggactttgcctttttctccttatttacttattttcagaatgtggtgtgttgagcacccccaccatctcccacccctgcaagcatgaccaggtggcagctgtagttccttatcctcctccaggctttggggcagcaggactgcagcctccataacctgcagcagcttggggaggtggggcctgggctgcaggcccagatctggaggctagatgctgagattcagaccagggacctggacagctcctcaccacactcagttttccttgggcttatgggtgggcctaccccacaggatggtctgtgccactttttacaaatgccaagttgtgaggaggagaggagggtgcctgagcttgaggctggttcaactctcaaagagctagcaaggctgggccgagggcggtggctcacgcctgtaatcccagcactttgggaggccaaggcgggtggatcacgaggtcaggagatcgagactatcctggttaacacggtgaaaccccgtctctactaaaaatacaaaaaattagctgggtgtggtggcaggcacctgtcgtcccagctactcaggaggctgaggcaggagaatggcatgaacctgggaggcggagcttgcagtgagccgagatcgcaccacttcactctagcctgggcgacagcaccatctcaaaaacaaaacaaaacaaaaacaaaaaacaaaaaaagagctagcaaggctgagattgagcacagactggtcaagccacagataacgcacttgttcttgctggttggcaggaagaacaatggcttggctgatcatcttttgctacctattaaaattggttttattttggccgggtacagtggctcatgcctgtaatcccagcactttgggaggccaaggcgggcagatcacaaggtcaggagatcaagaccatcctggctaacacagtgaaaccccgtctctgctaaaaatacaaaaaaattagctggcgtggtggcaggcacctgtagtcccagtgactcgggaggctgaggcaggagaatggcgtgaacccgggaggcggagcttgcagtgagccgagatagtgccactgcactccagcctgggtgacagagcgagactccgtcttaaaaaaaaaagttagttttattttctagggaaggccctgctggggtggagggagacatcctggggcaaagtgggtgctaggtgaggaagtcagcctgtgacacagctgggatcagttccacccagcaagacttgctgtgtgctcctgagcaaagtgtagctcctcttggaacccttgactcctaatctgcaaaatgggaggacttgaattctatatgtggttttaaaccttttttttttttaagctgtggagtcattttccacaaaaggattccacaaaatctaagcaaaatcttacggaaaagcctaagagaaagaaaagcaaaactttgcctgaaatgaggtagggatcctggatgggtccaattggcatcatcctgcccacacttcacattcaaccagtggccttgaaggaagatggtttggagcaacccagagctctctgcagatgcattcacgttgagactgtatgctgggatggagggttctggcaggttctgaccagatgactgaatgccatcagcattacagtcaccccttggtttatgaagggggttggctccaggaccccaacttgtactgcgaatactcaagtcccactgttggccctgtggaacctgtagatactaaaagtcggccctctgtatatgtgggtttttggatccatgttggattgaaaaaaaatccccaaatccccatatgagtggacctacacagttcaaacgtgttgttcaagggtcaactgtgtatgaagactgctccatctgtggtggacagtgaggctttagaaagaggagacaggcaggctaatggatggtcttcatgggtgtgggaaaggaggagtggtcactgggcgcaggcagttggtctgtgggaccagtgaggcatgggctgtggctggcagtaggaaagcgggagaggctgagtgcagtggctcatgcctataatcccagcactttgggaagccaaggcaagaggcttgagcctgggaggtccaggctgcagtaagccataatcatgccactgcattctaggctgggcaacagaacaagaccttgtctcaaagacaacaaaacaaaacaaaaacggggagaggaaaggacccaagagatgttccaaaaaagaatttcaggaaacagtgaaaagttgcaaatggggcatcaggagccaggagcagagattaggtggcaggcagggggtgcagaaatgacaagttctgtctggaacagatgaaatttgaggtgcttgtgggacctttgagtgggcagaagcggg

SEQ ID NO: 2538 - DNA, 7673 bp, Homo sapiens
ctttcctttgctgtggttatggccctgagtccttaaattataggctctcctgcagtttcaaaaagctaattcacactactgtgtgcattagaaaggtggtatatatgatattccactaagggaaaccctaggaacattaaactcctactagtaactggtcacgagtcagggctagaactgacactagtcatttttcttcactgacaagttttcattatgtggctttcccagaacaatttagaaattgatctgcaactgatggaagctgggatgaattgggcgcataagtgaacccaaagcatcagagcaaagtcaaagcgaacatctggctccagctttgagtacaagattaataaaggagtctctccatatcctctctgtccacgttcgttgtggacggggtcaccaggaagatggttcctgggtgatgagagtgtccaggacattgtcttcggtggactactggcacagggacctgaataagacactgggatttacaaagtggaaaagaaatcactgagggatccctcaagccactgaaaacatgtaccatttgccataaaacagcattaaacattaagtcaacagattgcacatgaatatcaacaatcctgcaaaaaaagccagtcccttaagaaacatcaagattgacagttgtcatcagagaaatgatgaggaccaggatcttcagggtaccatctggtgctgtgtttgaagaaaatgagaatgagagatatttcctcaatagatgaaactattggccccagctccaaattcacacttgttgcagcagttaattctgcaaaatcacagaaggaaaaaaagtcaggccaaggttctgccttgctctttcttgaatcacctgctctggaggaagccagttgcatgggaagacatccaagcagccatgggttgtgtagagagaaactgaggcctgccatcagtagccagcatcagcctgccagccatgcaaggagccagtgtggaagccaatattccagagccagtcaagctgacttcttgactgaaactccaggagagaccctgaaacagaaggacaaaaccactcctgagttcctgactgatagaaactgtgagatgataaatgtttttgtcatttaaactagtaaggtttggagtaatgttttgcagcaataattaattaaatagtaaagaaaaaaatgcactaagaaaaatccaaagtgatataggggttatgaggaaaggtttcatggaagacatagcatttgagtgaagccttgaaaaataacaggatttagaaatgcagggatgagaaagaagcccattccaggtagatggaacaatgtgtgcaaagctacagaggtgacgatttgccagggattaggcaaacatcaaataatcttgtttgattgcaacattagtccctctcatttgctccaaggttgtcacttttgtggtgctgaggctagatgtaggacgatctcttgtttgaagccaaaaaagagataaacacataaagctgagcctaaaatttagcaaagtaagctcagtaagtcagagaaagagtccaaatagatcgccttctatctctcttatccaagaaataagcaagccttgtatgccactcttttaagagatctatttggactccttaagaagggtccatggggcagcccgagaaaaagggagcaaggaactcagaaatggcatctattcagaatgcaaatcttatggatgagtttctctctaaatctacatgtgacttgatatatttggcagactaactccattgaaagataactcattttataatatggcatttacacaaacatcagagaggaatagtaaaagaaagtaaaattatagtataggacagtattaattatgaatatagatacaaaaatcacaaaaaccaaattcagcattataggtaaaacaaatagggtttatttgagaaatattggggtagtttaaccatggaaaatctgtatatgcaattacattagctgctacagaaagaaaaaccttttggaaaagttcaacatgcatttatattaagaattcttagaaaatcaggaacagaaagaaacttctttaacctaaagaacaatagctatacaaactttagaaaacatactttttgtaaaataatagaattatttatggaataagacagtgtattagctaggggcaatgcttgctgttagcagataaatctcacattatcagaattttaatgcaaccagcaaagttgtttctggtcaacaggtaacactgccacgcctaactaaaagaggttgagaaatttagactatttgaaaatgtagactgaaatttggaccagaaagaagagaaaatgagttggctattcacctagcagttactgattgagtctttattttgtagttaccaaatacctatttcattaaaacatattaaattaaattaaactcttaaattaaattgttcattaaaacatcatgcataaagcatatccactcttgctcagagaaacatccaaagtcctatcttgtgggaaattcagttcaaagtcagcgttccaggtgacatgcattcctctgcattaggtctgaatggggctttttgtcatccagtgatttatgaatcaaaaggaaaatcatatactccctcccgtccccacctccactatcatcatggatagtataactccaaaaaacatatccattcacaaaagtgacaatgggagcacataccaggaagaaagccatctaattctgttgggtgggtattatgagttccctctgcctgacattggaatcattttttggttatatctcaattctgctctttgggaggaattatcttgtcctcagcacccctagagattccttttgcccatcattctttctaaaatgtctgaaatgggttaggaagtgtataatccttgggggctatatagaaactggatcttgcttcctgcttatataactttggggactcaagaattgtattagagctcaaatggtcagagatattttttatgccagtcttgcaatatctttcaatttagttatctcaaaaaaatagcagggggaaaatatggcagtcccttacaaatttgaacatgtgtttaccatatgacttagccattatactctacagcactaatgccagggaagtgaaaatatatgttcattcaaaaacctgaaggaaaatgtacgtagtgggtttatttgtaacagcccaaaactagaaatgacccaaatatccttcaacagaagaataattaaactctgtggtacctccacaccatggaatactactcagcaatcaaaatagaaaaactagggacacgtgcacagaatagattgattttgtattagcttcctattgcttctgtaatgaccacaaatacagtggcttaaaacagcacaaatttcttctctgacagttctggaggttgaaattataaaatcaacattttagctaggctaactcccttccagaggcttcagggaagaagctgtttccttcccccttttcagcttctagaagctgcctgcaatcattggctcatgaccctttccttatatcactctaatttcttgcttccattgtcacatctcctacttttctttaacctttttttttttttttttttgagacagagtcgtgctctgtaccaggctggagtgcagtggcataatctcggctcactgcaacctctgccttccaggttcaagcgattcccctgcctcagcctccctactagctgggagtacaggcactcgccatcacactcagctaattatttatattttagtagagacggggtttcaccatgttggtcaggatggccttgatctcctgacctcgtgatctgcccacctcggcctcccaaagtgctgggattacaggcggaagccactgcgctgggcctatctccctcttaaaagggccgttgggattattttaagtccacctggagagcccaggatgctcttctcatctcaaagtccttaatcacagcaatgatatctcttttgctgtattttctatattcatagtttcagagaataaaaacgtggacatcttttgaggtggggaagcattatgctgtctaccatagatcaaagcaattaggctgaatgaaaaaaagccatcctcaaatgttatctagtcatgactccatttatacagcaaaatacctgtttgttaacaaaaaagacaaaactcaaaaatgtagctcagatctgctaaatggattttaggtttaggcaaattcaaccaccttgccacaggtaatcccagcaagaagttgcagatacaaacttgagctttctgcagtcagattcattccccagagaaaggcaggagaaactgagctccacattccaaggttttccaatctgctaattactccacctctcaagatacattagtgcgttatgccaactgggtgccccttgcatgaaaagaaataaaagatatagggaagaactattccttttaacaattgtattgtttaattttgtttaggcttagcagtgcatgagactcttatactttttgaaggttgtacatatttcacaataaaattaaaattcgaaataatcaagagaaggccctaagactgtaagaagtacgttcattgtggagggctttcatgacaattctaaatttgggacttttgagggtataaaatggaaagcaattgagactttgtaatcgaggaagtaacaagttcagagctgcattgggagatgactgcaatgactgtataagataaggatgaataccgagggtgtataacaagatcagcgagaagaggattgccattgttccacctggaccaggttagtgaccacagggaggggaagcagggagacttaggagtatattgtgatatactagggaagagtatctcagtgttaggaaatgtcagctttgtaagtttttatcaagcagctcctggtatagtgtatgggttcagtaagacatggaaacagattagttgtatgaagaagggggcattaaagatgaggttaagatttaatggtatggggaatgttgggatcattaatatgaagaaattaggaggaggggtgttagtgaataggagcaccaatggtgagtttttgacagtctttgccagcttaagtttgtatctagccacatagcgagatgaggcattaacttataataaagataaatcaaaagctccccatgttccatgaatatctattctcatatcccggctgtttaagactttcaccaaaatttcttgtttatccttcatatagatctcgcatatttttcaggattaattttactcctacatatggtaatagtttctattgagatgataaatgaaatcttcgtatccattataaaatgataagtagttattacaagtctttaggaaagctctcattttttgtgtgtttcacatgaatcagtgttctgctctattgctctgagtatggctggcacagaaagagttaagttggggaggaaagctcttggtttctatgttttttgtaaaatggcattctgttctattgctgtaagagcctagcgggagaaaaacaagcagggccagggtgcaacagcggctggacagggagaaagcagcagtcaaggagcattcagggcacaaggactgtccgtaagtggaagcatctactgaggcttagacgaatataaccatgaatatcaataagatccttgatccttctcagcataggtgagtgtgctggggccatttcccagctctttgagagatgaggggctattacgcccttgcactttttaacctcctattctgtagagacagcaatcacacactgccataattccattagttaatgaatactctgagaacttgtccatcataaagatacacttaaaagttaatcaattatctcttttcttaatgttttctcccgtttcttataccttctcatttaatgaaaccatactggaaatatttgattaattcttgaatttaagattttcatgtgcttgtacagataggttgagaaaggaaaaaagtatttctgatttttcccctgtttttgctccatattcccatttcaaattcttgggtagtgtggtctagtggggaaattgcaaatttgagatgagcagttcacctctgccccatggcaagctgatgattttttttttttttttttttttttttgagatggagtctcactctgtcacccagtctgaaggcagtgggacaggatctccactcactgtaaccttcacctgctgggttcaagcagttcgcctgtctcagccttcctagtagctaggataacaggggtgcaccaccatgcccagctagtttttttgtatttttagtaaagacgaggtttcgccatattggccagtctggtctagaactcctgaacctcgagtgatccgcccgcctgggcctcccaaagtgctgggattacagacgtgagccaccacacctggccaggctgatgacttttgtgctcttctttgctgagcctagactcggcttcagaaccctaatcaattcaggaaaccaggcaaacattagcaatcaatcagttcccaaaggtagatgtaattagccaatttccatctaataggaggaaaccctaaattaggactgggatatcaaactcatttctttcagtagctagctgtgactttaggcaaattacttaacttccctttgcctgtatccctcctgatctttacctggagagacttcagtagcattatgtcatatgagcatttgactttgcaaattcaactatacatattcagcaaataacagcagcactgatagttttcctaccacaaagccccaaatgcatataaactacatcttctggtacgcaaccaaaaaaaaaaaaagtaatctttttcaatgcagtaggaaaactggttacattgccctcataaggaagacaaaataaacacaaaatcatttgtgctacattttatgagcttttaaagagatttttgaagggcaattttaattctacacaatttttgcctgatgtgctgattttagatttaatctcatttaagtaatgaatgcactctagtaaatgtcagagctaatgagtggctgtgaggttaagtgaacaagaggggtgatagcacttttgaaagttaaaaaaaaaagtgctacccaaatatatggcgatagtgtgatgatggaggtggtgataataagaaagacaccctgggcaccctgagtgtcaagagaacattaacattttgctaatgagacattatcatctgtggtcaccagcttatatagtttggatatttgtcccactcaaatctcatattgaattgtaatccctaatattggaggtggggcctggtgggaggtgactggatcatggtggtggatatctcataagtaaatttcactatccacatggtgctctcttcacgatagtgagttctcactagatctggctgtttaaaagtgtgtggcaccggccaggcacggtggctcacgcctgtaatcccaacactttgggaggcccaggtcgggggatcacaaggtcaggagatcgagaccatcctggctaacacggtgaaaccctgtctctactaaaaaatacaaaaaattagccgggcgtggtgtcatgcgcctgtagtcccagctactcgggaggctgaggcagtcaaatcacttgaaccctgga

SEQ ID NO: 2539 - DNA, 5114 bp, Homo sapiens
cggagtgatccggctgcgggccagggtctgggaagggggtggtgggtcgccgtttcatcagaagccggaggacgggcgccagggggcaacttcctacaggagggcgtcccgttagaatgacagggcttttgcaaaagtctgacacccgtggcacagagcgccccagatatggagggtttcacaggctcatgtgtggcttcttcagtcctctcttcattcactcatgtattcatttattcaacgacatattactaaggaacctccttaagccgggatgctgaacgtggaaaaataggtgaaatataattttacccctgagaagctcataggctaaaaaaaatattgatttgggataaatgtatgttaagttgactcttgaacaatgtgggggcttggggcaccaaccccctgtgcagttgaaaatcgacatataactttgactcgccaaaaacttcactacaatagcctgctgccaacctgaagtcttaccaataacatcaacagtcaattaaacatattactaggctgaaaaggagaaggaagtgaaggggttggtcttgccgtctcacgagtggcagaggcaggagaaaatccaaatagtatagatgttcttcaggctggatgcatattgccagatttgaatactaaccttttaggaaggttagtattgacctttcattcttgctactggggaaaattaagttaaataatctcaataaggtcttggtttgtggacttggggaaaattatagctcatcttgcaaaatagccatatgagaatttttacgaatgaatcatttactgtatgcctgggtaaaaatagcggcacaccttatctagtgctttagctttgaatctcaaagtacacagccaatttgtattatgaataaggacttcataacccatattgtcgacttaaatggtattaagtggtggctggtcagggagaaggtggagaggctagaaaccagggaataccaccttgccaaaggcttaaataccattaggcagaaccagtatatatttatattctttgcttattcatcctctgttcatgactagtgtggtcataaattatatttaaacctgtaactttatatacatataatgcaaggcatagcaacattgcatgcagaatttcatgacaagtggcctgcatttttgtgaggaaaaaaaaatatgtcaagctgcttttaggactgtaactaaccacttggctattgcatgccttgtgccttaggtctgggatgtttctcttgcatgcctctggaatcaaatgactctgatactgcaagcacttcagagtatgtataagcaatttcagctggttccgtcctgatatttacaaaactgcctggatcatacttacaaccatgcaatgatatatatttctattaagaaagcaacgatttgcttgaaagatgaaggaaaacaaactaagtatttatgtacaatgagtcctaagtgtacaccactatgttttccatcagcttttgattttctgtcactcctctttttctttgaaatttagagtcagaagtgaactgacttcatggttttcctcatgattatttgatatcctctagggaatcatgacttaaagactgcattcttccttctcaaaactcatgttaaagatttctccatgcagagccacaggctattttggagtttgaaatggagcagttaaaactaggaggtcacacacgttgagattattccttcactgcatctcgcccggcttgtgtgcctgaggagacacgcatctcagagggcagaggggcagccgttgtctagtgaggttatttcacctactatataataaaatgtacaggacaatagcgcatttgttataaaggctactcgagtttgttatacaattattcttcaccaaaaacaacaacctgataactcactattagtatgagtcttacttggtagatagccaggactataaaatatacaaagccaaactttgccattatttccatctaaaccttagagattgctataaccatatattcagacttaacaaagatatttggcaccattcccattttctttctgttaattctttcgtcattttcaaatgcaaaatcctcccaagttgggggtcgtttgtctcttattttagttgtggccctttgttccaaaaagagaattaacttatcctttcttccctgagtttaacccttattcttttttcttccttcctcctttttaaaagtattcctcctgagtttataaaatctagaaatttctctcttctaattttgtaagattagtaaataagcaattctgtcattctcccctcttataaatcagcactgtttatcaatttttaagaacagtcccaagacatggtttatgaaaagaaggaaccgattgcaaaataagcgaggaagtttctgatttaacttcctgctgaaattcctaggaagaaagacaaaaagctgaagactcacataaccctcatgccctagagataatgaagtgtagggtaagatctcagtcacctggtggtcttggatgagtatgctgactctgccacaatgagctgtgggcgtgggggaaatcacctgcccactttgtgcctctgtttccagatctgcaaaatgggaatagtaatgcctgcttggtagggttattctgaggatttcctggaacaatatttatgtataatcaggatgacttgctccacaaaacccaagtgcaaaaaagtcacatttcttgatgattctaaatacagtgaaatctggatcttaaccctccacctactaaggccagcaagaagcttaatgtcaattggcttatgtggctcatgcaactgggaacaggtcctttgttcctcgactctgtggttacagcccttagcactgctccttctgcagcccagcctctgtgcaggtcaggtcctcactacccactggagctactgctcaaggcaggctttggtgatgcccacttggcaggcctgacaggaagctcatgcacccccagagagaagcctcttccagaatgttggactcagatggggtgtcctaccgcctgcagaaacttcagtcccgcagctcgcagactttggggattcaccccctttctggggtggatctttctgtaaatccacagaagtaccaggctggagctcctcccactcttggacagttctggccccttcttgggagggcccagaattcccaaacactttatggaagcagtttctccagaggctcctggaacatgaaggagctgttagcaccactttgcggctaaaagagccaagaccttggaaaacaaagacttgcctttccctccattataagatgttggggtatatgaaaatgaaacacaaatttacatgctgacacatttgtaaactatcaagtgtatggtgactattccaagggcatcaccagtttgccaaatttccccgtgaaatagttttactacaggaaacaaaagaaaattttaaaaacatcttggattgcaggaagacatggtctatgaattacagaaaaccacacacagagataagatgaaaagttaggaagacaagatacaaagagagatgcgataagaatggatgtcaaaaaaaaatgcaatccaagaattaaaatccctcatggaggtggaaagaagcaaaattgacagtgtagaaaatggaaacgttgatttggaggtgaaccttaagaggtcttttacaggaaaagagcatagagttagacatgataagtgaaaataaatagttaactaagaaaagtgatagattctgataaatataaacaatgggaattcagtttaagacttaacagtattactaatcaagaaaccagaacaacagaaataagtgataatgactttattgaagaaaacattttcaggctggaaaaagactggagtatatagattgactgggctcacaaattccaggtaaaatcaattttaaaacacccacacctagacacatattgaccacattttttagttacaaagaccaaaaaaaaaaaagaagaagaggaagtgctgcaagttatccacacaggaaataccacccccaatcccaaacaagttgttgatggaagaacaaataccagactgacttctgacctctttgtactactacagtcagaaaacaatggagaagcatctaaaagcattttatattcagccaagtcaactttcatgtgtaaatgaccttgcttcctaataccccctagttttattaccataatacagcaaggagactgattagtactcaaaagagtagttattgtatcttatccactatggtaatttagtttcttgatgagattctaaagttgtatgaaaatgccaattttatgcctccccatctctctgtgtgttttaactttggttttaacgttcctctaatctggcagtggtagtgttatttgctgctgagaaaagaggtctctctcccaatgacttctttaacctcatctctcccactccaagggtggtccttttgtttgccttgccactgggaatttctactttgtgggcgtagtgtttgctcaggtggaagagctccacatagcaagcctttgtcccttaattttactccaaatgccaagactttgatttatgaattatattgaaaaactggcgattattagagttaaaaggcctcttacatcttctaggctagcatccttggtttacaggtgaaaaaaacagaccgagaaaagagccatcacttgtctagagtcaaggattcagataccgttcgtgttaggaccagctaggctcctggtttttctgcatcccgcaccagactgacactgatggacaagatctattggcaggcccaagtgatcccatcttcaccatgatgaagaagttcgtgagtggcagggcccaaagcctgtggaatggccaaaggcaagctaatgcccggtaatcaaaaagtcagtgaatttccaacaataagcagaggcacaccttcaacatagcacctcagagccattgaaaactcaaggtattcattctagaaaagtccaaggatacagaagacatgctttagccagtttttcaaagttcttagaaattttgactttgggcaggggcacagtaactcacccctgtaatcccac

SEQ ID NO: 2540 - DNA, 7083 bp, Homo sapiens
aaaaagtggggagtgcttggagctcccaatttcagcccgcgaaagtctcccgactcattgctattcttgggctcaggaaattgcttaaacgcgatctgattgccagcaacgtgcaggagaagtggggggtccgggtgtcagtttctttacgtgcagcgctcgccctcgcgcgcgctcgctcgctccggctccctccctccctctctgttccagcagaggctgggagttgccgctcgatccagctccccttctctccctttttagcatttattgccttctttttgtcctttccaacttggagagggtccgggtgtggagcgcgcgtggatcggacgccttggtctgcgcggccctattcattcgctccccgggcagccgcgtcgcggagagggcggcccctttttcccccattttttcaataccccattaagtctgattgacagttaaagttgttgggaggcttcactaccgttcctctgagtggctgctgcggcctcccctccccctgcgccgtcgcggggagcgcgcataaggcgcgcactcgggctcgccgggactcgcgctctcccgggactggctcccctctctgcaagccgggacttgccgccggtgtccctgagggctcgcagctgtaactcgaacacgctggaaccgactccggcgagccggctgccttctcgagacgttcctccttgcccgggccgcccgcgggccaggtgatcaccccgagtgtggagcaggcccgggggagcttgcgtatgccttgatccaaccaggtcacccagggttttatttcaggtcatttggtcatcctcggcctccaggtaggatcaggaagccactcctcacctttgctcggacctcttctgtgttcacgtagagtggacttttaaaagcctgacccaagtgcctcacgatgcttagggggaagccgctggggagcaggactttgctttgaggggagggagtagtcaaggtaaaggaacctctgctccgagtgccaataaaatccccacaagattagctgggagcatatttattgctcatctgagctagaattaccttgactgacaccaatttccttaataacaaaagcctgtaaacaaaacgtcctattcgtgcgcccctgtgctgtgcagccagcgtctcctgtccttgggtctccctggactgccctggcggggcacccaccttctaacctcctgcccttcccgaccggaatgtctcccctgctggagggtgggaccgagctatttagagttgtctgttgcaggaagtctgggaggtgagtcactaaaaagcagccccagttcaaagtgctgatgggacttgcctcccgcccccctgcacgttcccggggccggaggagcgagagcgaagcagggagctgccctgtaatctggggcagccgtttccagcccgcgacttgttcagacggcgattcctgggcctcacccccagagattctgattcagcagggctgggtgcgctgggatcggtactttcaatgctccgcctggtgagaaagtcacttcgaaaaacgctgatctgcggggaggggaggctgggattacctcgtcacctgcaaagacctagttctggggagaggttctgcaggggaggatcttccttctgggtgaaaagccactggaagagcaaaaggcaggagaggcttaggatgagcaactgtcctgcactgagggcctatattctgacacagtccttcccctgaccttgcaatcgggggactgttatcccatcgtccaggttacccagccaggaagtgcaggaggggggatcccaatccaaacctcttcccactctgaccagacgggaggagagaagtggaggatggggttcagctaagggttgcagagcagagacccccccacccccctaacgcccccaagagtctgaccgaagggcggaccaatgtctccatcagaccccagggccggaatccattgtggtgacggcctcctctcatcttcgaggtctgtaaaaatgggaaagcgattccagcctgggagtgacaggcctttcccacccagcagcggctggtgtccgccaggcctgcgaagaagcctggaaagatctgaagacagaaccaggctgcaaaagcgggctttgctcatctgttgtcctcggagccgcctggtggcccagataggatactgcgcctccgagctgcccggcctccaacccagcggcgttcctgctaactagccatgcttttcttccaggcatttctctcatgtaaggttaacaccccaagtctaaaagggcttgtgaaggtcatagtcctcctcccccaccccaaacacacttttatggctggggaaactaaagccaaaagatatgaagcaactcatatacagagatgcattttcaccccggtcagatgccagaccggctgggtaaccgttaggtccctcttacatctctctggttgtgtgcctgggatggagggcagacggtgggaaggaggtcgggaacccaaattggcctttagtgcctcagggcctttacacagtttctgattgaatttccttaacagcccagggaggctcgtgcccatttattgcaggaggaaacaggctcagtaaatctaagtaacttgtgcaatgccacgcaacctgcttctcaaaaggtttgggatgaaatcagagggaaaaagaacatgtcagacattccccaaaggaactgacagttccagaagctggcctgaggtggatggtggcctttttttctacttggtccatctttcaggatgtggtttttgtgggactggcagctctgcaagccacacgtttctcccagcatcaactgctcagagagaaacttgtcacctcctctgttgccctcccccgaggtccctgggaagatggggccaaggagaccttgtgtgggggtgatgtgtgtgtgcacagttcagcaggctggccctgagggtcgtgtggcctggcttcagtgagaacagcagggacacgtcctctctgcctttccctccctcccccagcctttatcctttgctcttgtaccctctcctggaatttaactcagggcagagtttgaaatttcacatcccaggtctgtccctgaaaatgtgaaaggaggctttctgggcttgaagggaagaggcgagctgcagttgggagaactaactttttccgtggctcagctcccccggtgcagcgaggatccacactcaccctgtggttcctggaccagaagcctgttagaaatgcagaatccaggccgggtgcggtggctcatgcctgtaattccagcactttgggaggccgaggtaggcggatcacctgaggccaggagtttgagaccagcctgggcaacatggggaaacccagtttctataaaaaatacaaaaatgagcctggtacagtgggatgcacctgtaatctcagctatttgggaggctgaggcaggagaatcgcttgaacccggtaggtggaggttgcagtgagctgagattgtgccactgtactccagcctgggccacagagcaagactctgtctcaaaaaaacaaaaagaaatgcagaatcccaggccccaccctggccctcctgaatcaggctctgctttttactgaacgagatccccaggtgctcctttgctcactgaggtttgaaaagcgctgaggctgggtcccgcaggcaggaggaggactttgggtttcatctgcagtgcgatgagggcctttgggagggggctgtggagcaaaggcagatgtgatggaatctctgttttcggagtctgctcaggctgctgggtccaggatagctctgggtactgagtggttgtcgggagaacagtgaggaggccattggtactcaggccagggatggccacgggccaccagctcatgatgggtgaacagtgacacctggagctctgctgccatgagtgcccagctcagggactttggggtggggatggggggccccttccttcctctcccctcccctcccaagagactgcagtcaccggagccaaatcccagcaggtctgtgctcactgctgagctgttctgcctccttcctgacccttcctccagctcttgagcaggattttaataccaatgacttggtgtgattgacacacacaaatgcatgtgcacacagacacacgtggactcacacacgtacatggctttgcgggacaattggctactttcccctgagcagaacaagctggcagtgtttagccagggagatttggaaaactgcctggtctagtggaaaaaagtgttccacgaagtttaacatcagctgccctggagggtctcttcgtggagacaggctcctgggaaaacatgagttgtatgcgatggccgactgggcagtttgcctggccagaggcaacagagaggagaaaacaggcatcaggtgagtggaaaatccctgtagggagaggacccatggggaccatggtccaggaaagcaaatctgcaaaggccagagacgatttaaaaccctcataaaacacgtccccttcctaatacagaacatttgccaagagggcccctttcctcctcggtgaggcctggtgggtaaaactggacatataaaagcaggttagacggctcccctcagtccaaggaatgcctcccccatgccccgccacaggtgagtattttccatggaactgcgtctgtctcttctgggcatgggcttaggttttttttcattattgtttggaatcccaggccgaggcagcagggaagtaagttcttttggctccataggaggggtgctggggcagccgtgtttattctggctgccagggtcgggtggaaatgcaggcgggagccaaggctgaaacatggcaggaacacggaggagtgggagggatgtgcttagcaagggaacaggccccagggtgtcaccgtgtcacctgagaaagtttgggccgaggccagagggcacccaccggtcctcacctgtgtcctgcctctgggccggtcatgtcattctaaaccagggcgtggagtatgggtttgagattagcatggctggggtaagatccaagctctgccgcttattatctgtgtaaatccgggcagatgatttgcctctctgagcctcagtttcctcatccctaaagtgggaatgttgtcactactgaaatgacatctctgcagggcctggggtggggcctggcagggagatgctagtggtcatttgtgtccttctcctggcttcatgtcctcaaggaacacactctctggggtggggctggggctgaggggggagcctgggaggcagggacagagagtcatgggggtgacagagagagatggtgggagacagagctggggccatgggaatgctaaatccttaccctaaaccaagagtcagcggaccttttccataaaggggccacatgaatctctcaaaacaactcacctctgctgttctagcatgaaagcagtgaccaactggaaatgaatgagttgtgggcgtgttccaataaatccttatttatgaacacaggcatttgaatttcatgcaactttcacacgtcatgaaatatcattcttgttttgattattttccaaccatttaaaactgaaaaccactcagacttgcaaactgcataaaaaaaggcagtggtccagatttggtctgtggactgttttcagtttgtcaacgtctctcctctaccactagcaagctagcaaacttcagtctgtcaagtcctaagaaataaatgaagcagtctcaggaaggcaaaatctactttccaggctgggcacggtggctcatgcctgtcatcccagcactttgagaagccgaggcaggaggatcacttgagtccagtagctcaagaccagcaacttagtgagttcaaggacaacacagtaaaaccccatctctaaaaatatagaaaaattagccaggtgcagtggtgcatacctatagtcccaattactcaggaggctgaggcagggggattgcttgaatccaggaggtggaggctgcagtgagctgtgattgtaccactgcactctagcttggatgacagagtgagaccttgtctcaaaaaaaaaaaaaaaaatctgcttttctgtctatactctttctggaaatacattcacaaagacccaggtttttgtttttttgtttgtttttaaataaagtgttactgtcacccaggctggaatgcagtggtgcagtcatggctcactgcagcctccacttctggggctcagtcgatcttcctgcctcagcctcctgagcagctgagactacaggcacgcactgccacagctggctgatttttgtatttttttttttttttgtagttatggggcctcaccatgttgcccatgctgcctcgaactcctaggctcaagcaatccgcccatcttggcctcccaaagtgctggaactacaggcgtgagacaccatgcccggcctaacccaggttttaatatccactgtaagaagaagttgttaaagaggtcacgcaggagactgatttcattgagaggttaaaacaaaacaaaacaaaacaaaacaaaagcccgtgactctagtgatggatttgtcatcacaaggagctaccatttattgagtgcttcccataccctggtacttctttcgctccttaaaggtaatatctcatctggtcctaactgaactgatgaggacagagacctccaaagattcaataacttgcccaaggccactgcttctaactgcctctgacaatgggcctctctcaggatttatgatgtcgctgccattttttagaagggctctctaagatggcaagcatagcccagtccctgccttcaggtggggaggcagacaggaggctccctggctttgcatgaatatcctgggtcctcagccacctgtgtccacgttacggttagggttagagttagagttagggctagggttagcttgcctgtcatccggcttgtctctctccgtgggcagagtgcataaaggtgcttcctgccagccatggctcccttcaatgactactctatcattgaaaagctctgtttggccaattatttcaatatcttttttcttttttttgagttagaa

SEQ ID NO: 2541 - DNA, 3019 bp, Homo sapiens
gacaggttgaagatgctgccaaaccatgtggaaatacattggtatagactggaactttgtgtcaaggctcaattggaataatctggagaagcttttctacaatgtctacactccagggcccacacctgccaatgaaatctgtaccttaaacctgaagaggaccaggtatcaatattctttgaaaagcagcccagatgatgcagctaggtaggtgtgggattaacagcacagccgggaagtttcaaattggaagcacttcagaaactgtcatatgcgagaaagatggtatctcattcagaccgaccaccatttcccaaagatttctcccagatcactacttcctcaagatgcccagagaacataattctgtgaccaaatgcgtatgagaaatgctgccaactgctgactcctatctttgagacttatctacgtagtgcttttagtgcttttttgttatgaccttggctcactgcagcttcaccctcctgggctcaagcgatccttccacctcagcccttcaagtatctgggactacagacacctgccaccatgtctagctaatttttgtattgtttgtagagatggagtttcaccatgttgcccaggctggtcctggtctgaaactcctgaactcgagtgattctccagcctcagcctcccaaagtgctgagatgacaggtgtgagccactgtgtctggtctgtagtgcatcttaatgtctctgagaaaacctgtgaccaagaaaactattacctcggcttaatccagtaattttccaggaaagctgcttttttatttcatagcacctaacaccctgtggacctccagaaatggtgattcacgatgaggaggaagagtactgagccctgtcaagggcagcattgggtgaggagcctctcaattacatgttaggaagtgaagacacccagacctcggattccaattttgatgcttcagttttaaaatggtggggggtgaggggctgatggagaagagtctttatggacacaaatggaccagggtgctttgaccttttgttctgtggtctcctcacttattaggtcacataaccttcagtgggctacataaacctcttttctcatctttagcagaacaaaaatctgtggtctgggcttaggggccagttggactgggctttggtcattgattcgcgctggtctttgaaatgtgagtggaagggacagacaggtgttgagtccaagcagaagccttcgatgttcttgtgtggcttggctctgcctctgtgcttctccctcctccttgagaacaatatgccccacatgggagctgctcctttagccaggcctccaggaccagaggacaaatggggctgagcacaaccaagcccagctgagccaggtcagggttcaatgtagcctgaacatgaaataaatgtttataattttaaaccaggaaaattttggtatagtttattataacaaactgcaatctataaacctgatttgggtctgatttaaagaaaccaaacaacctctaaaaattaggaggtaaacaggaaaacttgtacactgacgttaagaaattgatgtcatttttttttacaagatgttataggactgtttcacttgtgtttaggtaaagaatccttatcttcagtgatccacgctgaaatacttatgcatgaaacggtataatggaaggacaggaaagtgggcagagtcataaatgaagtaagaatgtccaggtgttgataattattgaagctgggtaacggataattgggggtttaccatattattcaacttttgtttatgttcaaaattttctctgattaaaaagctagaaaatcaacattcacacaaactcttctccataggttgaaaataggtggagtatcttgttaggattattataatcttttaattttatagcactgccaatgagccatccctgccataaaagagtcagccagagataactggtgacttccaccacgtaattattatcaccgtttatttcagtggaaactgctgcctgtttggatttggagaacactaagaaagagaaatgaagatctggagaattcaaaggataattatcccttttgaatattgacacacttacatgtttttccagacgtagattttgtgtaggcgaaagctatttgattataaaagatccggtttcttcaaatttttacaggtaaaaacttcattaattaacatcaaggaaaatggagcatctgctacttttttgtcaacagattttaataatattgagcactgctaattggatagaactgaaatatagctctttgtatgttaaattaagatgatttcttctgctatttttcccctaaattttatttaaactatggcaactcttcagagttttcttctaccatttaagttaaagtgattctgaatgactaaagggggtcctgtggagctccaacggttattccacctcagccctggaaagatggtacatcattcagaccaactatcacctaaagggtgtcctttagtgattcaggtaaaggggatccatgttcaaaaatgctgtcatcattgccattgtgatagttactgtgacctggaagggaaagaaaggcaatcagacctgctaacattttggctcaaggattttcttgaatgcttctgaagtcgggctatgaaacagggacatttaacaggcttgaggagaaactccaaatacaatgctcattaaagaccaaatgaaatatttgctgaaatggaagtgataggaatggcagacagtggattcttttgcttctctttaaacactgaccattcttcccagcagatggtggattaaccatggagaactggaggcaaactttgggcccaacttaacctcagctctgattaatctactgaaatcagaggcaccgttaaactaatcagaatgtattttgatgtataaggggaagaagagtggtgcaatgggaagaaagatgaaaatggagtcaagtagcttggggggcaaattggacttcactatttttttgttgtgtg

SEQ ID NO: 2542 - DNA, 1170 bp, Homo sapiens
cgcccggacgcaaggcacagggggacgccccgccgagccgctgcccactgcaccgagtttttcggaggctgggagaggaaatgccacttggattttaaaaccgtcaccgatacgctatagccctgctttctctacctccagtcgttttctgaggaccggcttggtgggtgctgatgcctgcctggaagacctcacacccacagtgtcttagaagattctgaaagcagtgtgagaccagaatgaccagcaaaggagaaaagaacaaggacacattgcagccaaaatggagctagaatcttgcctctgtccatccttcactggagttatcctggatggagaaggaaccatatcacctgcaaagcctggaaggggagccctgctgtgagcgatccagtgttcaagctggtcatcaggagaaagctacttatgatttcctaacaagccaccacagaacatcacattcccaaacatgctcttcaccgtccctgctgtccccacgtgcctagccctggtgtgggcaggaatgagtgggattgggatgttttctcacaggtctttctcaggtgaggccccaggctgtgaccaggcccctgccctgcatgtgactcaggcctagcccctgctggggcaggaatgccacccagcacagcatcctactggtgcctgaataaagaatggactggaggttcacctgaaaggggctgccaggtttctgcgggggccagccaacggctcacaatgaccctgtgttcgactcatcttacgatgaaatttttcagcttgacgaacttttactcatctttcaaggctcggctcaaatgttatttccctgggaaaactgcgctactttcagcaaaatgcatttccttttgatgggcatctgtttttttctttctttctttctttcttttttttttttttttttttttttttgagacagggtcttgctctcttgtccaggctggagtgcagtggtgcaatcttggctcactgaaccttcacaatgggcatctgtttctgttctatggagtgacctaaaagtcaagaatcatggagaaattgggagcaatggctcacgcctgtaaatcccagcactttgggaggctgaggcaggcggatcacttgaggccaggagttcgagaccagcctggccaacatggtgaaaccccg

SEQ ID NO: 2543 - DNA, 2510 bp, Homo sapiens
cggcccttccctgccctgccctctccgcgcccgctccattaaagttctccatccagtggagagccctggctggctggccctctggcagagcggtgcccgggtgctcccttactctggcaaacctggatctcaggctcacctgttgtggaagtggaagaggctgaaattgacaggaactgacggattgggaaggatagagaagtatgcgcaaggccaaacccccaacccgcaaacctcatcatccacccacttctagatgagccgtaagtttagctctaggttttttgctgtttaggttcaaatgatgggacttcttgtccccttggggaataattttgatctcctgactctcccttctcttagtcgactcttcaactaacctctgtctgtccttctcccatctcaccttcatccctcactgatcaccccgatctgatcccccttgctccacctgtagcccccaactcactcccactgccccctgcctctctcctcctaacccagccagttcaggcttctaacccagttcaggctcctaacccagacagttctccggcaaggtttctgcaactaagaaaagtaaaccccagagacagaatgaaagagccgggagttggaaggaccaagagcagagacagagagcaaggaccgaaactgcttcttcatgacaccaaaatacaaagtaaaacatgcagtcagccattcacgtgatcgagagctgagtcggagatgtgcagcccaaataccacaacgactcgctgcatttttcactttccgtctaatgtttcgaaatcaaggcactgacgtgaagatcaaagacggtataagaaagaaagcaagagacagatgacagagtcctcccccccaaaaaataaataaaaaacaggtgcatgattagagagatgtagagaagttagaacactagggagcgggagcagagtcgctgtcaaatggagagaacttagaggatcaaggaggagagaaagggaaccaaccagccgttggccttgcacatacttcagtctgcttgatcaacaagactcttaaagtagaaatgtttgttgcattcttacaaagaagacaatgccttcagcagtgtttcccatggtgaatggtgtgtactgggggtaaagggagagtagagctaggaattggtattgagtatctctcctcggagctacaggtgccagctcttgtggggatgtcctcagccatgtgtagagccagagctgatttattccatctgtccttgcccagccagaggttggacatctggctataggcaaagccctcccagaaactagggaatgaggcaagcacttagcttggggagcccaggagacctatgaagagaaggaggcagatgtcagcaagcaggctgtctgtgtacttagtgaggtggctttgagctggagcctgggccaagccagggtggggatcaggtgtgtggatggggccaagcctaggaatagtgctagagcagggacagggattgggcagagccagggactaacacatctgagagctcattgccaacttgcttagccctcggcccctgccttcttccctggtaggcatcagactcagcttggctcttctcagcccccactgcagcttctgatcacagagagcacagggcagtgatttagggagacacactagctctagaatcagacacatgtggattcatgtgcccactctgccccttacgggctccgctggcctcgggcgagtcatagcctctctgaacctccctttcttctttggtaaaattggggtcatcaatgcctgccccccctcccagctgtggtactgacactcttctccccagggacagagctgcccagccctccgtctgtgtggtttgaagcagaatttttccaccacatcctccactggacacccatcccaaatcagtctgaaagtacctgctatgaagtggcgctcctgaggtatggaatagagtcctggaactccatctccaactgtagccagaccctgtcctatgaccttaccgcagtgaccttggacctgtaccacagcaatggctaccgggccagagtgcgggctgtggacggcagccggcactccaactggaccgtcaccaacacccgcttctctgtggatgaagtgactctgacagttggcagtgtgaacctagagatccacaatggcttcatcctcgggaagattcagctacccaggcccaagatggcccccgcaaatgacacatatgaaagcatcttcagtcacttccgagagtatgagattgccattcgcaaggtgccgggaaacttcacgttcacacacaagaaagtaaaacatgaaaacttcagcctcctaacctctggagaagtgggagagttctgtgtccaggtgaaaccatctgtcgcttcccgaagtaacaaggggatgtggtctaaagaggagtgcatctccctcaccaggcagtgtgagtcagctgggctgctctcagcatggggagggagactgggagggcctggtgcaat

SEQ ID NO: 2544 - DNA, 9806 bp, Homo sapiens
actgcctctgaagcatgcctgtggaaagcactcttttcaaaaaaaggtgtttggggaggagagagatgcagaggatgtttttactcctttgggctcacatacagaccaaccaatactttttccagttcagcatctccagagcttacgccttggtgcctaaagcacctccaccactgcctccaaaaaatgtaccagctaccccaccccgaacaggatcccccttaacaattggaccaggtgcatcatcccctgctcgaccagccactcctttggttccttgcagaagtaccactccacctccacctcctccccggcctccatcccggccaaagctacctccaggaaaacctggagttggagatgtggtatgttcccttctgccctggcttgctcagaaacagtgagaatgacaaacagaagctccaaatgccttcaggtctaagcgtttagagaactcgtacaaacaaccctgacaggtggcatctgaaagacagtcactgcggtatgagtgtacatttcaaccctcctcaaatttctaccatctttcaagccaaggtctaaaatgacaggaatggtacgcttggacccttacctctgctacagtgggttagatacaaatgacgatagtaacattcatagaaagagaggtgtttcacagtatttgtctgatattagaaaactccaagagagggcaaatcctggtttctgatcccagaatacagatgacatattgattgtaggcacatgatgtgaatatacagtgaaggagtggtggcttgaggaatttgttgcagaagtttcttgccttgtgttttaaggctgaggagtggaaaacattctgtgtgaacaattaagagagacttgtggcagaagtagatttctttggcatttgcacacaggagtcagaaacaaatgatgtccatagcatttggctgggctaacgtctaaagtcgttagctttagacgagtatgagttctcactctgtgttacctgctgagtccctgagggcatgtgagttcagtcctgaaacagacccactgaccgtgtcacagatcccagcttcgctaagctcagctttagcatgttatggtttatcgtttctccagctccattccacaaactctcatatagatagaattaatttcagtgtaaaaatggtgtcatctattcttcagatacctaagttgtcatatctggggctgggagacattaaaaatatggagcaaaaatactgcaacctgtgtatctaacttttcatctcttttcttctccttacagtccagaccttttagccctcccattcattcttccagccctcctccaatagcacccttagcgcgggctgaaagcacttcttcaatatcgtcaaccaattccttgagcgcagccaccactcccacagttgagaatgaacagccttccctcgtttggtttgacagaggaaagttttatttgacttttgaaggtaagtagtgcatagcataccagattctaatttatactcctcctcatccttatttccccatttgcatttccaaatcccagttctcttcaaaagttctggtctcactttctatatgaaaatgctatggctacttagaaaatattaaacactaaaggaaatattacatgaatttggtttgtatatgatcttcaattttttcacattaaaaaaagttcaagctaatttgcagttaatattggttatttaattaactatggtcaattgaaaataaaacaaaacaaaacacaccttttttggccaaggaacttaactctgtcaaccagggctctttcctaactcttttgcaaatgcagtgcaacaaatataaggacatttttggttggtattggtatttaacttgttttgggtaattaatattttagatgcaacatgcattattgtaaaatctaaatatgtaaatacattcttatgacaaggaatgctgtataagagatcagaaaaatcgggaaaagaaaaaaaggagtttattagtaagtttgttctgcgtctcctgaaattgcaattgagatgactgcagtaaaatggagaactattgctggacttgccatttagaagattaaggaaaatatacataaatataatgtcaaatatctaacctcattctttgatcatttgttatattctgcataaagggtaagcattcttctgttttatatttaagttttaatcatcttaacaggccagtcatttgattaaatggtacatttgaactaatgatgggggaagaagttaagtaatttaacttaatttatggaccatcttacacataaagatttatcacataaaatcctgctttctaggattttaaatagctacatttatcccaggatcaaaagttggccaaaacacattccactctagatttgaatctaaatattgaacttgtttttgtgtttcatggcaacaaaatagaattttcataacttgagtgtgtgttttaatgcaactttaaaaatcagaatggctgatatacataaatagtttgtatagttgtggcttttttctctcaacaataaattttgcttgcaagatagtcatagagatagaagttcttagctagaacttatccagaaatagcttgggtagtattaggaaagatggtctgatttcaaatttctcaaacatcctgatttcctgaactagcctggtcagaaggcaggtgaataagcagtcttcaggagaggatgtatcttctgcacatgaagtcaaagccttcattgccttgggtcattaattttgtgataaccaagatgcaaagtccacaacttgtgacctcctaaactttctctttgaattagatgaaattagtaagtgcccaggtattttttactaatcagcatgttgccaaagaagaaactacagttgcataagttggtaatcctgaagtaaagcaatacctgcatacttaaaggcactttggttccatctggtcacaccagatgatgcagtttaccttcttttaaccaggaaagtaaacaaggcactttgccaaccctcaaatcattgtctgggctcaacaacaaaaaaacaactctgacagttttttgttgtttgttttggctagtgtatgtgtcagcttatttgtttatgctttattgtggacctcttttgagagagagagagagatcttttttgaagaaaccaatctaaagacatctttggttgtctgttttgaaaatacatattatcaatcaaatataaatatttaataaatgtgtggaataacatatcacattttatgaaaatatatttgtcagtagatgtctgggtatttaaagttggtaacattgccattctaattagtgagacccaaattccttaaacatctcaatttgggccaagagaagtcatgcaagaagcgttttaatagaaattaattggaatctctagtactgtattatcttaatcttggactttgttcaagtttaagtataaagaaggcttcttgaaaggatgtgtgaatagccatatcatgaatgttggtgtcactgtttctctcgctaaaaaatgtttatgcagatacaagtatattcaaatgcacttcaagggaagccttagaagaaactaaaaatgatgtcttgctatctgagcaaaaacggctatattttttaaatggagatttgttttcatcatgtatgtacgctagactcgggtatttttagctagtaaaacctagaagaatttttttaatttttctgctgtgatgataaaatgacatagaaatggtgacattttaatttacctcgagagtagtgcccccacctaaatttttatactgcaaaaacattttccttcaacatgctttattaaataggatttctaacatattcttgtagggcactctggttttacccacatttgttattattaatattaattaacattatctttaattcttcattcagggaatgtagaagaagaaagattcccacttcaaaatagtcatcagttccaaatagcttttcaatttttatttattgacttctaaatagtatttttacagtgttcaaaacactattctgtcttgttcatcattttgttcttacaatgctttagatatcattgtcagtcaatgtttgagctactgatcaaccaatcaactaagtggcgtatgactttatttgaggataacatgggtgcttcacacttccaaatttaagttaataatagagatagaaaagtgttagtggttctaattctcgagtcccagtgcttttctgaatgttttacttttagaaacagcttcactgaaatattaatttatgataaaaattctatttattttaagttgggaaaaaaacagtaaagattgcaaatggtgatgactttttttttttttttttgagacggagtctcgctctgtcgcccaggctggagtgcaatggctcgatctcggctcactgcaagctccgcctcccgagttcaccccattttcctaccacagcctcccgagtagctgggaccacaggcgcccgccaccacgcccggctaattttttgtatttttagtagggatggggtttcaccgtgttagccaggatggtctcgatctcctgatcttgtgatccacccgcctcggcctcccaaagtactgggattacaggcgtgagccacggcgcccggcccaaatggtgatgactttttaaattcatcaaagactgtatcctattgaagctatcaagtattctgaggtgggagggcaagatattttcatgacaaatattaaatagaagatatgactgttagctatttgagcaattccctagagtatttgaacatcaagatgtttccagaaatgtactgcacttctccttggttagcttttttaactacaaaatcatctcgtatgtggtggtgaaaaacaaacaaacaaaaaatctgctaccttaagtacttaagtggcctcgtgtaggaatataagctctgtcatctactcatatagcctcttacatctcacacactctcatctctagactctctgcgctcctgtttactcgtcttttcccatcattcccaccaggaatgccacatccctagcagtacccttttctacatttcagtctctcagctgaacttgcccacgtgtttcctgacgaaatcctgactcttaggagccatcacttccatagcactctctatggagacctctcttcagtcttctgtggatcgttcatcatgggactaggaggcagtgtttggattctcttagctccctattgctgcttccaaagccttcctgattgtgagagcagccgtctgataattccaccctcttccactccttattgctgttaacagttgactgcagagcagtcctctgcatttatcttagaggtgctggcagcttgcgtgtcatcctctgtgccacctcacttcccagcatcatcctgtgacatagagtgtacgtgtgtgacctgtctcacatgctggctccagggcctcttgatttttgctccaagaagctttctctccactttactcggtactccacacctctggccacatcctggaagtcattcccctggcaagtctcatttcagctgtttcatcattaagaatttgtcaccctttttgtacaccagggactttatgaagcaatattctttcattcaacaaatattaagtgactgcctgctgtgtactagcactgtcctgggcactccttactagtgaacaaaacagaaaaaatacctgtccccacagaggttatgttctactgtggaaagttaaaaagataaataagtaaaatatatatagtatgaatattgtaatgagttctataggaaaaataaaataggaaaggagaatggagcatagtgagggttgcagttttaaattggggaatttgaggttgaaaaatgaaaaataaaataaaaataataatgaatatgagtaactaacatctgagtatttaccatgtgtaaagcagcctccatctattatcttatttcacctgcacaactcactgatgcagaaactgagattcagataatgtaagtaactttcacagggtcacacagtcaaaagagacagagtggtggagcgcagtggctcacgcctgtaattccagcactttgggaggccgaggcgagtggatcacctgtggtcaggagttcaagaccagcacagccaacatgccgaaaccccgcctctactaacaatacaaaaattagcagggcatggtggcacgtgcctgtaatcccagctacttgggaggctgaggcaggagaactgtttgaacctgggaggtggaggttgcagtgagccaagattgcaccactgcactccagcctgggtgacagggtgagactccatctcaaaaaaaaaaaaaaaaaaacagagtaatgattcaaactctggccacctagccagaggtcactacctcaccctactgtacatacctaatctcattcagtccttgcaacaaaggttttgccctaatcttctagccttccagctctctaatttcctgatactacaccttatttttcccttttatttttagatgacagctaataattgtcctatttataggataccaaataatatttcaatacatgtgtactatgtataataatcaaatcagagtaattagcatatccatcatctcaaatatttatcatttttttgggttgtgaacattcaaaatcctctttttggaaatatacaataaattattgttttccctatttaccatacagtgctatagaatactaacatttagtcctcctatctagttgtaattttgtacctattaaccagcctttgaccccactgagacctctgtcctcacgttcttcctgttctcagtccactaatccaggtggagatattcaagttcttttcattatccagatgagaccccagagaggaaaaatacgtttctgaaaggaccttaatcatttacataataggagctacattttttctttttggagttatattatctctgtgaaaaaaataaacgcttgggcattttaaatgtctgaccttcttaagcaggttattaaatacccctacttagtcattggcaagtcacaattatagtcatagagcattcgactttccttaccctgacatagcaataaagtaagaaatgaactggtcaaatttctcacatgcagccacaaagatactaattcattcatttgagagacactaaaggaaggaaaattggaagatatgaccaattttctggggagcaatggctatgctaaattcacattattcttaagtgggaggtgtttgctaatagcacttaccccactgaaggcccctttcaatcaataacaggaaaattattaagtacccactctgcaaatcacagcattaagtaccaggttggggaaacaatacagaaacattaaaagcagttttacaagactgtcttcattagaaatattaaaaccacgctccttagctattctgagtttttatatatggactgtattgtctatctaaaatgaaaaattcattctattaaaataactgaaggtcacagagagttttttttaatagcctcaacctgttaagaagattaaagtggagctgaacctgcaaaatcttctatcaggcagttctgccgaggatttcagtagtacactttacctcttcataataaattagttccctggttctgaaaattttgacattgaccagcatgatgatcatacttggtttcctgctctttgagacagttgtcctgtctcattcatgattagtgtacaactgtcatgctgatgttagaacagaaagccagcaaagtgtcccctgtttctggcctgaggtctaggccaaaatggaaggaataggcttctagagaggacataaatgtacagaattcatgttagaattctactgatgggaaagctggagagcaggtgtgttaccttctattccaagcatgtcaccatgcaaggagtacctagttggtgaaaatatcattttgcttggattcagcatatctggggtgctgctgtttttaccagtaatgctgatgcagtgtatcgctgatgagcccttaatacgggctacattctgagctagctactccacatgcacaagctcatgtcattcacacaacagtcctaggaagtgggtactattgttaatcacattttacagatgagtaaacaaaggctctgagcatttaggtaacttttctgagattacacagctagttggtggttaaatcagttagaggggagttattgataacacagctagtcaatggttaaatacgttgaaagggagttactattatgtcacaaaactgatgttcctaaccactatgctactcaagtcttggttgtgccactcaataaccacgtgatcttgagcatttaatgtctctgggtctctgttctatcatttttaaaatggaaagcataatacccacctggcaggataattaggaaaattgataagatgcattgtttttgtttaataaagtactatacatatgaaaggttttaaattatccatgctttgaagttgcattcaaattaaagaagaatgaaaggaagagaccaagaaggtattgcatccaagatgcatttgtttctcatttctggtaacttcctggtctctaaagtggcctcttgggtgtctggtggtgactatacttagaagcttcttgtatctctatcagactcactgataatgtagtttcttcctcttatggccataatggtccaaaacacacagttgtttctgaatatgtctgtcatacaaaggccaataggtttaaaatagataaacattgggcaacatttgctttgctcaagattgaagcctttcactccccagagaggaatggaaccctgagtgtcagctgcacttccctgggtgcaaaagtagattctagaacaggacttctcatctgactggagtaaccaaatggggaactaacaagaacagcggaaagtcttgagccccacaaaaagaagggttgctatgcgtggacaattttaaaacctgaagcataagttaaatagttccctggagcaggaaaatgagtaacagaatagaaaagttaaagaatattcactcatttatttttgcattcagtgcttcacaaccagtccatgagctcttctagctacaagcccttgtgctggaattatggaggtgaaataataaaactcctgccttccagtaattcacaagaaatagaagaatagaagaaagagaagagttcggcacttcctatgcaaagcatcctgtagcaaaggcaatggtagaattgcaaaaatgttctagtagggtgatggaagaaacgggagcaacatttatacctacatagactctaccctgaagcaatataacatgttgctatgttagagtctaatagaaaatcttaggtgatatgtaaatgttaacctaaggtatgcttggtattatcctagtattagaaagattcctcaattaatgcatatccatttgctctcagtacacatatacatacatatgcacacacacacacacacacatatagagataatagagaaaaagatatggaatatatatatcatatatatgatatgatatgtatcacacatatattctatatcatatgtgtgatatgttgacatactgatatagcatacatactatatattgtatatcagctatatcacatttatatatgatctatatcatatatattatatatgatcataacctacagtatgatatatatcataggttttcatatatgatatataatgtttttgtatatgatatatatgaaatatggaatatgaatgatatatggcatatc

SEQ ID NO: 2545 - DNA, 9489 bp, Homo sapiens
cttaagttttgaaagaaggaaagaaagaaagagagacagaaaaagaaagaaagaaaagaaagagagaaagaaaggttgctgtagttagagtcagaagaagagtttgttgaagaagtagaatttgttgaagttgttaattctggtaataactgctaaccagctgctagatagaaaatatgaagagagaaaaatcgagccctaggtcaccattacttcactgtgcctctgacattagctcttcccccaggatatacatagtacgtattattatacagaagttattgaagtgtctaacaggctctttatgaaaacatactcagaatattcacatgtggtcttcacacatttggagatatgcttcctgagagaaaggaccacgcttctcctgtttaccatgctgtctcccactctagcacatccttcagcgatgctgaccggtggaaaccagagcagtacctcgtgtatactacgctatcgtaagctattataagcattgttctttttcttctcccacccagaaacctgaaggttttcttttccttactctgttcctctgtgagttttgagaatttctgtacctctcttatgatacacgatattactggcatagtgcgttcataacacttcctagatgctactcatatgtggcatgagccttcttaatcaacactaaactccttctaaactaaaaagcataatccctgttacttatatctgtatttaaagtggagttttccctgagttgtttctttttcttttttttttttttgagacggagtctcgcattgttgcccaggctggagtgcagtggcgcgatttcggctcactgcaagcctagcgggttcacgccattctcctgcctcagcctcccaagtagctgggactgcaggcgtgtgccatcatgcctggtaaatttttttgtatctttagtagagagcgggtcttaccgtgttagccaggatggtctcgatcccctgaccttgtgatccacctgcctcggcctcccaaagtgctgggattacaggcgtgagccaccgcgcccggctcctgagttgtttcttgtagatgaaacagtaatttcttggtctgcttatattattttgcaaacttgtcttttactttcacctaaattgttaggataaagtaaagatttagactgattattggtacagttgcatctcactactattgtactgttcactatttcacatatacaataagaaactatatatccctatattatatttgcctaaaggcagaaggaagattaaaggtaccatctaactcagtgtttgctcattatgctcattttcatgttgacaaacttctttatgaatataacaattattccttgatttctgcaactcatggcagcactaaaatagattacagctccaggtttatgttctgcttacattcaggacaagggctctgaacaattgcacatttccaggagaggagtttccatggaaacttggacaaaggcaaaacaaaataattcttcaaggcctatgagaaaaaaatttcaccttgctttttatttgcagttctgtgtcccctgagcagttcagccagcttgcagctgcccttgctctctaggaatccccgtttgaaaattatatatagcattatgcatctctgaaatctgcaaaataggatttgatgagtgtaaatgaagagttatttctctggaaggctcaaacccagaggtttattacaatacaatttttaaaagttaaagcatacatttaagtagccactgaatttatgaatatggaggtgtttttcaaattataaaatccttaaaataggcctcaagaagagagttttaggataaataaatggaatcagtgattagagacaattaggcatttcaaggcaatttgctagctgaaaataaagaccaggtcaaatgattttcggtaaatgtatggatcatatatcttgggtaaaaggaagtcagggggttcatataaagtccttcggagaatgatgtgtctcctgttggtttgcaaaatcctgtacagcacgctgtcttatttattcttgtatcttctatggcactaagcacagtatttttaaggcactttgggggctggatgggtgtagtgaagagcattcaccatctccctcaagagtccagcatcacagtcagaaacagagtactctctgcttcctaggcaaaactattgacactatttaataacttcatcatacagttcatattttatcgaggaacctgccccgatagtcacataggttcttttctattttccctaagcatcggccggtttgagaaataaagggacagagtacaaaagagagaaattttaaggctgggcatccgggggagacatcacatgtcagtaggttccgtgatgccccacaagccacaaaaccagcaagtttttattgggactttcaaaaggggagggagtgtacaaatagggtgtgggtcacaaagatccgtacttcacaaggtaatagaatatcacaaggcaaatggaggcagggcgagatcacaggaccacaggaccggggcaaaattaaaattgctaatgaagtttcgggcaccattgtcattgataacatcttattaggagacagggttttgagagcaacaggtctgaccaaaatttattaggcaggaatttcctcttcctaataagcctgggagtgctgtgggagactggggtttatttcacccctacagtctctaccatagaagacggccacacccaagggggccatttatagacccaccctcaggggcatattctctttctcagggatgttccttgctgagaaaaagaattcagtgatatttctcccatttgcctttgaaagaagagaaatatggctctgttctgcccggctcaccggtggtcagagtttaaggttatctctcttattccctgaacaattgctgttatcctgttctttttttcaaggtgcccagatttcatattgttcaaacacacatgctctacaatttgtgcagttaacgcaattatcacagggtcctgaggcgacatacatcctcctcagctgacaagattaagagattaaagacaggcataggaaatcacaagggtattgattggggaagtgataagtgtccatgaaatcttcacaatttatgtttagagactgcagtaaagacaggcataagaaattataaaaatattaatttggaaaacaaataaatgtccatgaaatcttcataatccacgttcttctgccatggcttcagccagtccctctgtttggggtccctgacatcccgcaataatatttcactttcttttcgttattgagcttaattgtaatcatattcagaaacatatccactcttcgatgcattctttcaacaataacttctgaataatataccaagtactatgccaggaatgtgccctcaaggagtccataaagggctgctgactttaaaaaaagatgatacaaaactaaagaaaaacacagacaacaaaatgtggttactgtactctgtaatatctcataatgttgaggactgtcatgggttttatgggtgtccagagcaggggcatgtgactcagctcagtggtgcctgtcatatgggggttagatcaggtaaggccttcacagagaaatgtttgttctcagcgtttttgttgttgttgttgttgttgtttgtttgtgacatggagtctcgctctgtcacccaggctggagtgcagtggcgtgatctcggttcactgcaacgtctgcctcccaggttcaagtgattctcctgcctcagccgcccgagtagctgcgactacaggcacatgccaccacacccagctaattttttgtatttttattagagacagggtttcaccttgttagccaggttggtctcgacctcctgacctcatgattcacctggctcggcctcccaaagtgctaggattacaggtgtgagccaccgcacccggcctgttctcagtcttgaaggatgattagatgtgaataaggcattcaagcagggaaacacattcagagagaggaaacatatgtaaaaacacaggaacatggaagaatgccaatgtttcaggcactgaacattgggtttaatgtaaggagtaatgggcatgagcttgaagaaggcagaagccaggtcctcaaatgcctttatgtgaagttaacaagtgggaattttatgctaaagatagggaacccagtgagttatctcagtgaaagaagggctaaatctgtaccattgtcctaatttaagtgttaggggcagaggaagtccgtaatagaagggagaccagttacggggcaaagaggcaatattgactccctatagtgagggtcaaaactacagtggtatagacaacatggaagggataaggagatctggaagatagatgagcttggtaaccaattgtttcggcagggtataaaaaagaggaaggactggagtggatttcaaatttctaatgcaagtgctgggaaagtggtaatactgttaagtgaaattagtacaagaagcgaaaacaaaaaacaaacaaaaaactccataaagattataaagatttagggtatggctttagcctgactgctcacctgacctcaaacaagattcttaaccactttgagcctcattcctttgagatgatcatgtgggattgtttggaggattaaatgagataatgtttacaaaacattcacacatttgctcaatctatattttctgagcatttattgtgtaccagggtaaggggttcagagttcagaggtgtttaagacaaagtttctgctcttataatatatctgttgtatgtatgggaagatagacataaataagttaacaaataaatgagtaaacttcgaaaccccctctctactaaaaatacaaaaattatccgggtgcagtggtgggcacctgtaatcccagctactccggaggctgagacaaaagaatcgcttgaatccgggaggcggaggttgcagtgagccgagatcatgccactgcactccagcctgggcgacagagccagactccttctaaaaataaatatataggtaaactaattatagatttggaagcgtgctttgaaagaaataaaaatgttgatgtgacagttacagacagggttgagagttctactttttgataagttgttaagaaaggctaaaacttgcagggagttattcagtcagagacagctaatcatagttgaggaacagcatccgaggctgagaaaaccacaaagactctgaattgggaaagaatttggaaggacagtacacacctagcaaatccctaaatataataaacacacaataaataatagatattatgtttagaaacaagaagacatgtattgattatatgccatggaaaactatctgaacaaaatacctaattcatttattgcatacataatatagtcagaacaatatttaaaattgacacatttgcaaatgtatctttatatttaagaacgtgaatacaattgtaaatggagtgaagggttgggaaggagttctctaaagtaatattgaggtttatggactaggaattcttgtagggaattgtgtgattaatatgcttccccatggtattggaaatatatttttctttattttccaattagttttttatttgtttgagtcagactcaaccttaacatcagtggatcctccaaagatgggagactacctttttgaagactgcaatccacacaactctatatagaaaactctatgttaactttcatgcttttagtagaaatctctattattagtcactgctgcatttttttctgtgcagtgatagaagatatatcatctatttttttttttttttgagatggagtctcgctctgttgcccaggctggagtgcaatggcgcgatcttggctcactgcaacctctgcctcctgggttcaagtgattctcctgcctcagcctcctgagtagctgggattacaggcatgcaccaccacgcccagctaattttttttgtatttttagtagagacagggtttcaccatgttgttcaagctggtttcgaactcctgaccttgtgatcctcctgtctcagcctcccaaagtgcagggattacaagtgtgagccactgtgtccggccaatatatcatctaaatgataaaaaaatcactcaatatagattgtgttacattttttaaaaattgcaaatgtcatatgttatacagggaaattattaagtaactatcccgtcctagtgttcaagtgttatgtctgagagtttgctgttttacatgcaaaggaaagattataaacaacttctgtaccacatcaacgaagtcattcaaatttgatattaatcctagttaagcaatttgcctggcattcatttgatttgtcttcttaaactagaatgcatagtaaaaatgggttgcaaatatttggtagttataaatttaggattgaaaatatagaaacattaaacttagactgatgtgttaaagcatgttgataatatcaattaaaaatttaaatgtcaaaggaattaaccaaaaaagaaatagcttagcagacgttaaaaccacaaaacaggaataggactattctagaattcaatgaatgacagcctccacgtctgttcagagtgaattctaacaaatagctaatgaatataaacagtctatttaagtgctgctggaaaattccccttcaaccagcagctgacatgactgttgtcattcaaagggcataagcaaatgtcaaataattgaatcattgagaaactgagatgacaatggcctacattctccttaatgctttttgaaaattcttccctgggctattcaatagatgatgtttaataacggtattaagctaaagaaaaaccacgggaagtcaaagtttaaatagggcttaactctttaattggagattcctcagggaaattggctgtggctcttgcataccaggttgagtgtgtttctgtaaaattgcactgataggatcctgaatcaccatgttttatagataagagaaatacaaacttcacatgaaacaatgtggtgctccaatccagtatgaagattgtcatatcctagcacaggcagcgccttccaattcttttcctgccttcctataactgagtatgtgtgtccttaacatttttaaaggaactgtaggccagcaaggtgctctttgctagaattaaggtccatgttctccttgtacccccatttcctgtttcttcatttgccgttggcttttatctggttttcattaactcagggacttacatatccattcattagttggcatcttctagcctgacaccgtgactgatcttggatttgcttcttgattcttcctttgtctcttggatccaatataactatgtgtctttggaactaactccacacatttttctgtttttagtcttgctacatcctgctctaaggcgagtgggttataggtatatccagcaataccattctagaaaagacaatctttaataatagaggctctaatgccaaatcccatgcatcttttagtaacgaacagaaataacttctacatccttcaagtttaaaaatattcatagcagattctcagaattttaatggttactcagatttgagctctgtggcataaattgtccagctagtctgtaggagcaaggcaggttattgcatctggaactatagcaagacaacaaaatcgattattctagatgtaatctgaatacttctataatgttcattaaagatgtactttaattatgaatacaaaagttaacattaatttgcaaacattgcaataagttacatacagttgatgtgttaatacaaactactaaaacaagttattgaaaaattctctgggaattcatgaaatgatctttgttctagatcaaaatatacttgtttatcctagatgcatgaaatgtggtgatgatgggataaatctgattccaaagcccacacattaaaactagcctccctgttttagtcatatatcaaatatgtccagtagtggatacttttgaggctccccccagaggctctggatctcctttactgggtataaacacccgttgctcagctcctttactcatagttttgccactaacagctgttaccagcagccctcttccaagactatctttgggctacaaattgctttacccagcagctgggaggcagggttgctggaagtgcctgggaggctacccttctcaggtaaaaggagagattaattctgcagatgagtaccatagacacaacattaacatgagtctaagaagcacatctctcacatttttacatgttttaactgggatgcaacttataatcgacttgttctacttcaagtggtagtttactttgtacacacaataaggatatgtctgatgtttgatggtgagttagagtcaatgaaattagggactagaaaagagtgaacaaaaactgtttgaaaataatcatgaagaggtttaggaaaaaactaacatttaaactggtaatatgtggaagtgtcaggcaacccatcctatcgttttgcaagtatgctatctggaaattaaggccaatcgtagtttaggtaaaagttaaaggaagagagcaacatttaacagggatcctactgtgtgtccagcactgaagtaggttctctgcctccagcaactttttcatttcataataaatttttgggccaggaggtgacataatcacaaggaaattttttgaagaagatccaggcccaaatcagatgcttgagaatcactgcactgattggcatcaagatggttttacaaccatctgcttttgatgacttctattttcccagcagccaaacccctattctaggcaggaaaatcattagctatagaggaggcagatctgggttctcatcctcattcagtcattgggaaaccagtggtcaccaagaattggactctacaaatttggcttcttatatacatcctttccaggaccaggaatggcctgaagtgggagagaacctgcagtttggaagtagagagatgcaataataggtagtcaggcagaacatctttggggtctttaatctgttcatcacaatataaagtgctgtcttcattaaatctagtatttgagagattttttctatcaaataatgtttaatcataacagtccatttcattcatctataactgtcaaatggagctactgggcagcaaaaaatagctaagagtaccactttgaaggccgggcacggtggctcaagcctgtaatcccagcactttgggaggccgagacaggcggatcacgaggtcaggagatagagaccatcctggctaatacagtgaaaccccgtctctactaaaaatacaaaaaattagccgggtgcggtggcgggcgcctgtagtcccagctactcgggaggctgaggcaggagaatggcgtgaacccgggaggcggagcttgtagtgagctgagatcgcgccactgcactccagcctgggcgacagagta

SEQ ID NO: 2546 - DNA, 1615 bp, Homo sapiens
gggctcctccctgcctctcagcagatcgcttcatgcctatcagcctgcagcacattcctcgcattctaggattgagatacacagtttggttcttgtgagggcagccagggctggggaggagggcagagaacatcccagagatcaagactgctcttcttgctccctccccgactgacttggcccacactgactggcctgccacccctttacagtgatctccacccagtctctctctgcaaaggcctcccttggctctctgataaagttggagctgtgggtgcagcatttcacttggacctagcagcatcaatgagccagctcctcactggggaacatgcaaacccccagctgctggtgtgcaggaaaagaatccaggagatcacctgatgaagcccagcattttacagataggcagtggagcaggggaatccagttgacactgtggctaaatttcagaaaacctcccatgagatcttgcaaaggagatggagaaaatatggctgaatgccagcaaggtaggacggaagcatgactgctctaacaaccaagctcaaagagcactgctcacccaatgtttccttcatgactagagcaaagtggtgaaaggaccctggtgagaggcccaaagaacaggaggtgtgagccaagagaaggtcctgccaggcctatgttgcaggctatttggaggctgaacttgaggttgacgcagaattaactgttgcatgagatgtggggtatgagagaaggcctgagtacctagaaggattgggatgccatgaactgacagaggttgtgtaatagtgtgatataataagaaatacatggtgggcatggtggctcaagcctgtaatcccagcaccttggccaccactgcaggaccattgcttgagttcaggagtttgagaccaacctggacaatatagtgagacctcacctcaaaaaaaaaaaaagaagaagaagaggaaatacatatttgatctctgcccctggttcttgagacagagctcctaaaacttttatgattccctaagtgacaagatcacctgatgcagagctcctaaatcccttggaatttcctggaggacaggagcatcttttgttctaaaggtcactcttggtggactcctcaatagcctcatgatgggggctggtagccaggggaatcaaccgtgtgattacagtagaactttcaaaccccactgacctgacctctggggaagagagggggtgctaaagatgagctaatcaccaatggtcaatgatttaatcagtcatgctacacaatgaagcctctataaaaccccaaaaggacagggttcagagagcttcctggttgatgaatcagtagaggtgctgggaggatggcacacctggagagggcatggcactctgtgccccttcccacataccttacattatgcctctcttccatctggcgttcatccacatccttttgtaatatcctttataataaatgggtaaatgtaagtcaagtgttagtctgagttctgtgagatgctctaacaaattaatcaaacacaaagaaaggatcatgggaacccttgatttatagctagctggtcagaaatacagatcacaaccaggggcttgtgac

SEQ ID NO: 2547 - DNA, 12625 bp, Homo sapiens
atagctcagctcttagaataacagaatttggtcccctcccacttccgaaatccatcactatgattcagtaagtaaacaaattcaaggtgtcacatcatattgctttttatgcttttgattttagtaatatcctttcacattcataatccagatagagagataagcaagattgtatccaccaagcctcctctttattgatcttccaaactgaaaaacatagctgccattttagtcagcagttaaactttattatagaatatttttataccttttctgctaacattacctgcaactcccatggtgatgctcaaatcccatttgggaattcagtgaactagcagaatgaaattctaagagactggggcttgttgatgtgtccacgctttccatgggaactgatgttaaatatttcacaaataccataacttccaggaattcacatattctttattgaatgtagaattgtgaaatctttaagaaataactgaatcattatttcttcactgtctcctgcctgtgaaagcagaactatgaaatagctcaagggaatcagtgagagatttgtatccattatattcagtagcctgcatgtgtccaaatcacaaatgaaatgatgtgggcaaatataaattaaaattgaatgttgcagaagtggttgaggaacttcaccaggatacattaatgtacaaactgaaaactgatgaaaggtaagagtttggtcctatgtggtgtaaaggataggagcagttttgtggacatttcttcattcttctctttctgcttttccagacttctgaagagagatttgctaggaaaaataaaaagatatataaatttcagtgatgctgaaggtatgtgcaaacaaattgtcctcattaatagtaaaggtataaattgatgtggattttctagaagacaatttaaaggtacacacttggtttctaaaaagtacactttttaaaatctatctttttaatcccaatttatttacaatttattataagaaagtatttaggtaattatgcaaagatgtatgtaaagtaagttcactaattgttctcagtacaaaaaaaaggatgaaattccataaacatctattaagaaagacctggttaaataatgtattgtacctccatatgtttagtcattaaaaatggtcacttaaatctctagtgtattgacatcaaataatgtcaacaataaatttaaaaagcataactctctagtgtattgacatcaaataatgtcaacaataaatttaaaaagcataaatctctagggtattgacatcaaataatgtcaacaataaatttaaaaagcataaatatatagaaaaatatccctatctctatataaagaatgtctacatacccacttatgaatacatggaaacatatctgcaaggatatagtctaaaaccttatcggtagtgtttcttcgcagtagtgtgaaagaaatacagtagaaacatttaactccttccagtaatgggaaggagaggaagagctcacaaaaacagaaagcatatatttttgacattttgatattttaaatgtaatctcttttcttcatttttctggctacatatgttgattcaacacatattagtaagcaggatgtaatattcaataaaaacttctgtaattgtctgcattagttccaatttattcatatagaaactattcattttacatatctctttctattaaactaacatttagcatgtaaggcacagttttatttttgaaattattaataaattaaaatgttagtgacaaacataaactcttgagctttacaataggttaatgataaagaagacagccaatattagatggagaaaagcttcataaaacccacaggttagagaaaaattgttaggcatttaataaatgatagatcctttatattttgctgcacaaaaaccaaagatgaaaccttttttaaatgcatggtctcagcatgcatttcaaatcacatttttgaagtttatgaatttatgattatataggggaagaaaaaattctttgtttctccacccatcttagatctattggctggagctctgcaatttagactgacaaaagacggattaaacaagataaaaacaagtttattaacataggcacaatgcataagaatgggaactgtcactaatgtataactcaaatgagtggttagaccttagagttatataacaatctgaacaaggaataataaatatgttgagaagtgtcaggacaaaggaaaggaactttgggcttctaggggcagcaaattgtgggaaggtaaatttttgggaaaagttaatggaagatgttgggcacggtgtctcacgtctgtaatcccagcacttcgggagaccgaggcgagtggatcacccgtggtcaggagttcaagaccactccagccaacatggtgaaagcctgtgtctactaaaaacacaaaatattagctgggcatggtgggatgcacctgtatacccgctactccggaggatgaggcgggagaattgcttgaacctgggaggcacaggttgcagtgagccaagatcatcaagatcatgccactgcactccagcctgggtgacagagtgagactctgtctcaaaaaaaaaaaaaaaaagaaagaaagagagagagagagagagaaagaaagaaagaaaagaaagaagaaagaaagaaaagaaaagttaatggaggatgaggtctagttagtaggtttgttttatatactatgtagattcctctctggtgccttccttgggctggtagactttatagctgtttctggtgatatagaatcatcctgcccttcctgatagagggggaggataacagagagtttttctcgtgtcttcttgtgttttgttttgttttgttttgttttgttttgttttgtttaattgcctttgactcaaaatagtccttaggccagagtgacatattttggggtgacatcctctgaaccttttcaaatataaggtctgcctccttctttctacttcataacataaagtcttctttctcttccatgaatattacaattcctgcctgagtcttacaaggccctcctcttccctgtaggtcaggacacaattggtcctttgaattgaggtgtggtagtagccaagctttcaggagtgaggtttccacctttcatcttgtttctaaaagtaaatatctagtaaatgataaagctgtgtttttagttgtaagtctatggtgattgtatagcacagaatgattctaatgtattattttagcaatgaagacaagcagatttgatgcagaaatccttgacataaggagccaaaatatttatgttgcccttaggggatagatattaaatatatctacccatactaaactttttttttttaagagatggagttttgctgtgttgcccaggctggccttgaactcctggactcctcaagcaatcctcctgcctcagcctcctgagtagctgggattacaggtacatgtcactatgcccaactttcccaaattaagctttaacaaatcttctcaataatgttttcctaaattattcttgaatacagtcatgtagaacatataacaattatgaagttttaaaagtctttataattcaggaaattttgaattaataaaaacaaaggaaactttttgttttttgagacagagtctcattcggtctcccaggctggagtgcagtggcatgatctcgggttcaagggattctcctgcctcagtctcccgagtaactgggattacaggtgcttgccaggaaataaaggcaataaaaggtcattgctaattatctgctctaggtttaaaaagttcatctaaacttttcaagtatctttttttccctgaagcctacattttgttattactttagttggaaaacgactgcagtcaatgactcctcattccctcaccattctgacatgcactccagcatctctttgccattatttcagcaaagatagatataatatgctatagaagaaaaagagtagcaaccttaacttaagagttgagttcctattgtaaaataaagacattactgagactgggtttcaaacaaatatatttttaagctccactcctgtggatttttttgttttgttttgttttgtttttgtcttggtctctttgttgatcctgtcagccaatggtttctcacttgcctgtcagagctgaagagtccattccttgtcaattcagatgcgaagtggaacaaacgtcctttagtaacaaaacgaatccgaaatgaaaaaggatatgttactgctgactgtggtggttgtcaataaagatgttttcatagcaactattccttcaaaatacaatgaacatctgcaatagtcttttacccaaatgacaaattcctttcctactaaatcatgtctttacaaaattagaaggctctattttaaaccttgaattacttgacattgaaggtaatgctaattacaataaaatctcccacttacataattattaattcaaatttgcacctttttcctgaattttacctgcttagaaatccttatggtgctaatgatgaacataacgattaagaattttgttgctgaaatctctctatgcctcagtttaaccatgttaaaaattgataagataatacttaattgatagaaactgtgataataaaataacaccacaaatgtgattacaacagaacatggcaaaataaatgctagctaaatttttaaatcatggtttaaagatataatttgtgttactttaattaaataattgataaatagatttcttgccttgacattaaccttgagtattcatatttctgcaagtaggagaggaaggatgtgatgtctttccccatccgtcataagggtcatggccaacactcctataacaaaaggtaggctaacgagaaaaaagcatgacaaatatttaatcatgcttttacgtgacagagaagccttctgaaagaaggctcaaagaaccagggaaaactatccatctttatgcttagattcaatggagtggacagttgtgtagaaatgtgatcggacaaaggaagaattatctaatagtaatggactgcgtgtggaaacccataagaactgtctattctgattcttcttggcctctctgtgtggcatttcttcctcctgggtatggggcatgactccttctggaattagggtttgatgacctactatcaaataaggggaggtcagagaatgtctttatggccagctcctagatagaaaggcaggacaaggttagactaatcattctagcttttatttttggctttgaggaaaagcagatatggtttgtatgacccaccttagggaagaggaattccagtttttatggttcaccttgagggagaatgaggggcaaaagacatctgaatccttcacttcagggtatcattttctgaggctcaatatggacaagtatttataactaggtgcttaatatggccttttgagatacacagttcctatgctgcaatctcacaggcaatgaatggtctttataaaagtgtgttaaagttgaaaaaaaagcaacaaaacaaacaaaaacctgaagaaatattcctcattgaaggtccagcttacattaaaaagaaaactataataatttattctcttgagaagggttgtatagcaaaggaaaattcttgaatgttccctctgcttgccccatgcatcaattctattgatattaaagtaggcctagcaaatgtacttccattctcactgactcagtctttgtaattcaacaccaattctgaaaaatacttagaaattatttcagtaaacagctcttataagtgctacatgcataacaatatttcaatatcagagacttctatcccatgagaagatattttcaacctaaaatttattataaatgacctaacaaagaactattttttcagtaattggctattatggttcaatctgttatacccactttacactagaaactatcctatattttcttgttgcctacgtaaaagtgggcacgaaaaggttaaacagtaaacttcctgactcctgccagccaagggaagactactggtgttacctacgaagtgtcatggcattctcatttctgaataatgagggaaatctgctttcaatacaaacccccataagacagtcactcttccagacaaattaagctaaataatccatcatgacagctgagaagacaatgtgcaaaatgtcagtggaggccagggagagaaaggcagagatggactgtaagagctgcagcatgatgcaaatactgagaaaagacattctctgttaatacagctcttaattgtaggcattttttacagaacatattgagagtgaagcaaagcttccttagcagtactctgatgtcttctcagcaggataatgtagggtaattcacagtgaaggcaaggggttaggaaagtcacagccctaaaaatcaatgggctgcttacagggaagaaggtgcaacagatcttggagagcacagaaaagaagagatgagcagcctgtattgaacagaaaccaaaatattagttagatatatccagcaaagccattccacaagttcgttagtgagtaggtgccaaaagccaactgtaaatcctagatacttgtacatatgcatgcttatattacttatattttaagcagtcatatcctcaagctatattatgagttcagtcattctaaaaagatgcttccattgtcttcttggcacttactcagaatcttcagttatcttattcatactgtgtgcttactggttgtcttaacaggtgagggcaggggccctgtcttattcacctccatatctccaggatatagaatagtgcttggcacacagcaggaactcaataaatattcatactattttgagtcccttaatcctcatatcaactacaggatttagattttattgttatctccattttacagatgaggaaaatgaggaacagagaaattaagtaatttgcccaagctatgcatgaataagtggcagagtcaggatttgaagccaggcagtcaatccctagaatttacactccaacaactactgcctctagtggttatgtatgtatttatacacgtatatatttgcagaaataattgaaacttatttctgcctaggtgcatgatatattaaagcatcactaaatccttctgaatataattcaaacttcttcctaccatagacaaagtaatggcctatagtgaacataatgattatcccatcatacaccttgtactgtattagttttctttgcaatctcaattacacttgcatttttattatcatggttttataaaactttatgactggaaagtaccgtattcataaagagttgtgcctcatatatgttagacatatatgcatttttattagtaattataacttttatgcagccagatagccccaggtttatgattccacatcttttgtgttgtgtcatcttttgtagctagttgatattgtaatgtttgctgacttaattcattcagttattaatttctataaactagaatttaggggacatttcaatggactatggagagaaaataactgaaaattggaaattaagagcatctgagaaaattcaagttgtttgtacatcctggacataaatctcaggaaaactgacatattttccttccttgtcaagtcatacaaccaatgctatcactaaaactggtctaacatttaaacattcagacaatcagtttagtcaatgcttcaataagtttactgaactagcagtttcttaccaactagttacagaacagtcacagctgaaaatgatctatacattgtattataaatgggattaattattctgccagacaaccccaggtgtgccaaataacccaaccccttcctccaagacactcattgagaaactagacagcatctgagcattgtaggaacaaacactgaagtaaatggattctaaatccctttgagttctaaaatgctgtagagatctgagaagcccacaaccttataacagcaggcaacatagattacgcttaaaaagcaacatactttcaattgattgataaacccttttgttgttcatttattgcaaataggttttagagctcaattcacacttttgtgaataaacattgaaaatatttgattcaatggttatatttctgcctgacatgaggaaattatagaatctattaaccttaacaatttaattagcatgtcccagacttaatcactcactatctgggtagaattggcccaattagttaaccactctaaaccacagtttcctcatctgtaaaatgggatggaaaataataacaactcatagggttgttaagaggaatacataaattattcatgtgccctgtatggcacacaataagtccttattaaatgaaccggttgtagaactgtattaagaacaagtagtagtagcttccatatttagagagccatcaattctgttttccaacagctccattagtgagaattgtgctgtgtgttttccccccaccccgccccactacaactgcattgctatatgcaaggatataacttctgtctctaaaactattcaaatagtgagcctgggaaaaacaaacttaggtcaaaagagtttgactaaactggctgagaacatttaagttggataaaaatagatgtattttgtttgtataaatagattttggtcatgagaaagaaataaagaggttcctctcaaaagaaagcctggtttagcagtcagtaaacattgggaagagtcagcagttgacttccccactgtgtggaagaaactgccaaaagcccatccagaattaggtgtgtgggagggaagaacaaaggagaggcaaacaagaagctgtcactattcaccactttcaccttgaataacctttaattgaaaaataaagttgccaaaacaaggagtaaaagaaaaactaccattttattccctccttgagattgaattagagggaaacatactgaccacagtaatcccaaggttggactcacatgatggcaaatgtcacttagttctaaagctctaattagaaacagggctgaagttttagccagctcctgctactagaaataaaacatgaggcaacagcaacccaagccctggacaccccctgacagtgaactctgaggtgctttctgagtgagttgagtataaagctgacagagcctagagaattcatacttgagcaaatattgggaaagaataaactgggtcagttaccacctgtttctagattttatttttttctagacttcaactaagattgtctttcacattaataagaagaacgatgaacataatctatttcatccaacttctacattccaggcacagtatcaaccactttattacattttatcttctgtaatattcacagtgttattgggtagattaaacaacttgcccaagttcacacaactggtgactggcagaaatgggatttgaacttatttgatgccagaggaggtgtatcctttaatattttagaataacttatttatttcattatattttatgaaccttgaaatatgtttattgtaaaaaaaaaacgcagaaaatacagacaggctaagtaaaatgtgtctttacattaaagtatttaatttgcaaaagaacagttgttattttaaaatcctaccccacagtttttcatatttctctttctatgtagggttaatctcatcaggaatttctcttatccatccacagtttgtaggacaattctttgcacataatgggcactcaaatgtacgcagatcatattagtccaagaaaaagctgcttgttggggctaccaagccagcatggtaacaccttacaatcaccctttctacctgcagtcacattgttcccagagtggggtggtgatacttgccagctagcccaagtttctggatatagacctttaacaacttcacaagtacccttagaaaattcggttaagaccgaacatggacatgcttgctccatttttttccactctcaaaatatccttgagcagtaactcattcatagataagaaaaactttttctcttcagttttttcttttctttttgaatattctttgattttagcagaaataggcacagtaaaagaataaatataagagacgaagaataaaatttatgaaatttagaaagctcatgttagagaattgtactctttaggtagatccttatttaaagaataattagaggaaagaaaacaaaagatgaaagagtacaaatgagattcctgagcagttttttattttgattgataaacttttaaaatgtgtttgaattacaatatttatatatcaggaatatgaaaggtttaatcataaaaattacataatatttcttccaacattttcatcttgtccatttcttcatatctatagtggagaattatccctctgtaggcaagaagaagtctttattctcttcggaagctgctcctcttgcactccaaaatatagttctgatggaagctgccaatcactttatcccattcccagaacaggcatggtaccagactgaggtcaatcctatactccaccttatttgccatggaaaatagcctagcgatacttgcatgactcagggcagttggagtagtttgatggaattttttaaaccacagctgacaggaagtagctctgttccttattagttgcaaatgctgcaagcatatgaccctagagttatctgttgccagttgttgccttgtggagatcataggcttaagatgatgaaggcagcaatcagcaataagcagaggtgtgcttgtgtgtgtgtgtgtgtgtgtgtgtgtgtgtgtgtcagaatgagagagagagaaaaattactgcttctgaaaccaaatccatttccaaggtgtggttttagaagcaaataaattgccaatttcagagctgattcaagttgaatttttgtcctgtaaccaaaagagtcctgactaacagccaaaactcaggctgtcaagtaaacataatctgtaagaatccgctttccagcctccattccccttgacatcttcctgaaagaagatttgtataggaaatgctgacgtctctttggcaactgcataaaaattattgtattcaacaaatttattatatgtctctttgtggccaggcagcttgcttggcactggaaattggctagggagattggggcaagaaaaatacctctctccatggtggaggcatacataaaagccgattgctacacaactgcgtaagaagtgctttaatcaaagcctgaataaagtgttgtggaaactcaaaggagcaagcaaaatgcttcacatgaaagttggacattcgagtcaaagactcacaggattttcccaagcagaaaagaaaggagaggacatcatggacagaggaaatagcatggtgcaaaggcatggtatgaaaaaaatacacgacaaatttgtggaataacagaacttttgatgtgatcacagcataatgtggagttgggtaacagtgagggattaggctaaccagcttggcagaatactgactaaaaattcttaaatgctgtgctaagttgttagaattttatcttacaggttttgagaagccatctgcagctcacaactagatgagtgacacaatcagatgtgcgtatgcaaaaaaaagcctggagacattgaactaagatcaaatttaatgtattaaatatggtagaaagaagagagaatgaaaaataatgttaacaatctaggtgaggaattgctgaggagacaaattaagtaaatcctgtggaaggaaagaagaaaggaggaaagaggattggatggaagaatctccacttctcataggtgtagtccttccttagcctgctttttaatgagtgctgctaaagcccttagcctgcctgtttacccttggagtgaatccgtggaagacccccaaaagaggctgcagattcttagtggacagctctcatatcccctccagggaaaatgatgaaaaatgtcttcagaaaaatagctttatgaaggcaagaggactttttgcacctgcaagacatgtctgaaagctcctcaggtcaaaacacaagtagtcaagagatttgtccatctaattcatcatactactctgatccaagtgagacccacactgggtcagctccatcaaggagaagaacattccacccacgtttggattctggaatatcatccttgcttccatcagattcttgtaagtacctcacttggcacaaggtagacatgacgttcaaggaagtcaactgcgttgcccaagagtaagagaaggaatctctgaagaagagcaacttttcagacaggtagagtgtgccttgctcccaaggaaaagagttcttgaaaaaaacaaatgggaaacatggctacaagaaaactgggaagactgcaagaaaatctcagaatctgcttgagaatccggtccttcttcctccatacacccatggaacactcccaaactctgtatgctgctcactaattctgattaaggtcttcaccctccctaccttggaaattgctacaacataattgtgtttgtatgtataattaatatatacaatacattttaaatgaataactaaagttgacaaaaacctc

SEQ ID NO: 2548 - DNA, 17417 bp, Homo sapiens
cgccaccacgcccggctatttttttttttgcatttttagtggagacagggtttcaccgtgttagccaggacggtctcaatctcctgacctcgtgatccgcccgcctcggcctcccaaagtgctgggattacaggcatgagcaccgcgccctgctgcactcttttcattcttaactgcaatgaatgagagtttctgttgctctgcatcctcccagcattttgtattgccagttgtttgggttttagccattctactaggtatgcagtgatatctcgctgttttaatttgcattactgtaatgaggaatgatgttgaacatctgtttttatacttattgacatttgtatatattctttggtgaagtgtctgttcagatcttttgctcattttttcaagtgggttgcttattttcttattattgaattttgagagttctttatatattatggatagaagtccttgattagatacataatttgcaaatattttctcacagactgcgccttgtcttttcattctcttagcagtgtctttcacagtgcagaagttttacattttgataaagtccaattattcctttctcttctttcatggattgtgcatttggtattgcattttaaaactcattgccaaatgcaaggtcatattgatattcccccatgttttcttctagaagttttacagttttacgatctacatttttggtctatgacccattttgagttaaattttgtgtaaggtatgttatacatgtggaggttcatttttttgcatgtaaatatccaattgtttcaacaccattggttgaaaagacggtatgttctcctttgaatgcttctgcgcctcaattaaaatcagtttactctatctgcataagtctacttctgggctgtctactctctttcattgatctgtatgtctgtccattttccaataccactgtctttattactgtagtttcatagtaaaccttgaaatcataattctatagtaagtctaaaaaaatcacacaggttggaaatgcacaattagtatgctaaatcagagcaatcttgttgtttcagatggtttatgggagaaatattagccagtgtcttcacatgctcattgatgataactgtagcttgtaagtaactgtttcccagattactgcaatgatgcctgtatttcattccaattttggtcactttaaaatgattttaaaatattttctctgtttcactcaagatgtgaaatcattgtttctcagccttgccagctatttcaaaaccactgcctgtgctcggtaagtgttgcctgtgtcatcattattgtctggaccaaggtgatcataatttgatatctgagaatggtttctgctgcatagtagatggcaatgacaggaaacatcctgatcattcgtcctgaagactactttctgttactgctaaaatttaatagtattatcatcctgcctcctaaatttttacatcaaaataattgttaagcacaggacttagaaaataatttgaaaggcgatgtcatttaaaataatttttaaagtgattttgtagattcatagcactacactttataaatacctcatctgaagaaacctttgtgttagacgttcccaaatagctggcaaactgcccatgaaatgatctcagttacaaactgtgatttctgtgccttctcttattcatttaatgatccccttgtgtgttaactgccatggttcagcatatttcaaagggttactggggtctggttgggatgcccatagaatttcaaacagtctggatagcaccatcctattgcacgatggactgtgttaattaccttcacttcaatatggctgccagaggcaaactcacatggcttggagactgaggtctgtaattcaccatggcactcttacaaaatctgcgctaattctgaaatcacaatggggtttagtgaaaatttattttggttaggattctagccaatattgacttactgacattttgagtgatgcttcccataatttctgggtatttctggtttctgggggtgcacatacagctaagttttattcaacctgatatttagaaaatcgaatctctgggtagctcaagaaatccttataatttagcccttgaaattaatgacaaggctgggtgtggtggctcacacctgtaatctcagcactttgggaagctgaggcaggagacttccttgagtccaggagttctagaccagcctgagcaacatagtgagacctacgaaaaatagacaaaattagctgggtgtgctgatgcgcacctgcagttgcagctactggggagactaagatggaggaattgcttgagcctgggaggtggaggctgcagtgagctgtgattgtgcccatgccactgcacttcagcctgggctacagagagagaatttgtcttaaaaacaaaaagaaaaagaaaaaagaaaaaagaaaaaggagttaatgacatttgtttaaaacaattattgatttctaaagtggcaccacctaagttaccaaatctttattaagaatttacaatatgttctatacggtatggggtaccaagtttagctcagttgctgttaatgaagtgtctaccatgggttagacacagtcactaggtaccagggtgtgaatgccccagcatgtggctggctttgagattttatcatctcattagagtaaaggacttgtaaggggcaaggtgaagttgccttttaatatggtaagtgcaaatatcaggttagtacaggagccagggggagcacaaggaggtcagtttcccagactaagaggagtggggagtatgttcagggagggcctcctggaagagccaatatccgatctgcaggggttatatcacctgctgttttctcagaacttcccattgttctgagctcattgtttgttctctcccaaaagaaattacatcaggacaatatttctatcctgaacaaacacttttatcttctgactcatttatggaaggagatcctttctttgattatttgtgtacatactttgacttgttcttctcttgttcccaactccattttttcctgtttcctgcccaccagcctcatatacacacacatttgcatttaagacctgtgaaaacaaggactattgacttcatttttgtatctacaaccaaagccttgaaaatagtatgtactctgtacatattcattaaatttaatgtatttactgcatcatttcttgaagtacttccttgaaagccaagagctctgcgtgtatattaaagattttgcaaccctctccttcttatataaacataccgagaaactaataaaccaaagatatggttattaatatcgagaatcaagaatgactcataagtctcctctaacaatcaatgatgagaatctaaggaactgaattcagttcaacaaatattaatgcagcaccctccccccaacacacacacccatcctgcactgtgcaagttagattagattaggtgcctctttagcacctcacacggctcacatcatatcccttttcataacataatgaaattcttagtcaactgctttcctgattaaatttaaagcctgtgaagatagggactatctgtcttgtccaccactggcctgagtgtcccttgcaaatgaaggtcagcacaggtatctcatgttagtaatgatgtgttagcatcagcggtacacgttttgcacacttatgatttcatagtaacaaaatgggtcacatctgttctctcttaaatgaaggaatgtatgttcgtatacttaatgaatgagtgaataaactttagggaataaaaatatggggaaaatccacctgttaccctacaggctgttctacggggcaggagagagcaattttctggaaggtgtattcttttgagccattttctttaccaagtttttaatcttcttgaggatcatgattacctttcacttaaagtgcaattaaaatactgatataatacagaaaaatgccataagggcaggtgggaagaggaaaccataggaaatattagttaactaagtaccacgctgggctgaggggtcaaaacctctatagtctttcagacaaaaaggagagcactaagaactgctgggataaaagcaaaaacgaaaagtacccttagttgaggctgcactcttcctagttgtgataattcaggcccgttgtgggtatgggtgtgggtgtgtgcttatatatgcgcaaatgggtatgcagtgattagatactgcatttcctgtgcatggggatgaattatgcatttcttttcttatttctccaatctaggtttgtcaaaatttgacaaccatttaggaatgccttcgatgaatgtcctccatctgaatatctggaaattgtccaacttgcagtctacttggaatcaagtgttttattggaagggagtaagcgagtaatggagaaaaagccattttagtttgactatgtgattttaaaatgatctcagtttttccatcaaaattataatatgctcatgaaaataatattaatttgccttccctttgcaaacaccggcagttgaaaggaaaaggacggggaatgtgatggaaaagagaccgcctggaataaatgtccccctatgattctttaaggcagtggttctcgagcttgaattttcattaggaaattctgtgaggagcttgtaaccagatttctgggtctgccacatgcacctatctcttgctgaattgctttaatagaataatgagagcaagtttgtctaactaataccaacctgacaacttgaataacaataaatgcaatttgtacataaaatataatgctgcaaaagtttgtcattcacctcagtggagtgacttgatattaggtggtaaccgtagatgatggttaatatgaaaatggacaggaaagaagcattttctgaaagttatattcttttgaaccacgttctaaaccaagtttttaatcttcttggggctcgtaattacctttcactttaatgtcacttaaagatataacacagaaaaatgccttgagggcaaaatataggcaaaacaccaatgcgctttcaaatgcatgaaaatggtgcagttgtacccttgagccttgactcaagggctgtagatgttccctttccaccccccacacttggtgcgtgttcacaaagcaaatatggcctgtaattcaaatttgttctatgtgatactctctgagtaaaaactcatacatgcagaaaattgtctttgctcgaaatgataatgccaaaatataactttatatataatttgcatttagtacatttttggttaaaaaataaactaataaataagtgaagtcatcagcaaatttatatttgtgtgtgtgtatatatatatgtatatatatatttttttgagaaatcatggcagaacatcattcattgaagactgtattatttccctattgctgccttaacaaattaccctaaaccaagtggcttacggcaacacaaagttattgttttacagttctggagctcagaagtctaaaataaaggtcagcagagttattttccctctggaggctttagggaaaaatctatttccttgccttttttagcttccagtggctgtctgtattccttggcttgtggccccctcctccacctccaaagcacaccactctgatttcttacttccatcattacatcaccttctcctcttctgcagtaaaatctccctctacctccctctttaaaggacacttgagactacatttaggatccactctgataatccaagataaaatctttgacttaatgacaccttcaaggcccctattttcatataaggtaacattgatgggttcctatgattagaacctggctattttgggggaccattagtaagcttaccacagttgtatttgaaatagcctcgtgtaataatttagtaggtctgggatatgtcccatgcctttgccatttttacaagtaggttaagtgatcacaaagtgatccacaatccacgtgcatgaatgctttgaagtgggatttaaaatgaatttaatggagaactaaatgcatatggagcctttcatttaatacactattaggagaacttccattgagaatttctacatttcctttgtctatgtgtaacacacatttttctacagagtcatttgatttaaatgataatgtttttcaaagtaagatactgaaatagtactaactgtttacgtgcatataatgcttcattgttgacaaggacattttctccccggctgtataagcttactatggctacagtaacaagttaccacagatttggtggcttaaaacaatgcaaatttattatcttacagttttgggggtcagtccaaaatgagccttacaagggtaaaacctagagactgcttgcattccctggcccctggccccctcctccatcttcaaaccacttcactctagcctctgcttctgtggtcacatctccttttctgactttagacatcttgcctccttctttaaataatttttgtaattacatggggcccacccagataatccagaataatctttccattttaaaatccttaacttcatcccatttacaaagtccttttgccacataaggtaatctagtcataggttccagagttctggaatgcagatatcttccaggacccaatggctaaggccttccccagtgaaagcttcagatgagaggccggtgcaggacaacaccttctttacaaccttgcagaggacgcagttaaagacctctgcagaaactgagattaatgtgtgttctaagctgctaagcttgtgctaatgtcattacatggtgatagataatgaacacaacatccactgattctcctccaagtgtataaagtgtgttgctgtgcaaaatgactttaggacatgtcccctagcagtgggctccagccagatggttgctcttgagccccactacttggagtggagagtataaccttaatatcctgcagatccatctgtgacagaggtgcacaggacctgactagtgatgtgtgtgctgccaggaagacttgtacatcactggatgtcagctctctgccaatggccagcctcaatcctcttcagttctggcagctgtgaaacccagtatcaaggtgctggcatctggcaagagccttcttgctgcatcatctcatggctgaaggtgagaagatgagagaaggccaaagggaggaaaggggccaaactcatctgtctatcaggaacctactcccgagataactaatctattctcacaataataacattaattcattcatgagggctgagccctcatgacctaatcccctctttaaggtcccatgtctcaacactgttgcactggggattaagtttccaacatatgaaattttcaggtcacattcaaaccatagcatgcccttttaagaaccgaagaataaaaagagacgaaatcttgctagctgtatcaggagccctccagctgccccttccaacatcctcaccttcagaataaccactatggctgagtttatgataatcacctctgcatcttgctttatagtttttattaccaattacgtttctaaatactatagtatagctctgcctggttttatttgtttgtttaatatgcctattgggtctctttgaatgcataagttcttcctccctgacctttgaaatttgtttctttgaaaactgcatcatttgtcttgtagactttactccattggaattttgctgatcgcatgtctgtggtaaagtttaatgtcttccttagtcttctgtatttcttgccaactgaaagttgattacagaggcttaatcgttttttgttttgaattttgtggggaacaattacttcctaggtggtgtcatattctttgtcaagagtgacattatgtcattttgtgttgtcagcagccatttctgatcagtggttagatatctaattaattagagattgaaaaggatgatattccagtttgatcacatcttctttattgggaatatatctgtgcaaggaaacatctaccgtctgattgcccagtggttcagattttataggaaaggagagatgaatgcttgagtcttttcctgtatttgctaattttcaaaacaaaaagtttatttcttaatatcttttaaaggtggccaggatgctatgtataatcagcatttatatatatgaaggaaccatgtttaatatataaaatttcccaaaaggcacaccctccaacttccaaactctatatactttgtacctcatcaagatgctaaaaagattgagaaagtaaattaaagtatgggagatatatagataataactcaactttaaaaatttaaccaccatttattttttgagagcctactacctgtaagaactgagtcaggtacagatgttttaaaatatggtgcctgccctcaacaaacttgctctctaataggggaaacagggcattgcatgaaacaagaagggtaagaccatggggccaatactgatggaagatgctaaaggactgtagaggatttccactcacccactgtcatagctcagactgctataagaaaatactgtagattcagtgtcttacccaacaaacatgtattttttttcagaattctaaaggctgcaaagttcaagattgaggtgccagctgatttggtgtctggtgagggctcacttcctggtttgcagatggctgtcttcttgtttcagcttcacatgttggaaagaaagatccagtgtctcctcctctttttataagagaacaaaccccattcatggaggacccattatcataaccagatcattttccaaagtccccacctccaaataccataacattggggattagagcttcaacatatgaatcttatagggacaaaaacattcagtacataatactcagttaccaaaaatgtatgcctaataaattttagagattcaatacttctgaattgaacatcactgttttgacttacaggtcttttaacgccttttactagagatattattttgctgctctaaaaagtataaatggtttgtagttgttctagctcattcatccatgagttcaatcaatccaatcaatcattattataattgatcacctgataattacctggcacttcttaggaaccaaggattttttaagtgaaggaaatacaattctactctcaaggagcagatgtcatagcagactgggaaccagctaagcatgtaattacaagtgtcaaatatactctagagccaaaaaatgcatttctttgaaaacatttacaaggtcagattctctggtaatttagatgaattcttcctttgggttaatgggaattatggtattgtcttctctttttgagagcagagagggatgagacatgaagggagaaccaaagtatcagaaacaggtagtgaggagaagaaaataaaagaaatgattacagtggcaataagttaacagtaataggaaatacgatcactggggaacttttattctgtgcctgatcctgcccctgacaagttcacgttgcatgttctattaaatctcataacaaccactttagctaggcaggtgtgatggttaattttatgtgtcaacttggatatatcatgatgaaaagttgcttggtcaaaaactggtctagatgttcctgtgaaggtattttgtggatgtgattaatgtttgcaatcagttgacattaaataaagcagattatcctccataatgtgggtgggcctcattcaacacattgaaagccttaagagcaaagatggatgtttactaaagaaggaagtctgcctccaaattgcaatataaacattctgcctgagtttccagcctgtagagtcaagacagtaacattatctctcacctgaatttccagactgccatcttgccgtatggattctggacttgtcagctcactacgactgtgtaagccaattacttaaaatctctctctctctttccatatatatatagtgtatatatactgtattagttaaggttctccagagaaacggaaccaataggatgtgtaatatagatatacatgtattacatataatatacaaaaaatgtatatttataattcatcacataaccaatgggacatataatatatgtgattatgtataatatatgtgacatatgtaatatatatgtttataatatatcatatatcctattgtttctgtatctctggacaaccctgtctaatatagcagatatgattattgccattttatacatttaataacgttagacaggttgaataactttcctaagggtttccgaagatgataagtaagtgggagatctagatttcaaagccaagcctatctgacccacagcccttacttcccctactactgattgccgctgagaaggtcacatgagaggggcatggtgccttggtgatcaaaggctgtgtgagtcattctcgccagaaatgctaactcaggagaaagttttccatgaggtgaaacattaaatgaaaagagtcatctttcaaagacaatgatgaccttcaccttttttcttgtatctcagggttctcaaatctagtttcttggagaattggcatgaatgagatgcaatataaagagaggaattatctaacattgtccggtctgctttagagcctctgttcatagaggctgatgtagctacagagctcataaaaagagttgctgttttgttttggcgcatctactatatgccaggtgatttatcttctttgtctgtaatcatcgccaccatcctgctgaggactacccttggtttggtcagcttccacagtatgtaaacccacatcatctctgatgggatcagccagccgtccttcatcttgtaaccatgctgtatggcctccaagcttgcctggcgtattctgtcttaattttctctgactgggaagtgtcccttcgtttataggattggtcatatgacccacttatgcaaggtggtggagaaagcagggaagtacacgatccgtgtactttgacgagctttagcagctctgccacccactctcatttaaaagtgaggaaggcaaacttcaaggaggatgtattgctcaccctgagtcatacactgcaggtctctaaggcgcctgtgccactcacctccaccccctccccaacaccctcactgcaatgctcctccaagcaggtatctacggtagttacttcaaaacaactcagatgcaaaatgatctgcttgtgccgcaggagaggccaaccaccacccccaaaaggaatcccactactgcaaacacaatgcagcagacacagacacctgccaacttggcatactttgcatcaatgccacatttgcctaccaggctttgatgaagatctgatcatgtatttcaaaaaaaaaatctaccctactgtgcaggctgtatcccctccatctgtcccatgcagggtaaaatctgctacagctgcaagctacacctgctagagagccagacagggtaacttgggagtggagggcaatttagcaggtggatgctaaaagctggaaacattttgcaaaaattttcttatccttttgtagccttaaaggaaactttttaaaaaagaaaataagatgcaaagggtaaaacaaaggctggtgaatcaggacttgtactttcaatgcaaaatgaaattttgcatttgcattgtagagagggaaggtagtccctcctccagcccaggccaaattgaaacaacatacctttgtgtgggtgaagctcatcttcaggctgcaagggatctgctgtgggggagacagctgaaattcactgccggcagttccattttattctcattttcttttctctttttcagtaaaagaaaaggtcaagaaacacattctagagccttccgccttcctaatcttccttgtttcctctcttgctgtgtccttcgaagagtagcatcgcagtatagcatgatacttcagctctggagtcagaggagacctgggactagactgtgatccagctacttaactgctttcactttggacaagcgatttcacgtttctaagctttaatttcccagtctttaaaatgagactaaaatattacctaattcgtctaacttttatgagattaaacaagttcatgcaggcaaaatgcttaacacttaaaacagtgctagatcataagcttttctgaagtgggagctgcaattattattattatcattattattgtataataatagtagtggtgacagtagtagtagtatttatgacctctgggacaacggaaatttttcagttattaggtgagatgatagaaaggagagactaactgtgggctgaggcttagctgcggccgtgttaatctagctgaataaatacttcttccaatatttaacacaagttagaatggtataaaggcaaaaatacagattttgaggtcagatagacatatatgtagacttagacacagacacagactctggcagttccaccatttctagctttgtgatattggacctattagtcaacttcattgaccctcactttgctcatttataaaacagacctaatttcatgacttgtggccgtctctgaagtgcttgctgcagtgtggagtgatcgtatggctttattgtcatagagaagaccaaataagagaaagtaagcttatatagtggcatgagaaaagattggctttaaaaataacttctttaattcaattttctttattttgaaagtgactcaccatcattttatttaaataggaaggaaagaattcaaataagcaaaagagaagaaattacacatcatccctcaactcaagaatagccaaggccaacatcttgatgtttatccaagaaaattatcttggctgcaaggttgatgagatatgaaagcaggccacctagagagggggactttgggcctaggagctgccaccatctggggtcaatcatgtggccattgctctggtggaagcagagggctctaccagatgacaggctcaaccccctgctatgatttattgtaagggaagtgccatcagctgtcacactgcaccagtgtcatcccacttcccatccccaacctgggggcaagatggccacacaataagttagttttaaagacactttatccaaagggaagcaggacataaactaaaatctagtgcattcggtgtgtcttcccaccttccttttcttcctcccttattttttgtttcaactctcaggcctttgttagttctggggtccatgcagctcaggagctcacagtcaagatgtagacaactccaggtagcccttcccacctctgcctgaataacagaaaggcagacagaaaagcttcccaggcatcctctgtacttcactgcacagtgctcagcacactggtctaagtccagtgtccatctttcctcatgactacaagctccaggagggaaaagatcatttcctctgtggtcattactctattcccagtgcctctggggaggcactcagtaactgttgatcagactgctgctattgaaagaatatatgagccgggtggtatttgtagtgaacatttgttgtcctgttctgtatcccagtgctatgttttgaatgtttatcccctccaaaactcatgttaaaatgtaattgccattgtaacagtgctaagaggtgggacccttaaaaaaggtgattaggccatgagggctccctcttcatagacaaggttggtgccattataaaagagcaagccccctcttgttcattcttgcccttccatcttcccccatggataccacagcaagaaagttcttgcaagataccaacccctcgatcttgaacttctcacatttcagaactgtgagccgataaatttctgttcattttaaattatcaagtatgtggtattctgtcatggcagcataaaaatgaggaagacactctatcacttcgttttctattctgattcctataacacccttttctttgggcaatcactcctcctcagtccatacattttggtaaggctactgatctcaaacccagaccccaaaccttggggacgatggatgtataagacacaagcttgggcaatcagattctgtttctatttctttttttacagacaggatctccctctgtcacctaggctggagtgcaagtgcagaggcacaatcacagttcattgcagcctagaacccttgggctcaagcaatcctcctgcctcagcctcccaagtagctgggactacaggtatacaccactgcatctggctaatttttttttttttttgtagaggtgggggtcttacttttttccccaggctggtcttcaactcctggccacaagtaatggtaccacttcagcctcccaaaacgttgggattacacatgttattcattaacatgaactgctgcacccagctctcaatcagactctttttctcccagagccagctggtgatgagaggaaggccatgaccaagtccaggggattgagggctgcactcattcctgctggcttctcccaaaacctggttgactgggtctgtcaaggagtctctgaggaacctcactgcctttcccaacaatctctccttttaagttagtcagaacacatttatcttgcttgctacaaaaaagaaaataatatatatctaatatgctctttttgcctttaagaagtttaattgaggtgaaattcatatggcataacatttaccacttcaaggtatacaattcagcgtcatttagtacagttgcagtgttgtgaaccacaacactgtggttccagaacacaatctatcaagttccaagacatttttgtaacctgaagagaaaatcctgtgctcattaagcagtcactctccattctgcccttccctggcccctggcagccactagtcttctgtctatggatttattttgtctatttcatataactggaatcatatgatatgtgacctattgcatttggtttgtttcacttaacataatgtttgtatgtttatccgactcacatcttagcatgtattagcacttctttcctttccatggctgaataatagtccactgtttggatataacacattttgtttattcattcatccactggtggatgtttgggttattaccacttttggggctattgtaaatggttgtgaagtgctcttgaaaaaaaaagagtgagtgagtgagtttggcaggtaaggaaaatgggaaaggatatttgaaggaaagggagcaacttattccagggcagagaaagttttctacctggccttccctcttttcactcttccaggctgcagtctccacacagcaattacagtgatctctctaaagctgacatcaggccacttggcttccttgttaattaccctcaatcccaccttacatttcctcttgcttagtacatcacagcgcctagcactgctcccctttctgttcttataacatcaccaagctcagctctacctgaaggctttggcacttgtaggacactcaggcagaaacattcttctttctgaacttctcagggccaacttcctctcatcatgcaaatacctcccccacagagaagatgtccctagcatcttagggatgttctccctattcaggcacgccacccctggtcacacaactatctcattatcagaaattatcattcttttttttttttctttttgagacggagtttcactctgttgcccaggctggagtgcagtggtgtgatctcagctcactgtaacttctgcctcctggactcaagcaattcttctgcctcagcttcccaaatagctgagattacaggcatctgccatggcgcccggctaattttttttgtgtgtgtgtgtgtgtatatatatatatatatatgtatacatatatatattttaagtagaaacagcgttcgccatgttcaccaggctggccttgaactcctgacttcaggtgatcagcccgcctcggcctcccaagtgctgggattacaggtgtgcaccatcgtgcccagtcagaaattatcattcttattcatttgtggtgtgtgatttttgttggtttggtttggttcttggttcctctctgttctgccctatttttttcaccagaacagaagctccagaaataagtaattgcttaaggagtggatggctggatatgacccattagtgaactggcaaggaatatattgtgtctggtgcagagaaagagagcttcaggtggcatggcatgtggtggaaatattgactgtgcccagattattcaagatgccctctttataccaggcacattgtaatttagctttagaaattctctggtgtgatgatttcacagtaccaaagggaactgaatgcttgtctattatttatgtttcagagtcagcatagaaaccctggaagagagttgcccctgagaagcagctttgcaaggggtggcagctggctgggaggggtcagaagatctatgttctcttgtagtgctgtgtggttttgggaaaatcatctaacctctctgaaattcaggtttctcgttagcacaaatgaagagtatatgaggataagagctttccatggtctattacgaagtgtgggataggtttgtgcatacttactctagtctcatgctcagaacactctgccttatgttgtgctgcgaggttgataggaattatagttcccattttacaggtgagggtccaagagggtgagtcacttgcttgaggtcaattgtcaaccactggaggagtcaaggtgaggtctgcctccaagtccaggatgttttccacttgtgcttccctgcctatctcacaggggtgttgtgataattaaagacaagttataaatacatacattttattaatattttctgtcccattcttattgtatcactggccctagaagtaagattgaggtcctccttgcttctcattgcacctactggatgattatcccctcttctcccctaaaacctccagttttgaagctcatgacaccagactgcactatctgctgctgcttctacgtgcaaatactaactcctcatttcttgaagactttagcatctctctcattgtcaatctctctagtacgattccagtcattcttggtgagctccacatacacattgatgtctcctctcatactctggcccatcagtttctttatttttatttttggattttttttttttctttttgagatggggtctcgctctgtctcccaggctggggtgcagtggcaaaatctcagctcactgcaacctcttcctcccaagttcaagtgattctccttcctcagcctcccaagcagcggggattacaggtgcatgccaccacacccagctaatttttgtaattttagtagagatggggttttgccatcttggctaggctggtctcaaactcctgacctcaagtgatctgcccacctcggcctcccaaagtgctgg

SEQ ID NO: 2549 - DNA, 512 bp, Homo sapiens
gctgatgtttcgcatggaccttaacagagtaactggtgtctcttcaggaatggggcacaatccagaggttactaaccacggaacatttactggatttggtacttggcgaaagaaactgacaaattaagaaatgagagagagaataaatgcactgtgcatgctgaaaccccaagaagactttttttctcctactttttatggacctgaggtgttggaaatggaaacattgtttcaaacaaaatccagatttttatctctctccccaagagatatggctttaatcttttttcttttcttctgctgcttttctgaaacactctgctaggggctgatttcctcttctttgaaacagaccaaaatatccctgtgggtgaaaaacatgccggaagtgaaacagaaagactcagcttgccccgtgttcgtggtctgtcaacttctctagccagtgcctggatccacagctcactgctgccggttgccctgcgttagccgcattgcgggggagacaggag

SEQ ID NO: 2550 - DNA, 3217 bp, Homo sapiens
cccacattataattattgcaatcagaaaactaatactgattcaatgctaacatctaaagtacaaacttgtatttcaccagttgtcccaatgaaaaggttttgggaggggatgttcagggaccaatcaaattacatgttgcagttagttgtctctttagtctcttttagtctggaacagtttctctttgtgatttttcattttgacatttttagaaagggtatataggtcaactgtctttcagactgtctctcaatttgagtttgcctgatgcttcctcatgattgcaccgaagttacaccctttgggcaggaatgacactgaagtgatgctatgttctcagtgcatcataccaggatgcacctcatgctaatttgtccagctattggtgatgttaacagattgctctaatgtaaggctacaatttttcaatgtactaaagttaaaatttgatttagattctaatttcctcagaattgggttcaaatcaagtccattgcttaagaagctttgggtattctgaaaaagctaacttcctgatctgtaagtatcaggatcagtcatggaaagtggtgcctggcacatacatttatattttatgtgccacataggtggcattgaacaaatgtcatctattagtattattaggtcaaatatgttgagaacctcatgtaagtattgcttaatgtcttgggacattaagcagacacaggaacttggtactctaactccagggaacaaaccagaaaatggcagaattattgtacaagaccaggtctgggttggcaccaagcatgacttgaagaaggcaccaaggatggggctagaaagctagttaaacttttagcctcaaatctggctgggtctgagagactgaggaagagaatcagaagatttcagctggcggagaagcagggcacagtgtgtggactgagcttgatggcatgatcagctgatgctgctaaagacctgagactcttaatcagcaactgtgcaatcagcaatagcagttgtacccaccttatctgctatggaggcattattattggcttttttggggggcatttaatgaaaatttcttgctttcaaggttattcttcaactatacatcacttgggcagtgctgagaaacacataggatgatttggcctgggctccatatccttcccaggaatatcttaagactgagaaatatggtctcttttccatacctccaagttgcttttacatggatgaagagaatcagaatgctcagtgaaatatgtattcaaaaagaaatgtaccagaataaaattacattagaaaataattgcttctaaaaatcatcacccattcttaccctctgttattctgttctctttcaactgtctgtattttaatccctttcttcttccctgatgttttctattcatttaatttaagcaatgtttctggataccatagcaatagcaatgaggtgttgtataaacgtacaatggagcagaatggaaatgcttcctatggtaacagaaaccatagaaacatgtgcgtgtgtgtgtgtgcatgtgcgtgcacacacacgtgcatacaaagctgttttggggtcaaagctttgtagagttcatgcaactaggaaaatgaagtgtttcactgtgatcacattgctatttgtatctattgtcatcatgatttaacatttattgcatgcctatagtcccctggacagaccctggaactagatgtcaactctacttagtggatttatgtttgaaattagatagcaaagccacaaaatggaaaaagatgagaatacttccaaaacagaaatattgaataatgcattttcagaaaaattaggtaaggagaaaatgagtttgacccaggcagttaggaatgaaggatatgggaggagacttaaatgtctagattagagatggtttgcagccatttccaagaaccctgggagggactgcttgtgctgcatgatctaacactttaatcctcttctgccatggctcagaccccatggggtggaatcttgatgaggagactccctgtcttggataataataacaagctgtcttctctgtaggcaaattttcaggtggaagtctcactctaccactctcataaccaatgcaacaaataatcaagttctcaagctgcaaggaaaactgaggggattatttttaaggatgtaaagaacattaaacaatgaagagatagtttctcagaggaaaagaaaccaagtctccttgaatcagtttatcccaatgtcttctggttttctatgttggctacagtcaagataacctattactaagggcctactccaatatctagagatggcagatattcagttgcagttcaaaccaatgaagtcagaatctctggaggtgggacaaaggtatttgtagtttttaggcttctcagatgattccaatgtgcagtgaagattgaatgctattgcttagaggaaaattcagtcacctgatatttgaagtttagctcttaggtggcactagaagaggaccacaagcctgccagagggaggagagtattgcttcttcctgttcccattagtgtcacctcagcagtgacttttcaccctggagtggcagctttcaagtgcagacaactttttcttgttgtctagagccattgcttccagagcttatgaggagctataaaagaggtcaggacacctgggtctagtctcagctctaccacgaactagcaatgtggccaagcaccaagcctttctggtcttagctttctcatttataaaatgaagaagccaaagttaactggatttctagcccctgccaactctcatatctctaacagtaagttgagagatttttctctctctgacattgtcccctttctttccacctctcacaatgtgcgcaacttgagataagttacttcacctctgtgtggctcagctttcccatgtatacaatgggagatacctactttttagtgttgtgattaggattaaatgagttaatgcatgtgaagtgttggaacagtgtctgatgtggaatactcactaatgttaactttttattttactactttgctgaaaatgttagtgtatttccagttgttaaaattacaaaccaacccctcacatggtgcctgactcaggaactttaccgactatgggttttcaatctattttatatcattcctctttattttttaatttttagtttttgatgcagtgtctcccac

SEQ ID NO: 2551 - DNA, 1957 bp, Homo sapiens
gggattacaggcgtgaggcgccacacccagccaattttttaatattttatagagacagggtcttgccatgttgcccaggctggtatcaaactcctgagctcaagcaatcctcccatttccacctcccaaagtgctggggttacaggcatcacccaccgtgtccggccacagcaagcatttatttcttacagttctgggggctggaagcctgagaccagggtgccagtgcaagcagcttccggtgaggccttcttcaaggttgcaggcgaccaccctcgtgccatggccacacatggtgaaagggagctgagagctctctgggatcgtttttataagacactaatcctattcctgagcactcctccctcatgtcctaatcaccttccaaaggcctcacgtcttaataccatcacattggggaacagaatttcaatataggaatctggggaggaataaaatacttagttttgtcaggtatcttcagaggctatttaggtacagtattgtgctcagggtcagtgtgtacaaaaccaactcatttttcttctctcacaccacaacgataatcaacacagaaaactttgtgacttggccgggtgcggtggcccacacttgtaatcccaggactttaggaggccgaggcggatagatcactttgaggccaggagtttgaaaccagcctggccagcatggcgtaaccctgtctctactaaaaatacaaaaattagctgggtgtggtggcgcatgcctgtaatcccagctactcaggaggctgaggcaggagaatcgcttgaacctgggaggctgtgaacctgtgatgagctgagatcacgccaccacactccagcctaggtgacagagcgagactctgtctcagaaaaaaataagctttgtgactaaatgtgtggggagaagcaagctgtagtggacatcagccggatgtcctgcagttcagttctgacaccatctacctggagatggcatcagattccacaggttgtgagcaagactgtcccactctgccccactagccacaagaccaggcctctgggacatcttgccaaccctctacaggttggggttcttatactctttggcttctattagtgtatttgattgactcagaattcagggaaacacatataccagtttattacaaaggatattttaaaggatactaatgaacagccagatgaagagatatgtaggactagggttggaagagtcccaagcacaggagcttctgttcccgtggaattggggtgcgccaccttttcagagttcttttgtaccttcctagcagccacctcctgttcagctgtccagaagctctcctcaccctgtcttcttaggccttttatggagacttcattggataggtgtgactgaagcatgcacgaatgtgttgaaacgtgattggacaaataagagttgatttaatgctaattgattgagtggggaaactcaaggcccgtctgttcagattcttcttggcctctcagtgcagcattccttcctacaggtacagggcaggaccctctctggagtgagagtcctgctttgggcaggtgaaaggagggcaagagaagatgagagagagattctgcttcccgaggcctgcttctgaggctgaaagtgccctaatattaagattttaccaagggttatggaattatgagccaggaaccatggacaagaacatacagacacactcataccccatatatacacacatataggcacctacatatatacacaccatacacacatatacacacacataccatatacacaccatacacacatatacacacacataccccatatatacacacatatacatacctacatatagagacacatatatacacaccatacatatacaaacacaccccgtatacacacatatacacacctacatatagagacacatatatacacaccatacatacacaca

SEQ ID NO: 2552 - DNA, 9996 bp, Homo sapiens
tggaaggaaatgctaactttctcttaaagactagttaaaaataagattagcttttgtcctgttcaagttcatggactacgtgggaaggagttcatggaccactggttatgaacctctggtagaaaatgggccgacttttacctccatgttcttccctgttttatgagactgtgtcctctttgcatcatcctgtgtccctgtgcacacaccctcagaggacctgtgtggccagagccttctaaatggtttcaggtgttgaccaggggcaagaactgctctgttgcaagatggcactattgacaccagccccagggtcacaaagtagccaatttcagctaatgaaggctctgctcaagcatgaatctgtgggatcccagcctttacaagatagagttctccaggtccccgtgcttgcccatggaggatgctgcagagaagataaagtggtagcttctaggcttactccagagtcccaggtgatgaaaaacagactaagagcagggacttgcctccagctgaggagcttccagaaaaggagcatgggaagatatcgtgccacctgagagaagacattgcccagattcctacatgtgcagaagctggtgaacaggagggcaggctacaaagaaagcagaaaaatgccacaggagggaggcggcacatctgccatgaatgtggaaagagttttgctcaaagctcaggcctgagtaaacacaggagaatccacactggtgagaaaccctacgaatgtgaagagtgtggcaaagccttcattgggagctctgcccttgtcattcatcagagagtccacactggtgagaagccatatgagtgtgaagaatgtggtaaggccttcagtcatagctcagaccttatcaagcatcagagaacccacactggggagaagccctatgagtgtgatgactgtgggaagaccttcagccagagctgcagcctccttgaacatcacagaatccacactggggagaagccgtatcagtgcagtatgtgtggcaaagcctttaggcgaagttcacatctcctgagacatcagaggatccatactggggataaaaatgttcaggaacctgagcagggagaggcctggaaaagtaggatggaaagccagttggaaaatgttgaaactcccatgtcttataaatgtaatgagtgtgaaagaagtttcactcagaatacaggcctcattgaacatcaaaaaatccacactggtgagaaaccctatcagtgtaatgcgtgtggaaaaggcttcacccgaatttcataccttgttcaacatcagagaagccatgtagggaaaaacatcctatcacagtgacccatgccatacatgccagagttggtgctcatttgtcactgatctgaagccactccccctggagtctcaactatagaaattgtgggctgggctttatttaccactacacattatcaggtgttagaaaatgtagactgggttagacaaattatcttctaagttctagaaggggtttgtaatcaaaacatatttgataggaggctacgggagagttgtctagaagaggtaagacctgaaactgtttgttctctcccactagaattaaatggatgtttagactggctacttgccctaaaccagcacttggtgatgtctactgggtggatggttgtgatttgggggctgcttctctgaccattctttttgactgtaatgaatcctccacagttggtcagattcataaagtcttatatccccctctgtgccttttctgcaggtgctaataaatgtttattgaatgtaccagtgagattaccttcatagatctgaaaatctgatgttatccaggtttctgaagaacttctcgccaaggccatttgtgcttgtgtccaattctctgacctagattgtgactcaatctagtgtgtttcttaccaagtacataggcagagcagggttactgtgattgaaagaatccattttttttttggagacgtagtcttgctctgtcgcccaggctggagtgcagtggcacaatcttggctcactgcaacctccacctcctgggttcaagcgattctcctgcctcagcctcctgagtagctgggattacaggtgtgtgccaccatgcccggctaattttttatgtttttagtagagacgggattttaccgtgttagccaggatggtctcgatctcctaacctcatgatcctcctgcctcagcctaccaaagtgctgggattacaggcatgagccaccatgcccggccaagaatccatatttctttaccagactaggaattctattctagtgcaaatgccttaaaaagcttatcactaaatcattacgaatgtgtgccatccgtggaattgcttttttttttttttttttgtaaatatgaggtctcactatgttgcccaggctggtctcgaaatcctgggcaatcctcctgcctcaccctctcaagtactggaattacaggcgtgagccaccatacccagcccaaatttcactctttaatgttttcctgttgctattctttaaggaaaaaactttcctattcagacagtgtgaaaatcagtcatcaagtcagaataaaatgatgaatattctaatgctcagtatcttagttctctcgggcctaaccaatgcctcctaaaacaatagatactatcctgccccaccctaccacccaacacacactgtatagtaaactgcatcaaaacttattcctgctaagttcatactttctccagctcaatggattcacaccaaatttttttttttttttttagacggagtcttctctgtcacccaggctggagtgcagtggcgcgatctcggctcactgcaagctccgcctcccaggttcctgccattctcctgcctcagcctcccgagtagctgggactataggcgtccgcctccacgccgggctattttttttttttattttatactttaagttctagggtacatgtgcacaacgtgcaggtttgttacatatgtatacatgtgccatgttggtgtgctgcacccattaactcgtcatttacattgggtgtatctcctaatgctttccctccccccaccccacaacaggccccagtgtgtgatgttccccttcctgtgtccaagtgttctccttattcaattcccacctatgagtgagaatatgccgtgtttgattttttgttcttggcgatagtttgctgagaatgatgagacgaggtttcactgtgttagccaggatgctctcgatctcctgacctcgtgatccacctgtctcggcctcccaaaatgctgggattacaggcgtgagccaccgcgcccggcccaagtatcacttatggtttcagaacgccattattagtgtctgactgtcttggtcttcttatacattgattcccaaatcacgtgtggtaacagcatctcaatttttcatgatgacggtttgaaccattaatttaattcctcaggctatctacttttttgttaaacatactgtgtagaccatcttttttttttcccatcatgatagtcaaaattttagtctgtgtattcaagtgagaaaatttttagtcagcattatacaagtagtatttattatgtatacattcagtggagttgtttctacaaaagtatttcggaatgactattctgctgcaaacttttgtgtaagcgcttcaccttattcctacaataaggagaagtgcactaacaaaatgaacaatgcagcaagggcttcagtcgcagctcaggtcttatcaaacaccagagaaccctcaatgggagaagccttatgagtgtgacaactgtggaaagacagttccttttttgttagtatcacttctacttattgtagaaatatgctttcattattgcatctactcacatttctcactcggtttctggcaccagcaatctcttccatatttataatatcagtcaaaaactctggaattcaaatataacaagacttttctggtcacctttgatagttaatgacttgggcattgtgatatattatctcctgctgtatgtattttgtttagtagaaattgaatcattatccacaatcctttatagaactatccaagtccctgtttttatgctagtttccaaggcttggtccttcaaggttttcagggatctaggggacacaaatctaacaaatcctaatgtatattatttgtattatagtaataaaccatatggttactttgtttgagtggattcttaaattgagaaaaatgcattgcatgatttccaaactttctgaacatatattaggattctccagagaaatagaaccaataggatctgtgtctaaatatgtatgtatatgtctgtatgtgtatacatatatatttgtatttataatactggtttatgtatattatacataatatatatgtgtttgtatatatatatttatttattggaaagaattggttcatatgattatggaggctgagaagtcctaggttctcctatctgcaaactagagacctagcggagccagtggtgtgagctccagtccaaaggccagcaggttcaagacccaggaagagccagtgttctagttggagtctgaaggccagaaaagactgatgtcccacctcaagatgggcaggaggagtaccctttgagggagcgttatcttttttgttttcttcctgccttcaactaatcagatggggcccacccacattagggagggtaatctgccttacctagtctactgatgcaatgattcatcacatccaaaaatcaaacactcagaataatgtttgactaaatatctgggcaccttgtggcctggtcaagttgacatataaaactggccatcacaatactatagtttcaacattaaaactacagtatagtattacagtttcggtaaagcattaaaacctttaacccgtgcttcccccttttgtcagttcttccaattggcagtaggagcctgggaaataatgtttgtagcctccctaccctgcttacagatcaggatagggaacggctggtatgaggcaggctgagggacaagagataaacaactagatcaccattgtatcctcagcatctagcagagttcctgataaatgaatgattctgaaaattgactggttctatttgttcttttgtattattaacataacataaaatctcctgacactgagtgccagagaccaaagtattcatattcatatttccagacataaaagtcttcccttatttctaaagaaattatgtgtttatagccattcattcagcaaacctgattgtgttatgtcaggtgctaaggaatcaaagatgaacaagacattatctctgcccccaaagaacctaagacctaaaccatcttctgtcttacaaggtattttatccatttctgttctcactttggtgccgacttaatagttcttccttcagaggaatgactgcaccatggctgcctggcaacttgcatctcttcatatgagccacatagaccaggatttaacaccagctgatgtaagccctataactcacctagaacatgagtgcatggtaggttgtgtgagaagctgatacaatgccatttctcacacacctccctatctaccatggaggctgtcctgagacagtttcctctgatgaggaatgaggctttctacctctccccatttaaggtataactgtaagctataaactgcttatctgcagaacaacatcagctcctcagcaacgaaatgtttcaccatatgtgttgcagtcacatggcttcttctgatgccatcttgtgagaaaaagacatagagagctgaactgttttaatccagaaagggcttatttcttttctgatcaaatacagtcatgcactgcataatgacacttcgctcaatgataatttggtcaataacagaccacatctacaaaagtggccccataagtttataatgacaggctacgtatggtggttcacgtttgtaatcccagcactttgggaggccaaggtgggaggatttctggaggccatgagtttgagaccagcctgggaaacagcgagactccatctctaacaaaaataaaagttagctgggtgtggtggcatgcacctgtagtcctagctacttaggaggctgaggtgggagaattacttgagcccaggaattcgaggttacagtgagctatgattgtgccagtgcactccagcctgggtggcaaagcaaaacactgtcacacaaaaaagattataatatttttactgtaccttttctatgtttagatacacaaataccattgggttacaattcagtatggtaacatgctctatgggtttgtaacctaggagtaacagcctaagtttgtgtaagtacactctacgatgttcacacaatgacaaaattgtctaatgatgcatttctcaaaacataacctctttcattaagtgacacatgactatatgctagcctttccttgacaaattggtgccaaacatggggctggtgacattacaatgccctttcagaagaaagatagatgtgctcccacaggactggataggacacatgatgagacttcccaggatctagtagcacatgttcttgcctaagtggtgggcaagaaggaaggagtaagagtcttcccattgtattaatagctatactgcattggctagattataggatgtgaatagactctccaggatccaatatcatatgccacttcctgatgaatgtttagaggttaagttactttaggtaggattgaacccagttgcccaatgccttagttgttattaaaagtttgttgcaggccaggcatggtagctcatgcctgtaatcccaacactttggaaggcccagacagcagtatggcttgagctaaggagtttgagaccagcctgggcaacataacgagaccttgtctctacagaaaatttcaagaattaaaaaaattagctgggcatagtggcacatgcctgtggtctcagctactcaggaggaggctgaggtaggaggatcccttgagcccaggaagtctaggctgcagtgagccgagctgtgatggtgacactacattccagcctaggcgatagagcgagaccctgtctcaaaaaaaaaaaaagtttgttatgactgagtggatgatttgcacttaaaaatgaaagtgcaagtctgtgcttaccagtgtggaacaggtctttttgtgctcccttgatttctctctggcctatatcgcaacctcagttttttaaggaaagaagattctctggtgctccagctaactctgcatgatggactcctccacattacttggcactccgcgagctcccggccaacagactacgtgctctcctgatagttgctattgtaaccttttaaatgtctgcacaaaacttctttatctgctttttttttttcttttaagtgtctacattcagctgataagagtttggggaaaacttgcaatgaaaagaaaaaagttaagcaaccttgtgagtgagggtgcctggaagatgctattcactggggcataaatggtccagtgaatgacacaagtagctgcccattgttggacactctacagcaaaatgtgtgttcgtgatttttgcccatacctagttaaattgtttgctgtttaactgttgagatttggtgaattctttttatattctagttataagtcctctgtcaaagacttggcttgcaaatatttttccctatctgtagcttgtcttttcatctttttttttttttttttttttttttttttttgagacacagtctcgctttgtcaccaggctggagtgcagcggcacgatctcggctcactgcaacctccgcctcccgggttcaagcgattctcctgcgtcagcctcccaagtagctgggactacaggcgcatgccaccatgcccagctaatttttgtatttttagtagagaaggggtttcaccatgttggccaggctggtcttgatctcctgacctcgtgatccaccggcctcagccttccaaagtgttgggattacaggcatgagccactgcgcccggctgtcttttcatctttttaacagggtctttcagagcataaattttacattttgataaatacaaagtcataaacatttcatttaatgaattatgcttttgatgtcagttttaagaatctttgcctagccctaggctctgatgcttctaagaggtctcaagttttaggtattattttagcccatgacccattttgagtttgttgttgttgttgtttggtttacggatgttcggtgctctattgccattgtctgaaaaagctatccttcctccactcagtggcttctgcacctttgtcaagaattaggcgtttttgtttggatctatttctaggttctccagtctgttccattcaactatatgtctgtccttctataatatccaactctcttgatcactgtaggtttatagtataccttgacatcgggtacagtgattcctctcactttattctttttcaaaatttagttattagtcctttgcctttccatgcacattttagaataaatttatatctacaaaaatttttgctgagattttgataggatttgtgtcaaacctaaacataggaagaatcgatatctttaccatgttgtatcttctaatccacaaacatgatatgtctctccatttattcagatttctttcttcagcattttatcagcatacagatcctgtacgtttgttagacttctacattatttttggagtgattacaaatggctttgcattttaaatgtcaatgtccaaatgttcattattagtacataacaacaggattgttatttgcatgttgatttgtatcttgcaaccttgctgaattcatttactggttctagctacattttgtattagcttcaaaaattgtaatagattatttggaatattctatgcacacaattatataatctgcaaataggagcaggtttttttgtttccaatttgtattttgttttcttttgtgcgtgtacatgaaatctacaagcaatctgtatgcttttaatcattttttgcctgttgctttggcttgtattttcagtgctgtgttgaataagagtggtgagagtggacattcttgtcttcatcccaatgttatggttaaagcatagtcttttgctgttaagtatgaagttatctgtaaatgttttgcagatgttctttatgaagtgggaagtttttatttctagtgggctgtaagtttctgtcatgaatgggtgttggatttgtcaaatgctttttctgtgccaattgtatggttatacaatatttctgttatatatatatgttgatgtgatgaaatacactgattaagttttaaatattaaaacaaacttttgtactggaaaaaaaaatcccccttagtcatggtgtatacttctttttataaatacctagattcaatttgctaatattttgttgagaacttttgcatctaagttcatgaaggatactagactgtagttttcttttttgtgctgccgttgtctccttatggtatcagagtaattctaaccttataaaatgagttggagcgtatactttccattttctggaacaggttttgtaaaattggtgctaattcttcttcacatgtttggtagaattctccagtgaaggcatctgggcctgatgatttggaaacttttagattatgaattcaatttctttaatgattataagactactcaaactatctgtttcatcttggccacctggactttttgaagaattggttcatttcttctaagttgtcaaagttatgagtgcaaattttcaaatctacctttatgatccttcaaacgaatgcaggatctgtaataatatcccttttctcattcttgttattagtgatttggcctttctttttatctttgccagtcttgctagaggtttacctgttttattgatttaaaattgttttatgtatttgacacaatgtaattttacatatctatggag

SEQ ID NO: 2553 - DNA, 4778 bp, Homo sapiens
ggcaatcagcttcagagagcccgaggtcttggctgtcatgcgaataatgattttgatacgacgtacatgtgttgcagatcctgatgcccccaaactattttctgcaaatatctgggtgaattagatctgtctacggcagggaatatggcagaagaatagtgaaactaacagaggagaatctgaaaaaaagagaaacctgggtgaactttcacggacaacctcagaggacaacgaagtgttcggagaggcagatgcgaaccagaacaatgggacctcctctcaggacacagcggtgactgactccaagcgcacagcggacccgaagaatgcctggcaggatgcccacccagctgacccagggagccgcccccacttgatccgcctcttttcccgagatgccccggggagggaggacaacaccttcaaagacaggccctctgagtccgacgagctccagaccatccaagaagacagtgcagccacctccgagagcctggatgtgatggcgtcacagaagagaccctcccagaggcacggatccaagtacctggccacagcaagtaccatggaccatgccaggcatggcttcctcccaaggcacagagacacgggcatccttgactccatcgggcgcttctttggcggtgacaggggtgcgcccaagcggggctctggcaaggtgagctctgaggagtagaggagttttagtttaaatggaaaaagcaaaggagaaatcagtaggtgaactcagccattagaggaagaactggcacgtagcctcttgctgtctaaggtctcgttccgtgctggagaatgcatatgagcccaagagtgtgggcctgagtggctgcttaggacgttttcgtttaactcaccccctcttttcctcacaagggatggtggccggggtgtggctcaggaatgtaaggacatgctgaattctggatctctaagggtgcctggacatgggcgttgcagaaagagagccacattctcagggtctctggtggtgtgtgcttgcggacttgatgactgatgttgcctctgcagcccacacgctggggttcaacactgggttatgctcgttttttcctggagtcagtgctgctagcttcatgttgctctgcgacaatcataggattgaggtcgaggaagacttttgaacaaactcctcaatttaaatccgccttgagcaaacgttctctgtggtctgagaagtggaaggggggagggataaatgagtgtctatgaatcaaagctttattatcttgtgattccattaatttgcatacagagtcttagaagtttctttattcaaaagcaaatgtggataaaaatgtattacaaaaaaaaaaaactctgctatggggtccagagtctaggagtggtttctgcagttgattgtcagtggagaacctgtggctgctggttcatcaaagcgctggtccctgagtgccattcagattgcagatgcagtattttacgtgatgtttagagtgtttggtggttgtgtaattttggagagaaagaagtttttcccaaaaaagtccctagtttattgggtgttctcacacaacctgtaagatgaagctgtttttctgcctgtgtgcagggctgattctggaattccagaaggccttgtgggagcgtaaaaggcttttgaataaagtgtggaacagagcgcctcattctgataacatgcaatcataaaaaccatagggcaacttggagttaaggagtttctagaatttgctttagtctccaactgcaattctttattgatcatgaaattgttgaagagaaacacaaatgtcagttttacctttcctgtgggcgtgaaagcacatcgaagtttcaggcaactgttaacatctctaccatctgtctgagttgagatttcaggttgtgacacttgccgtgacttatttgtaaatgacattttgtgtgtcttagatactaatggaattcatattctggctagttctttcagtgcatttgtagacatgttcttttcctttgtagcagtcctccctcaccctgaaatgttggtgttctaaccgatttctaatgctaatttcaactggaagcactttttcaagcccagctatcaaaccacaccagacatgtatggattcgggttgcccaataaagcgttgctattatgtaagcatccctcacgcatacagcatcaccagttttgaaagcttgaactattctgcttacttcaaggtacagaaaaaaaaaatgtacttaaactgtgcagaaaagatgaaatcactggataatatgtattataaaataagcttcatgtgagtgacactggtttaagttgaaataaaatggtgaaagcattgatatcaatcattgtgactttatctcaaaacaatattgacacacatagatgtttttcttcctttatggtaagattacagcctttattgtcttaaatctcttatactcttcaatattttcaaagaaaacattctagtctcagaaatagtccatctctttgcaaaacagggctggccaattatcaaggacccataaaaatcaaaacactttcaaaaattttaaaaataaaaataattttcacatgattgctttaggaattttgaagtatccattcttttcactatggagtgttgaatatagaagattttttaatgaacaggcttgccctttgatgccaaaggcaaaaaataataataataacatttgcacgtgtgatcacagagcagctgtgaggcatcccgggggagcgcacgcagtggggatgtgattgctccactcaactattttatcacaaagtgttgtaaacatgggagatgaaagcttaactctctctacacccagctacagacccgcaatggccctaaaaatctggggtattcattgggtgggctgccatggaggaatttttggttttgtttttatttttatttgttgttctgtttacaaatcaggagagcccctgtttttatatgctaggaaggtccttgggataggccgaagaggtgtgcaaacgagcagtggaaggcccgggccctgtctctcaggaccacggcggcctgccccacacacagttctgcttctccctatctagaacgaggttttcctggcagattcctgccagactctgagtggagcccccccatgaccctataaaaggggctgtttgtcctcctcccaccctcctgtgctcttcctccctccccttgagggcacatggccgctggtaccacatgttggagcggccgcccccgagcccgggaatgccctaacaacacccatgcttgtgttgctgggagctgacattcaagaaaagtgcattaaaaattccttgagaaggcatattcttttgagagccgtaaatgaaaagtgcattcacggagaacatgctcctttgttgtgagaggaaagaaaggactgttgttgcctttaaggaacaggtttcccagttccccggaatgtcagggtcacatgaggaatgggtgagcacttagggccaagattgtcgtgtgcttggcccggcagcttctctctaagtgacctctccagcatcactctgtgccagtgctcatatctgaggccacttgagtgtcacgaggcagagcctggaaacattagctttggaaaccgttccttcctttttatgtggaggaagtaaggtttcacaagacacctaagctggacatggtgatgtgccacttggatagttcccaaagcagaaagcagccaggacatcccagtaccccacttctccgtgccgtgtacttttagggaggttttcgaaagctagcttcttaccgatgattttgtctatttttctgttttatgtgaaaaccttcatttataacctgctcttctcagtgttcttctattcagcattcagtatgacttctatgcctctaattgcgactgtatggagaagaactgtttgtcattcagtgccgtgggatataatcagtcctgtaaattcatcagaatgttctgttgcctgattttttttccattgcattttaatttcattaaacatattttagttctacagtaacctaattcctcattgttaccatgagatcctaattctgtagctgtgttctgtaatcccatggggcgtgtaccatttggagacacatgaaggatacagtagacagcacggaaggcagcagcaacacacaggggtgtcctccctccccagagcccagtgtgcacacagaaccaaattcaatctcattcatcgtgagcttgcatggtaactgatccagccactcagtacctccattggataagagatttggccacagattcttctagagaaaatccaaatgtggagggtgcatttgtttctgcacccaaacaaataccttttgagatttcttataggcattcctctcaaagtctcattactctgatcagttattgatcggaggctaccctggctcagtcaccagctgctcactgtgtccttctgtggtctcaggagctgcagttgttgctgttgtatgaatagacgatagttaattagactggatgtgtctgtactggcagtgattttgcaacttcctctgtataagcgatacatttgtaaatcatgggaatgtatttgatggtaattgcctgtggtggttgtatcatgatttaattttattatgagcttttggctttatatatttttctgcctttttatgcattcattaaacagtttaacagaccaaggacagtgtactaattgcatgcgaacttctttaatttgtcgtttttggtttggttgcccc

SEQ ID NO: 2554 - DNA, 6555 bp, Homo sapiens
ccaggctggagtgcaatggcgcaatctcggctcactgcaacctctgcctcccaggttcaattgattctcctgcctcagctgggattacagtcacctgccaccacacccagctaagttttgtatttttagtagagacggggtttcaccacattggccaggctggtcttgaactcctgacctcaggtgatccgcctgccttggccccccaaactgttagaattataggcatgaaccaccacactggccaggatttgcattttaattgaggggagtgtgcagtttaactcaaacaagagaattgtcaaaggaaaaaacagggatcaagataatgcagcaaatgttacaggtttacgtcatgaagaaaaatgacttcaaaaatctgtattagaaatgttctcagggcatgcttggagtggtggaaggaggtctttaattagccaggcttgtctaggacttgaaccatagacgaagaactaaaaatttgtgttttttcatgtccttgaatcttattgtaattttcaattagatatttcaagtcaacaaatatttgctgaacatcttttctctgccaggtttgtattaggtgttgaaaataaatgaacaaataatataaaatctctcctctaaaagatctagcaggcagatagggatggcaaaatattataataaaatgaaacaaaattatgcatttaaggtgttagaggaatgaaaagataaatgagggatgcagtggggtcctgggaagggacctgtcctgggaggttttctcagttgctacctcgcccatctgctttgccaggcagtttttgacagttgtatcctccacctctagcttttccattatcaggatcattatagattgtgctctgccagtaatccagatataaggaagtgtctgggcaatccctatgaacgggatcagggcttggttgagctttcatctcaggactgatgtcagggagattctgactcaggtaagacagacgtgatcaccgaggagcagaaagtgtacatgtagagtgatgctctcatctctgcccaggaatgcttctggaagaagttggacatggtggtagtgaggcccttcaccatggtttcctcatcctattgtttatataacccaagtttcttgcatttactgcaccggtccccaacctttttggcaccagggaccagttttatggaagacagtttttccatggattgagggtttggggatggttttgggatgaaactgttccacctcagatcatcaagcattagattcttataagggacacacaacctagatcctttgcctgtgcagtcacaatagggtttgcactcctatgagaatctaatgctgctgctgatctggtaggaggcagagcttaggcagtcatacacgctcacctgctgttcacttcttgctgtttggcccaattcctaacaggtaccagtttatggtctgggggttaggggcccctgatttaccacacttaaagtgtaactgtgagtccaaacccctgatcctcaaagcaactaacatagttcactttgtgacctcatggatctttattactagagcctgtggtgaaattttagacatcagcaacaggatatatgactttagtggaaaatattttctgaaggggcagaatgtgttcttgctatccttaccttcaaacccagaatttatattgcagctggcaactagcattgcccataaacaggattagctctggtaaacataagtaataaaatgccattttgttttccaaacctaaactttgacctgcaccatgcagaggatatttaagaaatattttttaaatgtttactgaaagcatagattacaaattggagagaaccaataggtattattgccttgtttgccagattcaggtttaggccaatcatttttacctcctatgattagctaatgtttactctaaccctgtaattccacattagaatgattagtaattttaagccaaagaggaaaataaatgaatttggtttagcacctggaagccttgaaatgcttaagaggaggtgtgtttcaaattagaataaaaaattcatatttagatcgagtacatattgttaagagaacccagaggaaaaacagtggactcaaaatgtgtctttttttgggcaataaataggatttttatactgaaaaggaaagggtatgtatgtcttagaggagtagtgcatgtcatgtagtaggtactcaataaatatttcttggccaggcatggtggctcacgcctgtaatcccagcactttgggaggctaaggcaggaggaggccttaaacctaagaattcaagacaagcctggacaccatggtaagaacccatctctacaaaaaaaataaaaaaaaattagctgggtatgctgccacatgcctgtattaccagatgctctggaggctgaggtggaagaattgcttgagctcaggagttagaggctgtagtgagttgtgatcgcaccatggctctccagcctaggcaacagagaaagactctgtcccccaccaccccctcccccacaaaaaaaaaaagaaaaagaaagagaaaaaatttcttgaataaatacgttagttgaacaaccataaatagatttacaggatcagttaatgtccaccaagttgggagaccccagtggcaggagttcctagtccttagtatatgatttgagtgaagataaaaatgacacacctaacaaaatgtttcatgaaataatctaaaatttcttgtcttcattgcttacaatgacaaacccaatctaatcagataaaacttgataaagataatgcctaaagccctgtttttgggtataaaaaggtataaataagcataaatataggatggaattattagtaaatgttttgaaaaaagatgaaaggattaggaatttaggtgatagcctactcagtgtgatccaacagtatgaagtaattccaacctcctttcttgcatatttttaaactctccacaaaaactaaggagatgatcccaattattatcttcattacattaattgagtttatcatcaatatcatggaggtgatgatttgatgattatattttactatgtgctaaaaacacatctattaaacgctttttataattttaaggaatattatcagaggagagcaatgagggtagtggaattcttcacttgagtatcagggagttggtgaaggaagcaatataattatgcagaagagagctcttggcatgagccatgatttcaagaggggggaaataggaccaatgagataagttagcaggaagcatattttggctcaatgtaggggagaattttgtactaattctaacacttagacctgaatgttctgccttgggaggcaagcaagtgttcatttggctactaaacagaacagagattcatgtgtcagatgagggagttgaaccaaatgaccttctatatcacttcttatggtaagattctttgacattttgtgtgcaataacaagatatgtctctgtacaggctttcccagctatattctttagggaagttgaggataggagaacaagcactgtaaatgattacacatcctgaaatgagaagcaagggcatttgtagatatgtgcatagttgttgggataaagtgcctgtgtccaaattccagccaggactgacatgcactatctggtgaccttcgattagttatttaacatttctgtacctcagtttccatatataaaatggggatagtatagtatctacctaatagctttgttgtgacaattgagtgagttaattcactcaagcttttagaatggtacctggctcatagtgattgttagatattgttattatgattgcaactataactacaattaactattcataaaaccatcatagagtgagatggtatattttattctgcattacatgtaggcttaggtattctttggaagaaaatattatagagaaagcacgtatattggacacaggcaggctctttatgggctgcgtggtcttggacaagtcatttgacctctgcttttcttaataactgtctagttataggacttctgtaaaattaaatgagtaatagtaataaatgtcaacgtagtaataaatgtcagctcccatggaaagatagtatttcaatttccgtcctttttcaaatatcttgttgtctagagaccacagcagtgcagggttaatgtagcaacttagggcttgaagtgacctgagacatcttctagcaattgccgctcatgtaggagatgggagtgtaggttccttaagagttaagagacttgcagaaagcgacgtagcttcttcctatgagggagaagagctatatggaggagagaaagtggaagataagtaaacattcagagtacttttttgggaaaaagtgtgcagcttcggagctcttgtgcacgttttgctgagtgcgtgtttctgaatgattgtgtgtgtgtctgtatgtgagtacatatgtatatatgtatatattcatgtgtatgaatcagagtgtgtaagtgagcatgtatttgtgggtgactgattatcttgctagtgtgactttctatgacacttgctggcatgcaggccttgggttgctaattccttttcattatctaactcagtataccaagaaaagaaagaaaacagtgaaaaagagaatgcattctgctgttagctggatgctgactttcttcttctgggtctggcactttgattcctcatgacttcaactttttcctaaggaaaataaatgtgctagcctcttaccttcaccaccccactttaatgaagcttccttcaattacatctataaaacccaaggtttaattttatttgatgacactgtcttctgcagacactttgttttgcttttgaagacactaagatagcctggagctctgtgccaatttcctcactggtactggccactggggaagctgcctgagacaagggcatctgaagtgacaggagccttgaactcagttcatcagctggagacccagagcagtatcaaaactgagtttttgattatgcatatttatcctgatttctacagcttcctcatgctcacccatctccctcagatattctacaacactgaactgtattattctgagttgtacttaacacttaggaaattttaacatttgcttcattaacataactgttagaaggtgcagggggtgatgaggtttaaaaaatgagtttaagatcaagagtgtgtactttttgtttttctttatggagttacattgctgatattatttatgttcaaattattgactactttgctgcttgtataaaaaatggctgctaatttttatgtattttgatctctgtttttacggatgatgcaagaaaatgatcaagagctcaattacacttattggcataatatttgttaattgtgacactgtagaaaagaaacattcctttgaggatcaagcagagccatctcctgtcctcatgtatagaatagtactcccattagggaatgctgccaatgaaaaatttatatataactttgtgtaaaggaagtttttaagctctgaaatggagtggcatatagttgcctgtaatctctaggctgatattttactgtggcatttcttcgcttctcattctaataaaatattaacatggtaagctaattgtttctgtcagaaacaagttgttcagcataataacccttttcttcatttgataacgtatcatttaacttggtagaactgtctgaaaattatgtcatattctttcccattttcatctctactcttgctttctggttgcccattctagcaatacaagaccaagtcaagctacaaggcttttgcagcactagatgaaccagccaagactgaaagtgtctccaaggacaacacattagaaccaccagtggaggtaataacttcagattacccctgcttttggtatgcaattccaaaacttattgctaacccagtacctggtttcaattcttccagctctattttcctgcacagctcaggcagcaaactgaagagctctgtgctaccattgataaggtcttacaggattccttgtctatggtaatgctttagactagaatgtgcaattcaaacatttgctttgcttctcttcattttcctctactttagtatgatgcctcacaggcttgtccttttctttccttttctcttcttctttccttcctttctttttttttcagcattcttctgattctccttcaaggtccccaaagacattgttgggttctgacacagtcaaagtatgtatgtatttaatataatttatggaaccataagatttattagatcaatgatttccaaactgcaagtcaaggtccaatagtgaattgagaaataaatttagtgaatagcaatcagtcttttttgtagaattttaaagatagtaaatattagacttgatttcaagtaatgtataggttttgttgacatttgtttacatgtgcacatataatgcaaggtaagtgtatacagggttgcaaagtaaaatctatttctgtgggtccagttcaaaacagtttgaaagccaac

SEQ ID NO: 2555 - DNA, 2962 bp, Homo sapiens
aatgatctttgataatacaattgattttaaaatcaaatcttgtcctgtttttaaaaatcagattccctaaaattttgcactataattgtgcacagcttctttacctgaaattatttacatgtgccaatgttcttattttcaaagattcttctcctttgaagcttctttattcaacttatttatctcctcaatctttgtcagtaggattctatcctactaatctttattcagttaagatcatactggcgggtcatctctacatggcttcttcttataaagggaacatggatgaaaaatggagttgtgtcacctactcattaataacttgagttcagaaattacactcctgtgtagcataatgaaggaaacaaatatttatcttagtagtaatttacaatggtccagcttccaggattgctactggcatttccttcttactatttgaacaattacagatttattgatgacttttaaattcttactaaatgaattaaactccaggacacaattttaaggtgtctcttataaaagatacataacagcattttggaattaagaataaatcagctaaaattcaattcaacaaatagttattgagcagctattctgctgggtactttctgaggtgttgggagtaaataggaaaacaattttgagaaaatctcttcttttatagagcttaactataaaggatgtttccaaaatttcagtttggcttttctaaagaaatattgatttagatattttattaacgcatttttggttcttaaattccttaggcgtcctttcttttgaagttaccgcaccttaaaaacctggctttatgttttgtgctcaatatcccttggccttatatatcaaatattatggcatgaaatacttatggtttcaaaaaactttacttttattttcattattttggattgttctaggctggtttcgttttggtaatcatgtacattgacaatttctgaacaagcaaaaaaaaatgctctcaaagataagcaagcaacagttgcattccactattgaaggctattacagtatgagttaaatgtactgaacttatttttcttactcctctgtgaaacagtcttaattaactaatgtagtaagcagctttctaaccttcaaaatgattttctgtggtagcaaaatcattttgcaagtcaaatgcaacactagtttatcttttgcatttgaaggactgtttaactattaactggttaattgtgtatcattcccatacagaaggtaagtactcaaattattttcctcataaaacctgacattcagcatcttaaaggtaggtatacatttggtactttcttatgttcactcctatacccactagatcaaaaatataaggtactgagtgattttaaaacttaaatgaaaaattttaataaggaaaaagtaatagacaatatcagtatgataaagtgggatctacaccagttatcagagaaacacaaatgtgtacatactgcatgatctgcaaagtgtagccacatataatattttgcataatcatactttataactacgaataaacagatggatttatccatctgtttaaaagctaaagcagatgaaagtaattttagtagcacacaaacagactaaatcatttgttctcataactcttgtctaatttgaagacaatgggaaatatttaaaagtgatttcatagagcctgaaaccactttgacatttgagttgagtcacaccgaatgttgaaataaatgtcctattccggtaaatttaaaggactgttttaacatgataatttgtctcctaaaataatgtcccaggacccacactaacaaaagtcaaaattgaaggtgaacctgaattcagactgattaaagaaggtgaaacaataactgaagtgatccatggagagccaattattaaaaaatacaccaaaatcattgatggagtgcctgtggaaataactgaaaaagagacacgagaagaacgaatcattacaggtcctgaaataaaatacactaggatttctactggaggtggagaaacagaagaaactctgaagaaattgttacaagaagaggtcaccaaggtcaccaaattcattgaaggtggtgatggtcatttatttgaagatgaagaaattaaaagactgcttcagggagacacacccgtgaggaagttgcaagccaacaaaaaagttcaaggatctagaagacgattaagggaaggtcgttctcagtgaaaatccaaaaaccagaaaaaaatgtttatacaaccctaagtcaataacctgaccttagaaaattgtgagagccaagttgacttcaggaactgaaacatcagcacaaagaagcaatcatcaaataattctgaacacaaatttaatatttttttttctgaatgagaaacatgagggaaattgtggagttagcctcctgtggtaaaggaattgaagaaaatataacaccttacaccctttttcatcttgacattaaaagttctggctaactttggaatccattagagaaaaatccttgtcaccagattcattacaattcaaatcgaagagttgtgaactgttatcccattgaaaagaccgagccttgtatgtatgttatggatacataaaatgcacgcaagccattatctctccatgggaagctaagttataaaaataggtgcttggtgtacaaaactttttatatcaaaaggctttgcacatttctatatgagtgggtttactggtaaattatgttattttttacaactaattttgtactctcagaatgtttgtcatatgcttcttgcaatgcatattttttaatctcaaacgtttcaataaaaccatttttcagatataaagagaattacttcaaattgagtaattcagaaaaactcaagatttaagttaaaaagtggtttggacttgggaacaggactttatacctcttttactgtaacaagtact

SEQ ID NO: 2556 - DNA, 3660 bp, Homo sapiens
cggcggactacattgcccagtaacctcctgggctccgctgtgtttttctattctggggtgtaaggggcagctggaccactccagctgggactgctaggaaggttgcgggtccacccggccgagccgaacgagggaaatggtcctcacccggccactcgccggttgaaaaggggccgccctggcagggaagcggccgccgcggcgcggtgcagcgcagcggcgagaaggagtgcgttatcgtcttgcgctactgctgaatgtccgtcccggaggaggaggagaggcttttgccgctgacccagagatggccccgagcgagcaaattcctactgtccggctgcgcggctaccgtggccgagctagcaacctttcccctggatctcacaaaaactcgactccaaatgcaaggagaagcagctcttgctcggttgggagacggtgcaagagaatctgccccctataggggaatggtgcgcacagctctagggatcattgaagaggaaggctttctaaagctttggcaaggagtgacacccgccatttacagacacgtaggtatttatcttgattctagctggtaagtttgttatgagttctgtgtttgtctcctgtgcttttctgtttgtccaaaaacaagttagtttttttatcttactgatacaataactgaacacatacagcacatagtctttttttattattatttaggttttttttttgagatggagtcacactctgtcgcccaggctgtagtgcagtggcgccatctcagctcactgcaacctctgcctcccaggttcaagcgattctcctgactcagcctcctgagtagctgggactacaggtgcacgccaccacacccagctaatttttttttttttttttttagagagtctcgctctgttgcccaggctggagcacagtggtgtgaccctggctcactgcaacctttgtctcccgagttcaagcgattctcctgcctcagcctcctgagtagctaggattacaggcacatgctaccaaacctggctaatttttgtatttttagtagagatggggtttcaccatgttgatcagactagtctcaaactcttgaccttgtgaaatttttgtatttttagtagagacggggtttcaccatattgatcaggttggtcccaaactcctgacctcaggtgatccacctgacttggcctcccaaagtgctaggattacaggcgtgagccgccgtgcccagccagaacacatatagtctcttaagaagaaaaaaattaactactgattattattaagaagttactgtcctaaatttttagaaacgcatactcacgtatttagggatgaactgtcatgaaatctgtaaaccactttaaaatatttaattaagcaaaaaacaatgaagcaagccagatacagtggcttatgcctataatcccagcagtttggaaagccgaggcgggataattgcttgagcccaggagttcgagaccagcctgagcaagatggcaagaccctgtctctacaaagagtaagaaaattagccaggcctggtggcacatgactgtagtccccactacttgggaggctgaggtgtgaaaacagcttgaatccaggaattcaaggtggcagtgagctttgatcctgccactgctctccagcctgggtaacaaaacaagaccccatctctaaaaatattaaattgggccgggtgctgtggctcacacctataatccagcactttgggaggcacaggtgggtggatcacctaaggtcaggagttcgagactagcctggccaacatggtgaaaccctgtctctactaaaaatacaaaaattagccgggcctagtggcgcattcctgtaatcccagctactcaagaggctaaggcaggaaaatcgcttgaacccaggaggcagaggttgcagtgagccgagatcatgccattgcactccaacctgggtgacaagagcgaaactctgtctcaaaaaaataaaaaatacaaaataaatttaaaaagttagaaaattaaggaaatatggcaaaaatgttagcagttaataaatctcaatggtagagatagagggagttacatattatttacttttcagtgtttgaaaattttcttaataaaaatttgtataggtttaagaaagaaaaagtgaatagctgattatcatttttcttcacttaagaactttaaacacagaatttaaatttttcatattttttgaaaattaacatatatttattacagtgccaaatctcatgagtccctgtctcataatctaagaccaggctactctgaaagaggacagagttcactgcctaatccaacactggctgtagtgtaaatgcaacacaggtgatttttgccccagttccaaggctacctaactagctatgtgggccttagtcacccttaaaggaagatggttgcaactatgccagttagaacatttttctgctctgcttccacagtggcactcacaagaggaggacttgattttatagcttgtgtacaggagaatataaagttggcttcaaaggaggtaggataggtttggcatttttctcctcataatgtttcctgaagcatgaaaggatccttgatcagaagagtgctcagttctaatttctaaaatttgctggcttaatatttttaaagattcaattctccatatgagtaagttagcgtgtatcatcaaaaactatctagaactgtgtgcagagactgttactggttttccaagttgtatatttttgagtatcttaaaatatttcatcaactttctaaaacatcaagaaaagctctctatacaaataccatggttgattttaattattttgttttccatccttttaaaaatattttctgctttgcatcccattattattttgagtttcttttcatttgtagtttgttgttcattgtgttgttttacagctaagattcatttcatacgtttgatgcttagctgaaaaattacaataaattctccaatgaaattatgtatctttatttaatgaaaatgcctgctgcgtaccaaggtatgtactagggcatctggggtaagtaaaaacaaacacatagagcctgcctggagaagctcatggtctgatggaaagataagcaagaagagttaatttctaatcaatatgataaaaaggtcagagagcagtttctgaaaaacatgtttttgagttgagtcctgaaagacaaggagatgttagtaaagcagagaagggagaattcattctagaaagatcagacagtgtgtgggaagggcagagtctgaaaagagcatgccccatttggagaagcatcaagaagcccacgtgttagaagcaccggccccatgagacaaagacacagctagagagattgactaggccatgtcggaatgtcctcttattttatacatacataagcatatagatacatatagccaaagttacctttttaatgatcttttttacccagtgtattctggaggtcgaatggtcacatatgaacatctccgagaggttgtgtttggcaaaagtgaagatgagcattatcccctttggtaagttttgtttggaaaataatatgctgttgccccaaatgccttaatgtttattaggtttatgtaaaattgtacatttgtacccaaattgcc

SEQ ID NO: 2557 - DNA, 833 bp, Homo sapiens
gctggcctgctgggcagagaaagggtgagcttgtcggccacagactgctacattgtgcatgagatctacaatggggagaatgcccaagaccagtttgagtacgagctggagcaggccctggaagcccagtacaagtacattgtgattgagcccactcgcattggcgacgagacagcccgctggatcaccgtgggcaactgcctgcacaagacggccgtgctggcgggcaccgcctgcctcttcaccccgttggcgctgcccttagattattcccactacatttccctgcccgctggtgtgctgagcctggcctgctgcaccctctatgggatctcctggcagtttgacccttgctgcaagtaccaagtggagtacgacgcctataaactgtcgcgcctgcctctgcacacactcacctcctccaccccggtggtgctggtccggaaggacgacctgcacagaaagagactgcacaacacgatagcactggccgccctggtgtactgtgtaaagaagatttacgaactctatgccgtatgatttcagtagaacagggagcgaagcaaaaccacccggcccacaagagacaacagagtattcagatcgccacactctgtgaggcagcagagcctgggcaggtgtttggcttagtatttgttatttttaaaaaataacagatcacgggtgtacccagggtttttcagctcattacactaagatgtggatttccataacccaagaggggggtctgaggctgtggaagtccgactgggcagtggaatgctgatggaggcagacgctgccgagggggtgtggacgtgctttgggggagg

SEQ ID NO: 2558 - DNA, 499 bp, Homo sapiens
gatagaccgaggttaatagtcacatcatttgaaactgagccatacagttgaatgtaatttgccgtaaagatgaatgttttgtagagttcctctttattttcttaagggaatgtgcttttcaacataatgtgtataatccctgcctccacacacacaccagaatgggattatgatttccctgatgggattactaaattttgttcttactttttgaatgagcttaattttagttttcaaacaaactggtttataccttttgccagtatgctaggccatcaaaagatggtacaatcatcttcaaaacctgagtttaatagaagaaagtatgagaaggcatccagtaggtgtttagatctgattagactttgagtggtccctttctaacaataagaggatattaattcctttggaattcatgttcttcattcctctgcagattgtcaagagctatttgaatcctaactatattccaggcactatgttaggtgctacagtggat

SEQ ID NO: 2559 - DNA, 13785 bp, Homo sapiens
catgggcatgggaccctccgagccaggcatgggatataatctcctggtgtgccatttgctaagacctttttaaaagtgcagtattagggtgggagtatcccaattttccaggtaccatctgtcatggcttaccttggctaggaaagggaattccctgcgcttcctgggtgaggtgatgcccctctctgctttggctcacactccgtgggctgcacccactgtccaacaagccacagcgagatgaacctggtacctcagttggaaatgcagaaatcacccgtcttctgcatcactcatgttgggaactgtagactggagctgttcctatttggccatcttggaacctctcttaagctttatttttagatatttactgagtagattaacattacagaagaggaaaaatattggatataaataacacagtggaatttggaggatgcttgtcttggggtatacatacatcatgtagcccagctatttaaatcttgtcctgaacctcagtagttcttgggtccaacttaaatattagttattttgacctgggtatttcttctacaaaataaatgcaagtgatgtcagctcatccctgctggcagtctttccagatgtagtagcccttgatttactgtagatttgaaagttacatatgatttttataccctatgttagcaaaactcattcattttcttgcataatctgcaggatagagttcctgtacaactaaaataagttagacttgaaagtctttgcaacttatatattaagcataagggaggaaaagagctgaagatgtttgaagatggtcatgaaaagtaaggaggccagaggtgtgagttactgaagaggaagctttcattaccatggccaggagcacaaagttaaagctaggggagaaggtgtgacgtttcttggtcataggagggagtgtgatctgacaccagaggacttaatataacattgcagtgttaacatcttcactggcagattcatggactttccccctcctgaatgcatttcaacaccttgaaatgaacgatgcctcatgtctctgcagggtggacatagctctaactctctgaagctggtgagaatgttgaagcctaggggtgccttttgaaagacataaatttgggccctgaagtggtagtggggaggtgggataggagaaaaggagaaacctttgtggtggaaagatatctgggttggtcgttcaggttctgctgtaattagttgtgagaaagtcagtcagttaccctctgtgagccctatttttttaaaaaaataataatggtctgcctatttcagaagtttgatgcgagaaccaagtagaaaggttctttgtgaagcaagtattgaaatatattctcattaaagcgtgtgcatgggattgtgctaagcactgcagggggtaggatacaaataatacttagactctcacctcaagctaataaggcaataaaataaacacctcaataaatagaacaagtaaattgcaaaaccagtaatttggagagtgattttcaccacttgagacatggtgtctctagagcagtggctctcaaatctggctgttcattagaattacctgggagctttaaaaacagataattgtccaggccccagccccagaaattttgacttaattagttggatatgcctcaccttccactttcccctacattatcattttaaaaaatgtgctttaggtgtgtttaatttgcatcagaatcgcttagagggtttattaaacctcagattgttgggccccactcctgtatattctgattcactaggtctgagggcgggggcaagaatgaacatttctcacaagttttgtgatgctgattgtctgcaggtcatacttcagagccagtgcattcattttattttactgttaatgctgtgtatgcaatacgcatatatttttttcaggctgaaggaagcaggtggacacaaaagtccattctttggtgcaattttatagttgggaaagtcaacactgtgtggccaaatgaacacaactgcatttgatcaaagagatagttggctaacagaaaaaaatttcttcatacaaagattatatgtcaagttctgtgtgaaatgagagaccatggggattcattattgctggagttgacgctttgagattttatggaacaatgtagactcatgcccagtaacagatctggagaggagaaacaggctaaaagccaatatgtttcacaagagcaactgaaaccaatatttcaaatgaaggtaatacctataaagaaacataccagggatgactttatatttcccaaatcatgcagactgccttattgacttcctatttggataccttccaaggtaagtaggtgattgttttgtttgttcttttctagaactgactcgtacacaggtactgtaagaatcctgggaagtggaaagagattccaatctcacctcatcagggagcatcgaatgctctcttaagctcaataggaagaagtgaggctactttcagatttctctatcccaatggcttcaattgtactaaggttttctatttattcactccatgttcaacaaacatctattgagcatccattgtgagcattgacatagccctggttatgcagtgaggaacaaaatagagttcctgatgtcatggaagttacacccgtggagaaggcagaccttaagcaaatagttacacaaatgcacacatcattacttatgcggtgagtattatgaaataaactgcgcagagttctacaggaagtagtgtgctcctcacatttgaggaattaaagaagcccagggtgctggagcagggcaccaataaggaagatatgggaaaatgcttatatagcacacccaatgtatcaggaggagccatcaatcagctcaagtccttactaccaccttgtgaggccaacgtcagtgttattctcattttatagatcagaggcatagagagtatgccaattgcccagtgtttcctgggtagtgtgtttcaaccaaagatatgtggcttagggtcttcctcctctgccctgcattgcctctctgcaggggaaaggcagcagggctcaggagatcacacacattggcagctttctcttttgtcctctctctgtgtgtaataatatgcaacttcaaagctttaggcgttatgtgaaagaacagcaggttagttgacttaattagataaaataaccatcaaataaaatagtaatagttcattacctcataagacaacttatagagctgataagtaagcactcataatgcgtaaccatgttgtcatttcaaaagatctctccatgagggatgtgtggaagaaaataaccataaactattttcacatctcagcatgggtgattcaggtcttcattttctgactgggatggtaacatgctgtgatggttaatattgcgtgtcgacttgatcggattgaaggaggcaaagtattattcctgggtatgtctgtgacggtgttgccaaagaagattaacatttgagtcagtggactgagagaagcagatctatcctcaagctgggtgggcaccatctagtcagctgccaccgttgctagaataaagcaggcaggaaaagatggaaggccagacttgctgagtcgtctggtcttcatctttctcctgtgctggatgcttcctgctctcaaacatcagactcccagttcttcagcttttgaactcttggacttagaccagtggtttgccagggactctcgggcctttggccacagactgaaagctgcactgttggcttccctacttttgaggttttgggacttggactgatccaccactggcttccttgctccttaacctgcagatggcctatcttgggactttaccttgtgatcgtgtgagttaattctctttaataaactcgctttcatatatacatatatcctattagttctgtcccactagagaaccctgactaatacacatgccctttctataattccttgaagatgtgtaagtgatacaattcattgaggagactttttttttgtatttttttcttttcttttcttttctttcttttttttttgagagggggtctcgctctgtctcccaggctggagtgcagtggcgtgatctctgctcactgcaagctccgcctcccgtcaacaccattctcctgcctcagcctcccgagtagttgggactacaggcacctgccaccacgcccagctaattttttgtatttttagtagagatggagtttcaccatgttagccaagatggtctcgatctcctgacctcgtgatccgcccgcctcggcctcccaaaagtgctgggattacaggcatgagccactgcacccgggctttctttgtattttctaaggcaggaaaatgatgtaaatgtttagatgttatagcaggagtctaagaaatggaattttaagtaattttccttttgtcactaagagtagtttagttttgctatagatttaccttaagctttaaataataaatgcctataaacttaaaaatatttattgcaattttcatttaatttcctccttaagccagatacatttcccagcactgaaaccaagcagttggataagtttttgctgtcatagtttagtaagtggcaatgctaaggaagagaacaaaactggtgcagggctgctacttatcacaccaaggaatccagatgcctccatgcagttagtgtatctgatgggaaactcagaaaaagacagatatgaagctcttacgtttcatgatctaggcttttcagggctttaccttttgtgactggcttttatcaaattgcatgtttaatagtaggcagaaaaagttaagaaaacgcataaaccataagctggataataatctttgagaaactaaaagttggctgtttggagcattgattgttatagaatcataggaatgttagaaatactctttttcccctttaaggatgaaaagcaaggctgagacataagtgaattttccaagatcatatatcaagctggtagcagagaacgagatagagccacactctcctaactcatagcagtgacctcagcattgagattaggggtgtgtgtctgtgtgtgtgtaacaatgtgctttaggtttcctaagacaaaggccatgaaactagaaacacaatatgcagttctccaggaaacatacatatccagagcacatagaaaatcccaaacttagagtgcacatggcttctgaagcaaagattaagtcaataaagatacaatatggggataatgtttgagcaatatgctactatggtctttaataaaacaccttcacccttggtaaggcagcaaactatggtcctttttgatttaatcagttatttttaaagactaaaacaccttacagatagtctacatttgaaaaatattaggataatttaatgaatttattatgcccttgtccactcttggccatgtagaaccaggtatgatctcctactagcgtactcctgtgtgaagccctctcagagcctttccagaactgtagctacccaggggctgtggtgggagaggtcttcccagggcacagagagcatatctgctgctgtgaacttggacttttaaacaatgtcaatgaaaaaatactattccctgctggggctgaccacaccaatctctgctctccccttagtgccactgctccaagagactgttccaccaagtccaaaggcagaggaagagggaggggatggaagctgggagtagataatatttacttctttaccgatcttcaaattggcatctagaaatgcaagaaaaccataagcagtgaatagtactaatacgagaaataagattttctgttacaagttaaatgttaataaaaggaataaaaccataactaaatagctttccttcaatagaaaatcaagtataaaatacaatggagaaaaaccacttttacagtaacaataaagaccatgaaatatctagaaatactttttaccccaaacatataaaacctatataaagaaaaataaagctttcctgaattataaaagaagacttgaataaatggtggggcatgccatattcttggttgtaaaggttttgcttttccttgagagagtttatgtttataatacaattccaataaaaattcagtaggattaaatacatacacacacatttcaaaatttgactttggacatgatacataaggcctttggactttggtatgagaataaactggtcaacgtttcttgaatacattttgaaaatatgaataatcttaaaatgatcagatctcttaatacttctagttttgacactagatacataattggaagtgataataaaactccatgtttaagaatgtttgtcaaagttttgtgaataaaattggcctgggcaacatagtgagaccttgtctctactaaaaatgaaaaaaaattagctatgtgtggtggtttggtgcatgcctgtagtcccaagctacttgggaggctaagatggaatgacgacttgagcccaggagttcgaggctgcagtgagccatgattgcaccactgtaccccagcctgtgcgacagagtgagaccttttctattaaaaaaaaaaattgaagttggcaaaatcaatgaggcaactggctcaaacacattttgacataaacatgaggtaaagtattatgcagctactaaaacctctatttaaatactaattaatgacatgaaaccataaataaatttaaaattatataaagtttcttaataaaaaataagtatattgcatatacacatataggcaaagaacacatgtaagtgaagaaaatttattgaaatgtttccagtagttatcttaggatggtgaaatcgtaaagtagatgcgggtccaacttctaactgtgagattctggttaagttttgttgttattccaggtcttaattccttcatatataaaatgaagaaaataacaatacagttgctgtgagggttaaatttgctaatacatgcaaaatgtttagcatagtgcttagcatataccaagtattgaataaatagcatttatatcaataattaatgttacataatttcatattttataaattttagaccttgcagatttattaactttataatcagaaaaagatgatgaatattatacatttcaaaaagaggaggttcagaaatttaagtcaaagtgaaaaccaagagcaaaaaagacatgggaagttagcagagaatgtaccgcatggagtaagatgaatttggccttaagtagcccaatttaaaaaaggaaattataacataacagttattgaatgtgttctctgtgctaggacttttaagtattatgtacatgttatatacattcttgatatcagcctgtgaggaaggtactattattaccatcttacagatgaggaaaataaggtacagaaagttgaagtaattcattcaaggttgtagagcaagtaagccgcagaactagactatgaagcagtctggatccatttaaccactccactgtactgccttcttacatgatgagttctacatgattcaggtaagataaaagaaaatgaattgcttaagataagcacaacaatttctgatagtgagataagaaacattgcccctgaatggcctcatgaagatgacactgctcaatttaatgatgaacattctccatgtatccttacaacagaaatacaggtttcatagctctgtttattatgatgtctctcaatgtgagttagtgaccttgcattaaagcacaatcattaaaaatctttatcttggagaaaggcccatgagtagagagcagacttgataggttaatggagagagactagcatactgaaaaatctttaaaataactctcttttgtgctgaaaaatctttaaaataattttgagtaattgaagaatgattgagggctttgccacaaacttgaaactcaaacaaggacttctaaagaggtaagaaatctcataaaacacaggaataagatcacaattagtttctattattctttaaagtttagatatgaaaaaaattaaaaaatgtaagatgttgactagaataacaaaaaaattgtgtacagttgtgatactgaaagtgaccgttttggtttgcagttgggaaaagggtattcattaatttggtgtggcatactgaataattcagttgtcatatatagggtttaagtttgtcacaggttggactctccagaagcagatgttgagacagagtttgggtacaagatgtttattagggatcaagacctgtgaaaggaatggggaggaagcagaactgtccatgttggaacacaatggcctgacatttatattcacgccgtgctcaattactggacgcaagctgctctgaaaagggtgtaatctggagtgaagcatctctctccagctgaggctaattccgaaggagctaacagctggaggccatctgctgagtgcgttccccacaaatgggccacaagcccttcctttaagggttcccttaatctcttaacagatattttgggagtgggtgcctgttcaaaccaaagattcctgctggctatactagtgtgtggtcagtttccaggggagttagcaggtaagcactggaagaacaatgcttagaacagagatcggcaaatgatagatagctcatgggtcaaatccagcagtgatccatttttgcatggcccatgagctaggaatgtttgttacatttttaaaggattgcaaaaaacatacaaaaatacctcgaggaatatgtgacggactgtatgtgacctacaaagcctaaaacttttactatatagccctttataggaaaatttttctagatcctggcctagaatcaagaccagccttagtttcaagtaaatattctacacctagtttttgcagcttgagaaatgagaactagaagttattttttactgtagtccttagaaggaagtaattggtgtgatcatcgattgtggcaggagatatttcttaaatggataatcagagcatgaggacctgcccagatgaggcctcttgaattggatccctaatttacttggggctttctgttctcctgctctggaaaatgatggtagatcaagtatttttaaagcacatttcttttaacattttcaactatagctgcgatttctctttaggttattttattaaagcaaccaagcgtttgataccgtgactacaacttcactgaacaagaacctcaatcctgtaaaaatgttatttgctccctggtagaatgtcactgatatgactttgagtttcatatcagtttcattgaacttcaacttgtttaagcagaaaggatcctgctgaaatccctgttgcttgacaaccccctaagtgcatgctgggtgttgactgttactttagagaggactccttagttgatcatttggttcagtgatccatgttataatttttttctcttttcatgccttattacccatttaaaatactttcattagaccagagagctgtgtatattttgttctttgagtttttgttcagcaagacactatttccttttagagtacatttcacataaaggaaaatgaaatgagcatggtaaattttatttataaactggcattttctgccagctggatttcaagagcattcacaaacttccacatttatgtattacctacgtggaagtgtaggtgccagaaaagaagccagtataagctttccaaataggagaaaatttactgtatataaaaggtcatccagctgcctgaacagttgtataaaaaggtcagcttctgtaggaagcagagagtgtagaggtagatgaagtagttcagatgtttcaactttaaatcttctataaggatgacagacaagatgaaggcaagagacaaaagaataaataatgttttgaatgtttcgtagaataagcttcttcctgcttgttgaacataaaatgattggaaggaaagattttattactgtgctatggtcaactgtggagggacagtatgatttcagtgctcacattcattgcaaatggctgtcatgcgtcctctattgttttcttagaactaaaaacaaacgaatggcagattatgagttctaaaacaaacaaaatcctaggagattaagagttcattattagcagagatatctggccagggattttgtttctttttccttttttttttgagacggagtttcgctcttgttgcccaggctggagtgcaatgatgtgatctcggctcaccacaacctctgcctcccaggttcaagtgattctcctgcctcagccacctgagtagctgggattacaggcatgcaccaccacacccaactaattttgtatttttagtagagacagggtttctccatgttggtcaggctggtcttaaactcctgacctcaggtgatcctcctgcctcggcctcccaaagtgctgggattacaggtgtgagccaccatgcccagtcttttgcttcttaaaatttgcatataatttgaagaatgtgtaccttgcattggcttgaagaaatttttaattttcctcttttatgtaaacaactcttaattatttggataaatgggtcagggaaatcatgggtaacaaacccaagaacagaaaattattggtctttaatagataatcttcaataatctttaatagacctctggtatcaacctgtggaccctggctgctgacaacagttaaatatactgtgatttatttttttattctctgttaaaaacatattggttaataataaaatggctagaagaatagtgacagagggcctggataattaatcaactaacttggtaaccagtcctcaaaatttgagaattcattatgcagcgagttgttagtttttaaaatattatctattatgtaagtcataatctaattttagatcctaatccagtctttacttctggaacaagtttatactttgacaatacaaattcagtcttacccaaggagaagctattgtctcaaaccatataatatatttcatgaaaatacagattaattttagattgcccagggaaacagctactgccattcttcttctattaatactttagtgtatagggcctgttgggagagggtggaggtgggggagtgcatcagaaaaaagagctaatgcatgctaaacttaatacctaggtgatgggttgataggtgcagcaaaccaccatagtacatgtttacctatgtaacaaacctgcacattctgcacatatgccctggaacttaaaaaataaaattaaaagaaaaaaatactttagtgtagaactcaatatatatattgaggcattttctatgtatagtgctctgtctacaaaagagacaatgaagtttaagtgcctaccaacatgggcattcttaagattatctgccagtccctgtgtgggtttcgcaagtgtttgcatgcatttatccataagagaaacaatttattgtgtgtctttctggcatttcttttctttctttttaaaaatttttaattttactttttgtaggtacatagatgtatatatttatggcatacatgagatgttttgatacaggcatgcaatgaataataatcacgtcacgtaaaatgcggtatctatcccaagtatttatgctttctgttacaaataatccaattatattcttttagttatttttaaacctacatcaaattattgactataatcactctgttgtgctatcaaatactaggttttattcatttttatttttatttttgagacaggagtcttgctctgttgtccagacaggagtgcagtggcacaatctcggctcactgcagcctctgcctcctgggttcaagcaatttctagctaatttttgtattttttagtagagatggagtttcaccatgttggccaggctggtctcgaactcctgacctcaagtgatccacctgcctcggcctcccgaagtgctaggattacaggcatgagccactgtgcctggcctattcattctttctatttttctgtacccattaaccatcccctcctccactgtatgttcacactgcttttcccagcctctggtaaccatccttctgctctctatctccatgagctcaattgttttgatttttccctacaaataagtaaggacatgtggtgtttgtctttctgtgcctggcatatgtcacttagcataatgacctcccgttctatccatgttgttgcaaataacaggatttcattatcttttatggctcactagttctccattgtatatacataccacatgttctttatctactcatctgttgatggacattttaggttgcttccaagtcttggatattgtgaagagtgctgcaacaaacttaggactgcagattatctcttccatatactgatttcctttcttttgggcccatacccagcagtaggattgctggatcacatggtaactatatttttagtttattgagcaacctccaaactgttctccatagtggttatactaatttccattaccactaccatttgtacatcaagtgtatgagggttcccttttctccacatgcttgccagcaattgttattgcctgccttttggataaaagccattttaacaggggtgagataatatctcattgtagtttttatttgcatttctctgatgatcagtgatgttgagaaccttttcatatgcctgtttaccgtttgtatgtcttcttttgagaaatatctattcaaatcttttgtccattttttgatgggattattagttgttttcctatggagttatttgagctccttatgtattctggttattaatcccttgtcagaagggtagtttgctaatattttctcccattctttaggttttgtcttcactttgttgtttcctttgctgtgcagaagcttttaacctgatgtgatcccatttgcccatttttttgctttggttgtctgtgcttgtgaaatattactgaataaatttttcactccaatgtcttggagactttctccactgttttcttgtagtagttttatagtttgaggtcttaggcttaatttttaatccatttttatttgatttttgtatatggcaagagataaaggtctagtttccttcttctgcatacggatatccagttttctcagcaccatttaatgaagagactactttttcccccggtgtatgttcttggcacctttgtcaaaaatgagttcactgtaggtgtgtggatttgtttctgggttctctattttgttccatagtctatgtatctgtttatatactagtactatgctgttttgtttactctagctttatagtataatttaaagtgaggtaaagtgattcctccagctttttttttttttttgttggaggggggctttaaggtagatttggctcttctgggtctttactggtttcacataattttaggattattttttctatttctgtgaagagtgtcattggtattttgatagagactgcaatgaatgtgtatatcactttgggtagtatgtgtcaggcctctaacacatacctctaatacatatgatggccaagctaagccatcataacccctgtgacctgcatgtatacatccagatggcctgaagcaactgaagaaccacaaaagaagtgaaccacaaaagaagaaccacaaaagaagcaactgaagaaccacaaaagaagaaccacaaaagaagttcctgccttaactgatgacattccaccattgtgatttgttcctgccccaccctaactaatcaattgaccttgtgacatccctcccctggacaatg

SEQ ID NO: 2560 - DNA, 6135 bp, Homo sapiens
aagtgacagagtctctgttgcttaggctggagtgaagtggcatgatcatagctcactgcagccataaactcctgggcacaagtgatactcccacctcaacttaccaagtaggtagaactaaaggtgagcatgatcacacttggtcaatttttattttttgtagagatagggtttctctatgttgcccaggctggcattgaactcctggccttaagtgatgctcccactttggcttcccaaagttataggattattggcatgagctactgtgcacaggcaaatttactttctttataaattacctagtttgtgatattccattatagtaacacaaaatgaactaaggcaaaggactatagtcagaattacctaaaaccatgttgggaaagcattaagcaggacatatggtctaatttgccataggttctcaattcatgatttttttctccttttgattccaagcccaattgttttttttcctacagcatagggtgaacccccaacatcggaggcaggtctcagttaatttagaaagtttattttgccaaggttgaggatgggcaaccatgacacagcctcaggaggttctgagaacttctgcccaaggtggtcagggcacagcttggttttatacattttagggagacatgagacatcaatcaatatgtgtaagatgtacattgggccaatccagaaaggtgggacagctccaggtgaaggcaggacagctggaagcctggaggggacttccaggtcataggtaggtaagagaaaaatggttgcattcttttgagtttctgatgagcctctccaaatgaggcaatcagatatgcatttatctcagtgagcagagtggtgactttgaatagaatggaaggcaagtttgccctaagcagttcccagcttaactcttccctttagcttagtgattttggggccccaagatttattttcctttcacaatactataaaacatgttaatgcacttctattagttaggttccttttgattgcaagcaacaactacccaattcaatatagcttatgaaaaagaaaatatattttaaggatacaagggtatcttggagcatctctgagaattcaagatttcaggaatgatctgaggacagggaagggagtttctctttgggccacttcttttcttttctttttttttttttttttccccaagacagggtctcgctttgtcatccaggctggagtgtactgatacaaacacggctcactgtaaacacctcccaggctcaagcaatcctcctgccccagctccccaagtagctgggactacaggcatgtactgccacacctggctaatttttgtattattctgtagagacagggtatcaccatgttacccaggctgttctcaaactcatgagcgcaagccatccacctgccttgatctcccaaagtgctgggattgtgctggcaggagccaccacacctggcttaaatgctcctcttgatggttggcctctttctctggcaatggctggctccctctgctcctcaggcacagggggtgagatgcacagtaacaactctgatccaatccagctggttctttttagaggaaaaacctatagctggagcagtcaacagaggcaaggtcaccttgtggcagctgcagctgcaaacatgggaaggaagcagggggcaggggagggcaggagatcatattttggaagagggtgctgggcagaccatccaataagggctaatggcagcccttctctaagaatgagaaatgtcattctgaccagcagttgacagttaagggtcatccaaatgagctacatgcttatcctaaaaggattggctagagacaaaagaggaagtgggttacacacttatccaaaaaggattggttagagacaaaagaggaagaagaaataaaagggactggctcatttcttctgaacttcctgtctgtaactttgtcaggcagagcctgaagtgctctgtggttcctgggctattgcccggcattagcaggactggagtttggctgcagagggaggcgagagtacaaaagatactcgggaagctgattgaaagccattaaattgtttttagagccaggaaaggagacattaaaatgtcttaggagctgtagcctgagatgaataccataagagcatgttggatttaatcagtgacatacaaataggctaaaggaagtttttgttgttgttttaggcttttttttgagacagggtcttgtcctgtcactcaggctgaagtgcagtggcgcaatcatggctcactgcagccttgacctcccaggttgaagtgatcctcccaacctcagcctctgagtagctgggactacaggtgtgcacctcgtctgcctgatctttttgaatttttgtagagaggggtctcgctatgttgtccaggctggtctcaaacttctgggctcaagcaacccgcctgccttggcctcccaaaatgctgggattataggcatgagccactccatctggcctcaagatgttaaatgcagtctaggtgggattcagacttccccctaccccaagtggatgaaaaagtgggtgcaggctgtgagagttaaactgacactttgaggtgctgccattgtaaatcagagagttaagaaaaacaaatagctacatactgtgatgaaccagaaataaccaggtcatcctgtgcagttcagttcccccaaataaaagaaacttgagcattcccatactttactgattccctaaggaaaaacggcattatctcttatgactgcagtgcttacctatgtcaggggatatgatgtgacatttgtgggtttgataatcaagtgacaacatttctaatttcacacagtgagcagcctatcataaacttggtaaccttggcaaatttgtagttatttccctttggtttttttccatctttcaatggattcgttttctttttaagtagagacagggtctggctgtgtcacccagaatgctgcagtgcagtggcacgaccatagctcactgcagccttgaactcctgggttcaactgatccttccaccttagcctaccaagtagctaggactacaggtgtgtgccaccatgtctggctaagttttgtttgatttgtttgcagacatggaggcctgctgtgttgcccaggctggtttcaaacacctgacctcaggtgatcctcctgcctcagcctcccaaagtgctgggatcagagacttgagccactgtggccagccggaatgtaaattccactgaatttttttgtgtgattagccttcttgccgaagccttgacactcttgcaagcctttgcgagtacatttcttctatttcagaagactccttgctctccaagacttttttctacaaggtgtaaccagaagccaggaggcctgttgcaaaaccaatcccatttgaaagcagagaatgtgaactcacctattgtcataatgattataaaagaggctttggctcactcctgtaatcccagcactttgcaaggccaaggcaggcagatcacctgaggtcaggagttcaagaccagcctggcctacatggcgaaaccccatctccactaaaaatacaaaaattagccaggcatggtggtgcacgcctgtaatcccagccactctactcaggaggctgaggcaggagaattgcttgaacctgggaggtggaggctgcagtgagccaagacggcaccactgcactccagccaggcgaccgagcaagactctgtctgaaaaaaaaaaaaaaattatgaaagagggtgggtgcggtggctcatgtctggaatcccagcgttttgagaggcaaaggagcgaggatcactttagttcaggagtgctagaccaacctgggaaacatagtgagaccctgtctctaccaaaaattaaattatttgggcatgatggcacatgcctgtagtcccagctacttaggaggctgaggtgggaggatcacttgaggttttagtcatggaagtctcttgccctggaggtcgaggctgcagtaacccatgatcgtgccactgcactctagcctgggcaacaaagcaagacactgtctcaaattaaaaaaaaaaaaaaaggcttagggagttactgaagaatcaccctgggctgtagttcacagggagtgtgcataggttaaggagaagacatctgcatgagtttcagtaaagagatacagttgcggtggctgggcaacctcgtaaacattctgggaaggaatgcagaatgcaaaacccagctgaaaaatctagaagaaatcatgtcccagttaaagaagatattcctcctgagtccttcaagctctgctactttaatgagatgcaaagaaagcttgcagagctaaggaaatagaggataaagcatcacccttacagaatcaaaaaactggaaacagcaaggaacagctagaaaatggctccatagttctgaaaccacttgctacaccagtggttctaagtgcagtcccagcaccagcagtgtcagcaccacctgagaacttgttagaaatgaagtgaattggtgtggggagtggaaccggcaatctggcttaatcagccctccaggtggtcccgatgcccactaaaatttgagactatgttcttctccctctcaggctgaagagttgggcatagcaatgttgttcagctccagattccagaactagacacgtttctcccagggagattcttatgaacattccttttcaagaacagaaagaggccaggcgtggtggctcatgcctgtaatcccagcactttgggaggctgaggcgggtggatcacctgaggtcaggagttcgagaccagcctgaccaacatagagaaaccccatctctactaaaaatacaaaattagccaggtgtggtggcacatgcctgtaatcccagctgctcaggaggctgaggcaggagaatcattcaaacctgggaggcggaggttgcggtgagccaagatcatgccattgcactccagcctgggcaacaagagcgaaactccatctcaaaaaaaaaaaaaagagagagagagagagaaaagaaagagaaaaaaaggccgggtgcagtggctcatgcctgaaatcccagaactttgggaggccaagttgggcagatcacctgaggtcaggagttcgagaccagcctggccaacatggtgaaataccgtctctactaaaattacaaaaattagccaggcatgatggcagatgcctggtaatcccagctactcaggaggctgaggcaggagaacagcttgaacccaggtggcagaggttgcagtgagctgagatcatgccactgcactccagcctgggcaacaagagcgagactccgtctcaaaaaaaaaaagaacagaaataatcaaaccacagcatcaattcattcattcattccaccaacatttattaagcagcaagctccgaagcagacgtttaccagttttgcacaactttgtcatggaccaactggccttgtggctcagtggcatctggaggcaagagggccaagtagacaggggtctcagccccctcctccacagtcctgatgctgtctttcccatccatgtctgtcttcactggtcctgggcagcacgcattcaccagaatcctgtcagctttcctcttctcatccagacgcctggccaggatcctcgataagaccgtgacccccaacttggacaccccataaggctttgttctcagaaacttggcggctacaaggaattaaatgtgaatgggaaaggaagaaagaaaaacacagatcatagaagctgtgccttcgaggaaataaatcctcttaaggggaggaggtgtcctctttgatctgagggcacacctctgggagagaggccagaggctgacagtcagcctcgtcagccagatgcgtcatcagccctgggaagggctgcacccacaccaccctccactgaggtccaggtggccccaccggtcccgaaacacctgctgccttactctagaaagagtaggcaagttgcgccctctagtggcttagtagttgcttgtcctattgactcagaaccttgaacaaataagcaagtcaaatacagatagatggtccctgccctctgatggttccacttaggacttactgacttca

SEQ ID NO: 2561 - DNA, 9457 bp, Homo sapiens
cacaagttcctcttctgttagtccaacatcctgtgacaaggatgtgatgaaattcctatgcagctacaatgacttcagtctttcttttcaagaggctccaagtaacctacaaaatacctctgatgaaaacctagaggaaagaaaattatgcattgctattatttttttttccagggatgactggaacatttgggtgcagggattttgttccatatcagccttctcctactttatattctgcgccaagtcagtgaaacttgataaggttgagctctaggcctgccatttgtttctctgacagggcccttgtgatggatttgaaggtcaagatgaccacatttggtgctgataaaaaagtataggaaagcacctcccctgactggagtctgtgaagatgggtgatggccatttttcatagactatatcagttcagttccggcttaaaaaaaaactttcaaagtaaagatatttctgacagttcaagaataggctattttgagaattccctttcctgtaaattataaatgggctgtaatactgtgggagaaggttttcatattctactgtttcttttttttgagatggagttttgctcttgttgcccaggctggagtgcaatggcatgatctcggctcacctcaacctccgcctcccaggttgaagtgattctcctgcctcagcctccctagtagttgggattataggcatgtgccaccatgcctggctaattttgtatttttagtagagacggggtttctccatgttggtcaggctggtttcgaactcccgacctcaggtgatctgcctgccttggccttccaaagtgctgggattacaggtgtgagccactgtgcccggcctctacacagttacttattgagcccagtttgattctttgtgaagaacagattgtacgaagttgctttcactaaaaggttaaaatgcatgtgcttgttctgtgcaggtgataagggattataccatccactgaatgttttggggatattgtttttgatgtctgagttttaaactgcaatgataaattgagaattcctgttgtttgttccccattatataattggtgaactccactgtgtcgccatgttgaaagggtgagatctgttctcttggtggcgaagtcctttcttgagagtgagtgttcatcctttaaaatatgccagcagtcttttgagcatgacagccaaacagtgccccatcttcatactttttcttatgactgcttcaagtattcaaaggttgcaatgaaggccagctgatgtccatttagtctgactctgtcacagtccaggagcagtactgggtgggggctgtagtagccaagttacatccatggagctggttgctcttctatagggtgtagggcaccagctaactaaagggacttcaaagatgtttaaaaatggaagcaccagaatgtatattaacttagacaccgtggaaagcagtttggagatttctcaaagaacttaaaacgaccactcaacccagcaatctcattcctgtgtatgtatccaaaagaaaacaaattgttctaccagaaagacacatgcacttgtatgttcatcgcagcactgttcacaatagtaaagacatggaatcaagctaggtgctcatcagtgatgaattccataaagaaaatgtgataatatacaccatggagtactacacagccataaaaaagaataaaatcatgaccttggcagcaacatggatgcagctggaggccattatcctaagtgaattaatgcaggattagaaaaccaaataccgcatgttctcacttataagtgggagctaaacattgggtactcatggacacaaaaatggaaacaatagacactggagactactagagggtggagatggggagggaggtgtgaaaaactacctgttgggaactatgctcatgatttgggtgatgggatcatctgtacaccaaacctcagcatcacacaatagacccgtgtaacaaacctgcacatgtactccctgcatctaaaataaaagttgaaaaagaaaagaaaacggaacaccaatgagatgttcactattattggcgctaaagtcatcacgattgcactataaattctctgcatttaatagatgtttactttagggcccactgtgtgcccagagttgtgctaggtgctctgtgagcacaaagaaaaataaggtttggatctgttttttgaggggcttctctaattggagagcccaagagttaacagcaatggaggcagaatataatgatgacaaaaatgagcctgcagaacgtgaatggtattgaatgttgaaagcttcttagaaaagtttaggtttaaacaattttgaccagcagactttgattctgttagacacacacttgagatccttactgttaccaatgaggaaggtactttcaatgaaatattttgtgtttgaaaaaatatttgagctattttagagtacttttacttaactttgtcttaatattcttatgccacagttagcttttgaggggcacacaactcatctttattttgctcacttagatacggaattatacagaatgcacctgtgtccaaagtcgccaagtgatcactccacccaccgtgggacagcgaagtcagctccgtgtggttattgtcaagacttatctcaatgagaacggctatgctgtgtctgggaaatgtaaacggacctgcaatactcttatcccattcttagtttttcttttcatagtcaccttcatcacagcatgtgcccaaccatcagctatcatagtaacactcaggtccgtagaagatgaggagagaccttttgcactgggaatgcagtttgttttgttgcgaacacttgcatacattcctactccaatctactttggagcagtcattgacaccacctgcatgctctggcaacaggaatgtggtgtgcagggttcttgctgggagtacaacgtgacgtcgtttcgttttgtgtattttggtttggctgccggcctcaaattcgttgggtttatttttatttttctggcctggtactccataaaatacaaggaggatggactgcagaggcggaggcagagagaatttcccctgagcaccgtgagtgagagagtgggacaccccgacaatgcccggactagatcttgcccagctttcagcacccagggagaattccacgaagagactggcctgcaaaaagggatccagtgcgcagcacagacctacccggggcccttcccagaagcaataagttcctctgcggacccggggctggaagagagccccgctgccttggagccgccctcctgaagcttgaaaatggaagaatttagttttgttggttgaattgaaaatggcgacttgagaaacaactgtgccttcttttctttctttcttttttttaacctctacagacacaatcctcaaaccaacaaaactcagtatacacagccgctattcattgagggctggatacctcaacaagactgagagcctttccccgcttctctccaagaaggagacgttcagctagatttgttcccatttccgttgtgttaattcaaagctcatgctcccctacggtacaggctgaggtacacggttagcaaaaccatgggaaggggaatggcggtgcatatcattaactaacactccaaacaaaggtgagcttgcccaggacttggcatttccaaatcaaagtttttagatatgaacacctactgtgagttctgctacaaagcacaaatgaatttgtctcaactatgcaatttgattggaaaaatgtatgtgcagcatgttacatttactttcacggaataaagcagatatgtttctgaaaagaggaagctgaactttccatccagtactgttgatagcattttaagccatagcagttataaatcaggtagagtttttcaaatgcttcagaggaaccataggcatagtgtgatagaaggaacagctacttcaggtcgtaggacacattctctttcagtctgcctgccccatcctaagataaagaggctgctgaatcataaatctgatagcttaaatataaactccagtattcttttgtaaggagcattaaaactagtgtgctaaacaatatggctagaaactgtaatttgaaatgcataatagggaaagaaaatgacagctttctcatccaagaaaattgttgcagaaattttctttagctctacgggcccacaaagtcactgggaaaagtcccacctgagtattttagttacatcttgaaagcactggcaaatctgtgtggttttctttttttctggacagaaaattgctgtggttgctcctgaaaatgcatacttatatcaggaaatctgtgcctgggatatgaaaatcacttagaatacaggaggagggagatctgtgttctggaacagaatatgatcttaagtaattgttgaaaattatgtaaaataaaccagtccatccgaaagaaccctactttatcagagatagaatcgttttacactaccctttgattcccccttactgtaagtttctggcagtgattctgagagaggatttttctgttcctaaatgcactttgggttcattacccatcattcttttcagtacctcccagcacatcactttgaagtaagcatcatagagaatgctttctacatggctcttaagatagatgcttcctgacggcgctaacggattgacagcaagttagctcaggggttctggctgccagggagtgtaagggccaaatgctgatataattgtgaactttttctgccaaggagcctatggtcatggagggctaattagggaaatgtttttctcttctggtttacccttatccccagaagagatgtgattgacagactgttccatgattcaggcttctgctctccaaccttgcttgactgcacaggtggaattgtgcaaatactcctgggtataaggctgtttccctctcttcctaggaatgacattggtcaaacagttctcttggttgcatacagtttgtgttaacactgttagactgaacaatgtctacaaggggtggagctagtggtctcaggggctaaggacttccctctggttcctgggcttggctctcggggaggtgaggattcttgcttggttaagactgtaattgcactggtaattgtcagactctggccaatgtggcatatattggaagtattcaaaaaatcttgctgattaagaaaaccttgctgattgaactagtgtctcctttggggcctcagggttcccctttaccctctatgggagagctctgatcctttaaaggagaaattttcctttggtgtgggagttaaagatatgtagattggagaggtgtggtgttttcttaattttcttctgatcattaagatactgcattgagagaattttggtgggattggcactttttctggtagctaagattgctggactcagcacggagtagttagagagcccccttactccctttgctgccatgaacagtcatccagtttggcgatcactgatcaggtgccaggtatcttcaggtgtcatattacctgattaccatctgccactccataaaatcctttgggatgattgggccagaactcaaagaaatgggcctgaaatgtgcaccacagtgttaatattgtacttcctcaagtatctgctccttataaatagcaggtatttcattaatgtgttgttggtgaatgtagactaagtagtaaaaatcatgagaaaataaagctttggaatatgtaccaattaagagtggttcacaaaatacttggggctatggtagcatcactggaatattacatagccaactgaagtgactgttttgtagatgataccatttaattgtatatatagggtcttatatgtttcttaataaattgatcccattactttatagtcacagctcctattagaagttttaatgaagactctccatgagcttaggcttcaaattacttgttttggaaaaggtcatcttgtcctttataaactgtaaattcatatattatttagctttaatatgcaaatacaatatccttgagttcatcctattaatttagaaactcccaggaggtaagatgggtggttggagcgcattctttggttattttcattagcattaagtccttattctttataggtggatttaattcttgaaaatattcaaaagtaattcagagtcaaggtgttggggatggagagaaaggaggaacagagaggaaaaaaattagcatttgttgagtgttgacgatttgtagagcattttgacaagcacttaatatacatcatcattcattttgatcctcttaattaccttgcaaagatttgattctttttttttttttgagacagagtcttgctctgtcacccaggctggagtgcagtggcttaatctcagctcactgcaacctccgcttcctgggttcaagtgattctcctgtttcagtctcctgaggaactgggattaaggtgtgtgccaccacacccagctattttttttctatttttagtagagagagggtttcaccatgttggccaggctggtcttgaactcctgacctcaagtgatccacctgccttggcctctcaaagtgctgggattacaggcatgagccaccatgcccggctgattttattatttttttaaaaaacatatgaaaccaagactcagagaagtaaaataactcatttaggatcatacagaatggtaaagtcaggattcagacatagatttctctcactccattattcattttttacactacgcaatgtatacaatagcttttggttaacaaaggcaaggtgactataaaatcgtgagattaaagcatttcaattttttgatatattaccgtttatgaagagtagagaggtttttttgtgtaaataaaaaaaactgtaggaaacatctgtaggaaatatcaagatttaatgtttaactagattttcaaggtaaatttacatttatttagctaagtgttatattaaagttatttgtcataacatacctcaaatatttatttatagttcatatttaatacagaacaaatctagtcttcgtgttaacatcgggtctcggcagagtttctgaaatgaaacattatgaagaaaggtagttcagatttgttgaatctgagctttagggatttcaagtgtatttttttttattttcctctttcagaatattaacatctctattagttttttgatgaatatgagttttaagattcctaataagggttttaagtgaacacacataaaatacatatcaaaccactgatcccgattgttccctttagtcgctgtgacattgttacctttagtggcatgcacttggaaatgtcagccttcagagaagggggagttacatggagtaaggcctcatggatgtcatggtggtcctccatgttcaccaaccaccaagaaaattcttcttcagtccacaattccagcttgcgctctttggtgcacttggagccagaaagtgtctttttggccctgttttgtagaaaccgtgcatgtaccaaagagaaactttagagtttggatggagctgaagcattgatgggaattccctagtgcacccaggagcaggaggcaagcccaagcctcgggtggtagccaattatattttgtgatcgtgtatgtacttaaaacatcagagatgacacagcacatgaatataactattgatatgtaggtgcatactgagtattctaagtagcagatagataccaaaatactgtataatcccagaattgcctaaactgcaggtttgctagttctctgttatacagaccagtaggtagcctttccacacatttgtgttttctcttccataataagagagtgctgcggctggcaggcaaaggtagttgcctcatgcactttatctttttgtctttttctcttcttcatcttttgggatgctgctggctgtatctgtcccaaacttcttgttgcattagaatcagatctgtgtatgtttgaggaggttttattttaaagacttcagttttactcagctctaggaagggtcaaatacaacaacaacaacaaaaaacagaaaacaaaaaaccctccctaggtgtttgcttttgcaacattaaaaaaaatgccttggtgctaaaaagtatttaatgacgcatgttcaccactaaaaagcgccactgaattcacagtatttcactgctaagtggctgcatgtactttgtgtttggaaatctgaagaattttccagaaaacaagcatccattactctcatttcaacagttactccatctatgctgcaaaaatgaagcgtgaaaggggggatacttttctatggaatactcagtgcttttgatatttattttagcaagaataatcagatgccaaaaataatttcagagaaaggtagaaaaaatatttcaggtaaccttttcttatttcttctccaaaaagattacacccatgtaaggtatttttaacactggggttttgaaggtgttatcttttctggtatcctatcactacatgttaaaattgaaggagaaaatattattgaaactaaagtaattgcagggacacattaaaccaaaggggtgaacaaaagaggtttaaagtttgtatctagaaatgaaaaataagaatcattggtaagactagtaccgattattggcaattggtaattgataattggtaagagtagtaccaaataatgggcatttttcttaaaatacatacctctaccccaaaccccaaatgttaatttagaatcctgaaacaggcaagtcaggctctgactcttttgtttaaggaaatgtaatactgtgtcaactaaactggcattaggttcttagtggagtgtgtgtttgtgtgtgtgtgtgtgtgttttgtgtagaggtatgtttgtgatgaaaggttttgcactgttgcataaagaagtttgattttgtgatttttaaaatgatattcatttggagactttttaaggtaatttaaaagatgtataatttccgtgtgtttaatgaaatctgttgtcgatgtactaatcttggtttacagcatcttgaatacttgattattgaaaattaagaaaaaagttaaaaatgaataaagtgtgttggactgaaatgaaattgtttctagaactttgttgtttgaagggatgaagcaatgagaccaatgcgattgtccacccctcctacatcattaactccttacctaactgttaactctacattgaagcagaatgttctatgtgtaaagttttaggagtatagtttaaagagccatagcatgtttttttttattgagtctccaaagagaataattttaagtaattcatcacttacttattgaaattcaaaacagactttcagaacacagagctatgtaccttgaatgtgatttgttaagttatacttaaataacatattaaccctgaaatc

SEQ ID NO: 2562 - DNA, 111613 bp, Homo sapiens
gtgagaaaatgttctttccccagcccccaaacactgcagaatgcccccttcccttcttccggggccctctccgccgccctcctctgcttcattcagcgctgcctgtggcggagggaaggcgtttcccgactggggcgaggtcagggcccctccgctggttctgtctgtgggtattttttcttttaaatccctgaagtcatcgacgctttgtagggagagcgcgttggctttcgccgggcgcgcctgggctgaaacctgcgggtctctctccaagcggcgctggccgtgacctgcgttcgcaccttctcgcggccctctctgcgatttgcgagggcggcgcgcgacttggagttgttcagtgtctccgaaaagttgctcgtgcgttccacaggagaggggacttttaaacagatggctggcaaggcaggtatattttctttttcttgctttgtctgaaaagtagacatctggcggtggttaggggtacgtttcccctggagatttagcgatttctgtccttggtgctgaagtaggagggtcccagttagccttgggcttcaaccgggtgccctgggaaagactacacggaggaaaagaaagaaaatcagaacctttgaatgaactgagatattgagaaaggccattaaaaattgaatgaaaaaaaccccaccaaactaatatcaaataagtgtgattcttttatgctgaagtcttgcaaaatggtgtgctgtttcaccacgtttcctccattgtctatctctaattgtttataaagttctttaaaaggtttgtataagttatctttaaagtggtgtgtctattaatcttgcaagggctaattcagtttctgtgtcttgattttccttttacaaactgggagtggggtgtgggaagagaacaatgacaccctaatacatctagacaagtgtctttttgccaagaaatatacgtttttggtccatgaattccaaataattttacttttcaaaaatttaacaacattatacaagatttcgtgtttaaaactccatatgttattttggagagtctgattcatttggttatggcacctattttcactctgttcttgagctatgaaaattatatttggaaagattataatatatgtaggtttcattcattcttatagatctttgactttgtggttactcatcagtctaaatgaaatataaaactacttaaaaagacctaattagaattaaatagaaaactactaaaaagaactgatttatgaaattgcagaacacactttcaaaatggaatcagcaacgagatctcatttttacttccatgcagttcggaagattatttgtacattattttttgccattatatttgtaagtactaaaacgcatcataccactatattctaaacgaagtggctttatgttaaagtttcgtgttttgatatacatatttcaagaagccagtagagatatgtgttattatttcattttttcctggtccacagtaaatataatgtgaatagatcataacttgggtatatgtctcttagaggtgaaaattttaaaactgtgtagggtatgtaatgaagacagggcagtctctcatgtcaaattaggaaagatattcagtttacctgcagagtcagtttcctaaatagcgatagatccaaatagaagggttaacttatgtgattggacagcatagtttgttgcaagtatgggactgatttagttgtaacacattctcaataagtcactacccatctttgaaactcattatttttatctgacaacagtggaaatgatagacatagcctgttatatatatatatatatatatatatttatttgagtatactctaggtttaacagtgagtctgtgaaaacttgtgttttatttatatatgcatttttacttagtggggtagaggaattcttgtaaaatggtatttagttccaagtagtgaagtttccttcccaccctttccacagacagaggtaatatacggttttgtatcagaagactgtttctgggaactaaactacctttacgaaaattgtgactcttttaaacttatgatctagtgtaactaacatggccttgctgtttcctaattagtgcataaatgtaaattactataataatggtacctacctaatagattgttgtaagcattaaatggattaatagcagctaaagatttagttgagctctcatagtatgccaggcactgttataagaactttaagcctactatacaccatgtgcttagtatattttaggtccttttatcattgtgttctattttaaagcgatatttttttcatgtggtctgtgccattagtatgacctcacagcaatttttcatgtaatattgccatgcccagtgtgcatatgcaaattgaggtaatgatatcaaacattttttttcacagagcaaatgtataaaaacagctcagatgaaccactctaatttttaaaactaacttaaggagaaattaagtaatattttaaacaatgtaagcatgtataacaaagttttatgccagctgcttcttctccattattttacagttgagggaggtgaggtccacagaaaggaaataacataatttgttacagtaggttaagagattctcctaacagattgctgaatagttggaattataagcattttgatattttatttaagttttattaaatgaatagtactaagaaaatataaactaatcatttattttgagctttttagtatcattaaaatatattattgctccggtctttcctctacattatcagatatgaatgtcttgtctagtttatccatcatattagtttctgagtcctttgtactgcagtaggatgggtataagctatcaaatggaggacaatctcagacaaggttgagtggattgtttaaggctaaattctgggtctcttatgattcttttttttccatttctcaaaatgaatttttttaagcatgtaaaacccatccattaaatgaaagatttcaagtttaagatgctaaacaatattgctaaggttaaatggcacttgtattaatctgataatatattaagtttttagtttaaaggggaagtaaagcaagttcatttttctctagagatagaaactttacaaagaaaaagactcacagaagagtagtgattaaaacaatagctaatgcctattcccattcctctcaaaatgtagtcaggggaaatgtggaagcaatccatcagagtggtgttaaaattgcaggttcctcatcacttcagcaggaaagaccattaaaatgttgtagaagaggaattcctgtcctaatgatcaggctcctgagaaagctgggttaagtctcaatctgaaacagaagggcagcatttttggcagtaggtccctacagtagtagtaatagtagcaggtgtgtgtgtgtgtgtgtgtgtgtgtgtgtgtacacacaattgcttccttgcttgcctgtgttatcacttgggctgccccagaaaatcaacctccttctgtgtatagttatgactcttctgcgttatttactcaggggcttctcaggctggtagcctgaaggattatcagatgcctagagactgagctaaacaatcacatcaagtggccttgatgtggaattgaaacactgtaggcaaaaaaaacctcaacgatcctataaaaaacacatacctcaaactccatctttcctaatccctgaaaacctatggcctttttactatctctatagtttagcattttctagaatgccatatggttggaataatatagtgtgtagcctttttatattgacttctttcacttagtaatatgaatttaagtttcctccaggtcttttcatggtgtaatagctcatttctttttagcactgcataatattccattgcgtggatgtaccacaatttatttatccattcacccactaaagaacatcttggctgcttcgagacttggaaattatgaagaataatgttgctataaacatccttgtgcatgtttttctgtgaacataagttttcagcctgtttgggtaaatatcaaggagcacagctattggattgtatagcaacagtgtttagtttggtaagacagtgtcaaactgtctttcaaagttgctgtagcatatggctgtcccaccagcaatgaatgcaggttcctggtgctccacatttttgtcagtgttgtcaatgttttggattttgggcattctaataggtgtggagtaatttctcattattgatgcaatttacaattccctgatgacatatgatattgaatatcttttcatatccttgcttgccacctgtgtattttctttgttgaggtgtctcttaatgtcttttgaccagttttaaatcaggttgttcatttctcattgttgagttgtcattagcacttttcacccaatattttgggtccttctgctgggcatattgttggatggcattatcccattcactggaagttaggtgtggccgtatgacttgctcagacaaatgaaatgtgagcagaagtgacacactggaagctttcatagcctgagcacaactcacctcaggttctttgctgcagctgacattcaaggcagtggttactcccttagcctgtgtacctgagtatctgtgatgaagagccccgccgtatgacctatgatagacatttaatgcaaataaaaagttaaaacttctttttgtgagtaacttcaatttttaagttagtgtattatctaacttgcctttgttgatataataaggcggtgcagcttaaataataagatttaatggaaagttactgagctatgttgaagcctgttttcagttaaaatgctctaatttctctgtgatatcatgtgtagtatataataaatagatgtattgatttctgtttgtagtcttttgataattagcttagcataccaaattatgaggttttgttattaccattctagttagtgtgtgtcctgaggctagttggtgcattattccttaaatgatatcgatctcttttccaaagatgtaattaatccccactgatgttttccaagaactttgagattattctttcaaagttgtaatttaattgcaagactctgaaaaactcagtcattcctttctacttactctaaaatgtggaaattaccttttgaggctcccgatcacatctaggagaggaagagttatctccattgcctggaaagcactgacaatgtggtagctttcatcactgctgcagttttgccaggcaatggaaactgcaaataaatgctccttttcttctctcaacttataaacaaagagttgtgtgcattgggaagaatatcagggaagtagtttatggtgaaaggataggctcaatgctcccatctggctcatgggccagcaatccatttgcccgactctgtgttaagcacagcagaagagagaagggaacccagactttttctgaagcctaggatacttgcaccatgccaattaaccttccaaattgccacccctcccttctttctttccctctccatctgagattagaaagttagagaaatatgtctcttgcttcagagattgccattttccaatttagcaaaaaaaaaaacccttcaggattgattgtatctaggttctgtttcaggcaatagagactcagcagggaactctatacctataagcaaaaggtgtcatacaaggccaaagtgccaaaatgaagtaattaggagtctcagtttgtttcagttcaacaacccttacttgatttaatgtttaatggtagaagtcacctcaaggaaggaataattaattcaatctaagattcatgataatctctctgagcttgaaaagcatttaggagttcacaaggaagtgctggggtatgacagatgagagctttaatggaaatgagtagtatctctgtatattttactggaaaaaaatgtgtttgaatacaactaagataaagatataaaaagaagcaatttttaacaaaaggcaattactctacaactcagttcaagtctacttagctttgcccatattcagatatcctgcaaagttatctatgtgataccttttctctgctcttgcttcaacataaatccatttatttacagccagatatattagaaatcagcttcttagaaaggtgcaagttctattctgtggtaccagagttataaagagacatccagcgagtacttatagatctgttatctcagtttctatggagtatcttaaaacaatggaattattgttctttgtctaatttagtgtatgcaattgttatccttatgccatgtaattttcactggacaatattatgaatgtcatgtttgaatatttcttctgatgccattaaatgtggggcatttgcatttcatagggtgacaatcagaaagatactgtgactttttttgagacaatctctctttctgaaatgatctttcttgtttatacataagcttctagtaccgacctaccccctccactcattactgtttatagaaacgatagcattgcagttggtgtcactgattgcccacgttgttacttcaatgaagccagctgggatgcgattgcatggtctttaaataaaacttagtgacacaagatgaatctctttttttgaggggagaggggttgttgctagctggatcatttttctaaggcactaattatttgcttaacttggaggaacttgagaaccagtgaatcgccatgttggttcagcatctgaccttggctctaaggaacttgtgggtggatagcagagttacagtcattatgaagccattctcaaaatgatgatgatgatgatccttttaccccaactaattccaccattatgcaaataagtctttgactagagatagtagatgtgcctgtagttccagttcctaaaaggctgaggccagaagattaattgagatcaggaattctgggcagtaatagccctttcagcctggtgacagtcttctgttcacaagcagcctggggattacctaaaagtggtgaaaaggagagtgaaaagttggtgttgcattgtctaaaactgccatggtacggaatatggagaacatcaatcattacctttgacctttgggcttgcaaatcttatcgtgagataaagtaagatagcattcctccttacagttatagaagacaaattaggaaaccgagacttccccaggtgaagatttaggtctatgtacattattttatcctgaaaaaatttataaattttaaatatatttatatctatttaaaatgtctgtgtgcttgtatgtgtgtgtgtgtgtgtgtgtgtgtgtgtgtgtgtgtgtgtgtgtgtatttggtcaaatgcattaaaaattgctaatggcagtataaactacaactaaatgctaagccccttaattgactgactggacccccctctcaaccaagaggctcaccccagaagagccttaaaagctgtaaaaactgagttcatggccgggcacagtggctcacgcctgtaatcccagcactctgggaggccgaggcgggcagatcacgaggtcaggagatcaagaccatgctggctaacacggtgaaaccccgtctctactaaaaatacaaaaaaattagccgggcgtggtggcaggcgcctgtagtcccagctacttgggaggctgaggcaggagaatggcgtgaacccaggaggcggagctttcagtgagccgagatcacaccactacactccagcctgggtgacaatgcaagactccatctcaaaaaaaaaaaaaaaaactgagttaatggccatgactagatgggaggtcagattcgccgttatatcctctctgttttgcagtttagacacaactgaccagcattgttaaaatggagatcatacggctgttagaacagactctttgtggccaaaaattagcaaattataaatagaatctaaagccatcccaggcaagggttaagttatgcacccctacacttaaagaataaactatgttagccgggctcggtggctcacgcctgtaatccaaggactttgggagactgaggtgggcaggttacttgaggctgagagttcaggaccagcctggccaacgtggtgaaaccccatctctactaaaaatacaaaaaattagctggttgcagtgttgcgcagctataatcccagctactctggaggctgaggcaggagaatcgcttgaacctgggaggcgaaggttgcggtgagccgagatcatgccactgcactccagcctgggctgcaaagggagacttcgtctcaaaacaaaaaaacaaaacgaacaaaacaaaaaacaaaaaaagaataaactatgttctaactgccacaggatatttgtttttctgtagcagctaaacaggcactggctttgagataagcaatgttgaaacaattacagctccaccaaatgctaactgacccccaacttctcttccacaagtgataactgtagctttgattggacaagagattgatatcagtaactttctcctgataagagaccattgaccatgcactggctctggctggcttacagaagctatgcacttgagtgccttcctatccctgcttcaccttttgacccactgggcccaactgtaatacacttaatattaagcctccaccccaaagtgaacataggtcatatgttacatgcatatttgttcagtatgcatgcatcagaactactttcatgaatattcgtaactcctcctatattagccaccctgtttagcataaagctcccaccccaaccctcctccttcgaagttcgtgtgtctggtcttcgccagagctacacttcccagcctgtgggaatggccacttagcaggctgttaccctcgataagaaataaaatctccttcccagatttataattctgtgatttttcaattaaccgcagttacctttagggaatttgacagctgaaaaggaagactagctttttactttacatgtgtttatattatttaaatttttattaaaaatgtgtttcttttataattaaaaactagtgattatatatatattcagattatgcagttttctgatgatagcacaagactttgaaaatgtaaaatctctgtagagtaagaaaatctcttataaatctataaccccaatataatctcttctattctatgcgtgtgaattttttaaacaaaagttatcacacaaacattaatatgttttgtttcctttctatgggactaaacaattattctaaatatggaaagaggtacatatattgaaatatttggaacatatattttttccaaaaggatttacaagcagctattagtaatgattacttgaagagagaaacttctgaagcagcgggaatgaggctttcccgttttagctttgtgcatttctgtgctgtttctaatgatgtgtacatattgactttatttaaatataagtaagggtgtagctaggtggagaatagtgaatcatttttgtttctttttttttaagcttgtctgtatttaaaaatactaatggatatgccattttacaaaagattctcccaaacatgattttaaattacgttatggaatgacattacaggtctgtaccatacgtaccagtctactcaatgccatttgatatttagatttttgtgtgtgctgtgggcttgggggaggacatcagtaataacttttctttcattttcttcctttgaactccctccttcattctgagttccagacaactgagaaaatacagaaacttgtcaaacagatggctatccaccttcttagttgattgctggaatactagattggagaagatcaaaatggaacttagcacctttctcccaaaactaaatcttgacacgtcgaactcaccagagggaaggtctgggtctacagagaggactcatctgctgagaatccccgcctcatctttgttgaaccccaatagtagtgtgagagagatttgggttccacatctacctgtagaggcaggtcgaggtcctgacccattagtgcctactcagcagctcaggatgtgtccagcctgtggccagcctgatccacagagaaagaaacaacaggctacacttcacgtgttcaatttccccccgatctcaccaaacacacaaaagttttctcttccctggaaaagagtgagaagaatggatggaagggtaaagactcttatttccaatactctgggaaaggcagaagtgcctcttttgtgggccaggaagtaactgtggaaagtgagagagcaaatgttaactcttacagtgtgtaactttcaaaggcatagatattcttttatttattattttcacttttcttttaggttcaggggtacatgtacaggtttgttacacaggtaaattgtgtgttgtagggatttggggtacaggttatttcatcacgcaggtactaagcatagtacccaatagaaagttttctggtcttcaccctccccacaccctccactctcaagtaggccctggcgtccgtggttcctctcttagtgtttatatgtcctctttctttgtctcccacttataagtgagaacatgcagtatctggttttctgttcctgtgttagttcgcttaggataacggcctctagatctatccatgttgctgcaaagaacgtaatctcattcttttttatgactgcatagtattccatggtgaatgtaccacattttctttatccagtctaccactgatggacatttaggttgattccatgtctttgcaaagtgaacggtgctgcaatgaacatatacatgcatatgtctttatggtagaatgatttatattcctttgggtatcatgaggtcaggagatcaagaccatcctggctaacacagtgaaaccccgtctctactaaaaatacaaaaaatttagccgggcgtggtggcgggcgcctgtagtcccagctactccggaggctgaggcaggagaatggcatgaacctgggaggcagagcttgcagtgagccgagattgcgccattgcactccagcctgggtgacagagtgagagactccatctcaaaaaaaaaaaaaaaaaacacacacacacacaccaaaaaaaaaaaaccaaaacaaaaactaacaatcaccataatatccatagaattcagaaaaaaattcaatttggtttttcacggataaaaaatgtaaaatggtattgggcagtaatttggctgtaacatataacttgggtgatagtcttttaagtgattttggatcactgattttttggaattcggcatagtaacactactactgaatagtctatggtgatccattttcaaccctctcttatgttggtagattattcagaggatcaggacaggaggcaagccaaagtcatattaaaatttaacattataaattatataacaaaaatttttgacctcattaacctgtgactaaaaagtaaattcacttttatttctcaagtcctgacagctgggctcattgagtagactgccgatttttcattttcttgctgtttttctgtcaccaagtaatttctaagaaacactgtaagtatttatacattccacaaatttatcctggtgtttatttgacatatccaccaactttcctcgaaaactcagaaccgctgaggcgcaagaactttgccactctcctctttcagtcttaagaaaaaacagactgtgggtctttggaataatttgctgaattcctacagaaaacaaaagtgtattacagtgcagaaaatggaaatgttaagctagatattagctatcactgcttctacagcccttaggccatgtgcttccctagaagagcctcttcgtcttctctctttaacttctagcctagatatgcataatggatattctttgtttcctctagcaattaggcgctactcccaattccatagagaaaattcctgctcccattccaacgttagttgcttttcttactgccacatgactgaaggtagagcatctctgtcttttaggagaaacgcttgtaccacagggcatggtctggccactcctggtacagaaaagtaatcacagtagttatctacacagtctggccactcctggtccagaaaaagtaatcacagtagttatctgtacatttctatgtgtttgggttatttcattttaaacactggatgagaaacactaagagtctggcccaagtagcattacacctttccattatctgttatacaacgtagattgcaaagagattagtctgacatgctcttcttgggatgatctgttctcacagacttttaggaaaaataagacgttcttctaagaatgataaacaaggattttcaaacagggcagccaaatgcagaggaaaaatttttaagtctgcttaaacttggttctgcttaaaatatacccaatgtaaattactaaacaaaatacttaacacctcgttggaagcatctgttacaatggtggtggtgggaggggtatttccaagaacaaagaatgggaaatggacttagatttgtatgattagaaagactcacaaggcagtccctctcaaaacaaagtaatttctaggacaagggaaaattctcatctctaccctagggagcaacaattacaaacacttcccagactggtatctatctagctataggaattttaaaggccagcctcattggtcaccctactgcttgaagagttgaatgttttaggtttgggaaagaatgacattatgaaatattgcttcatttatatgttttcttcaactagcattactaagacccatgtcatgtgccaagcaatgagcctgcatgaaccctattttaaaagaactcacagtttgataagggagataacatgtgagcaaaactgatcctaattaagatattaatgatgtctaaagtgtgccattcttaatcagcattgtcattgttctagcagagactgctatgtttagagtagaaataaattctcccaaatatttttgtttgtaggttatcttctctggcaattacggttggctgctgtcattgtgtgcgtgtgctcagttcctattctagttgagtggtatggttgttgtgttgttttcaccactctcagctggaaatattctatttgtagttactattacgctaactagccctagatgagtcatcatgatgattttgttttccaaaatgcaatacttatggattccatgacttcaactggaagtagagttcatggcattggaattgggaaggcacaggaaggaatagaagaaaaaatatatgtagtttgtttttaaggttaagaaacagaaatgtgcagagaatatggtaacaaacaccaatacacctaaaacttagaatgaacaaatttgctgactttatgtcatatttatttcaagtttttttaaatgaagaagttaaatattagtgatacaattaaaattattagaacccttcccagctctattctccaattctttttttctcaggtgtaacaactataatgattttggtgtgtgtccctccagtccatgtgtttacattcttaacatatatgtaatggttttgagtgttttaaacatttatataaattatatctaactttacttatctctctgcatcttatttttcactcaaatttgtgtttttgaaatgtatgcctgttaaaagaaatttatcaaatttagaaagaggtagcctgatgtgaaatagtctactacagcggctgagagtatggactatggagccacgttgcctgggttttacgtggctctgagaggtaccacttatgcgatcttgaacaaccttcagagttgttctttaacccctcagtgcctcaatttctccattcataaaatggcaataacaatagcacctactttatggggattatagtgaggagtaaaatgagttaatatatgcaaagctcttaggatagtgcctggcacttattaagcacaatgtagttatttattatctgtatttcacttgggaatgcatattcagtcatagtaggaggagcagtcttgcttggctaatattctctgatttcttacattcatgttaactagaaaaaaacattctgtgttcagagttggattagtctcagaagcaattgggcagtaaatgaagcagaaagagtagtaacctgaacaggatagattaggctgttgcacagcggactggcatagagcgaaatttgtagcatctgctgagaaattgcctgactattctgtgtgtgtgtggcgggtggggggatgttggatttattatatcagcaataccacagggacaaactgagaatggtctgaaatcctattctattttctagaccttcaattgtaaataggtgcactcttgtcatctcaccttttaaatggaaagggcatggttcttggttgagctggaactagagtgagcacttgagactcaagtaaatccttccaggtgtgtaagaggaaaaataactgaaagacagtatgtggagctgggattgtccagtgacttcagatctgtgtcagctctactttccaagccacctgggcatccttagcaggtttcttatgtccaaaaatagccagctgtctcagaaaggtgtaagtgcatttctaaggcagacattgacagaggcaggactttgttttgattgatcttctcacctcatgaatcctttaggcatgaccaagtttcactaattctaatgcaccttgctgttattattgcaacaaagattttaggaagaataaaataatacctgggttgtaactttctaatgaaggttacagagcttaagtgcagagagcgtaagtgactttaaatgcagaatcttaatatttggatcctagcaggccgggcacggtggctcacacctgtaatcccagcactttgggaggctgaggcgggcggatcacaaggtcaggagattgagaccatcctggctaacactttaactaacatttttagtagaaactccatctctactaaaaatacaaacaattagccgtgtgaggtggtgggtgcctgtagtcccagctacttgggaggctgaggcaggagaatggcatgaacctgaaaggtggagcttgcagtgagccaagattgcgccactgcactccagcctgggcgaccgagcaagactctgtctcaaaaaaaaaaaaaaaaaaaaaaaaaaaaaaaaatatatatatatatatatatatatggatgctagcaacaattggaggcattgaatgcacccttttagttggcagattaataaattgagggccagtaagcttgagatgttttttcaaagccccaagtctgtataaagtggctggatctttgaatccagaacttttacctcttagtacacttgggatttgtagacttgtgacctgggttgaaatctagttattttggtcactcaatgcatgaccttcggcaagtttcttaacctctttgactctcaaaattctcatctgtaaagtgattatgatcatccttgcttccatcaaagcattgtgaagtttaaatgaaatagtgtacgtccaaagcgtaaaatataaaaagcatgacacagatataacttatttagtatcactgttgttatatttgatgcattcataacacaaagactatatcagggataaaaataaagcttcattttatatcaccttggagagagatttaaaggcagaagcaaattataccaacatgaatcttacagcttctttggcgtaagaggtatatcttccaatagctattttgttgcacacaaatttttctgacctattctgttatgatgctgtttacagaagatgctatccttatcagttaaatagaaacttttcagtctgtgttgtggactgggataacatgatagagattaatgcattttattgatttaaacttgttttaagggtttcaccagttaccagtaactagactcttacaaagtgtgtggtaatggactccaacatccagactgacttctattattaaaggcttgtgtcactctagttctcagtcaatggtgagcaaatatatactcaatcagggtttaattcctaggacctacatgcatttttatctgtaatcaaagagtaactagtaactagactcttacaaagtgtgtggtaatggactccaatatccagactgacttctattattaaaggccagtcaatggtgagcaaatatatacccaatcagggtttaattcctaggacctacatgcatttttatctgtaattcagagagaacagttgaactacttttaggtgtggcaaccacattaatgaacatcagctgttagtaaaaataacagcacaggcagaaggaaatagtaaaagctcacttaagcactagtgattagacacatttagacataattttgtttctagtaggtgccggactttgggcatacaaagataagtcaacgcctgccccaaggagttcatagtgtagccagggagcaaatatataatcaaaagtacatcttcaaaaataggtgctaaagataagaataattatccacaggagcaaacagagatgaaagcaagttatcattcaagttgcagttttaaaaataaataggcatacacttggcatagaaggtgatgagaaagaacactttaagtaaaagggaaaatgtgcaccgagtcatggggccaagaaagaacatgtgcttcaggctgatgaatttgctctttcatttattccttcattcatttattgatggcctactgtttgccaggtgctattttaattactagagattcagtggtgagccaaataatgttgattttgaaagcttattttctagtgcagaagtaaaacaataaataaacaacttgcatgtgtataatagaatgtcaggtggtgataggtgctataaagagaataaacccattgaggggatagagagtgaaaggaagaactctttggatagagcagttttctcctagggaattgctttttagtaaagaccaaggaagtgaggaagcaagcctgcaaatacctggggaaggtgtatcccagctggaaggaacagcaggtggaaaagtcctgaagcaggaaaaaacttggcatatttaaagaggggcaagaagagcagtgcggcaagagcaaagggaagaagaattgtaagaaaggagattatttggtgtcttacactgtgacatatatttgggaatgaggattatgggaagtcatggaaggattttggacaacggtggcatgagccatttacatttataaacggatccctctgtctgcactatgaaaacagactctaacagggagaccatttagtaggctattcagcatttctggtgggaggtttggaatagggtgataatgtgttgagtagtgacacatagtctgacttggaatatattttgaaggtagaactgtcaagatttgctattgattgacagcgggatttgagagaaagagagtcctcaaaaaggactcaagtaatcagtcctgagcaacgaggtgaagagtgacaccttttactgatttgggaaatagagtaaatctgtgttgtggggtggaggcggcagagggcggaggaataaagtgttctgtttgaatgtgttaaatttcacatggagtagagaagagacattgaatagaaagataaaattctggaatttaggagagactcgggctgagacatgagtgtgtgattcatcagcatatagatgatggtatttaggaccacagaactgtatttagtcatgtaaggagttagtgtcaatatggaagaaaagagatataaggactaagcctgcaatgttctatatttagccatcaggagctaaatcctaccaaaaacccagaaggagtagcttgagaagtagaggaaattcaggagagtgtgataacacaggaattaagtgaacaaagtggcagaaaggaatgaccagcttgatgagagttatccacaatacgcagactgggaatggatcttttgactgggaaatgtggaggtcattggtaaccctggtgagcagtttcgacggagaagtgggtgacaaagtctgatttgaaagggctcaggaaactagaaagtgaggtagtggggacagtgagtatggaaaaatctttctctaagagttttgcagtgaagttgtgtggagaagtaagggaatgtgagatgatgagaacattgtttttatgaaaaatattattagcatatttatatgctgatgagatagattgactagaagaaggaaagctgatgttgcaggaaaaagacggcggatattgcaagtgtaaaagcgtcttcctatggctggcaaatgtcaggcttggaccagtatatcagagtcacatcagactcttgtcaaacagattgccttgtcctgcaccagacctcctctatcagaaaggttctgtatttatattttagaaaagctccccccgagattatattgtacaattagatctgggaacatttgttttaagcaatgtaagatattgcagtggtggcaagaatccattagcttggggtggaaagttagacgttttataaatgtttcatcttgcttcggcttttcttggttttgaatttctcctattaagaatgatcatagcatttgtgactagaggctgctaatggtttttggagtccatgtggtttctttggggagtatttacataagagtctagctctatttatgattagaaaaactttaatcatggattttaacaaatggtttcctgtttttaaaagtgaagattaggctgggcacagtatctcatgcctgtaatcccagcaatttgggaggccgggatgggtggattgctggagcccaggagttcgagatgagcctggccaacatgggaaaccctgtatataaatatatatataaattagttgggggtggtggcacatgcttatggtcccaactactcgaggctgagttgagaggatcacttgagcttgagaggtcaaggcttcagtgagccataattacgccactgcacttaagcctgggcaacagagcaagaccctgtttcaaaaaggtgagggctattggatttggaatacaaaggcctaggttacaattttgtctctgtaatttaaaaactatgtgaattttgacaagctttgtgtgttatttgaaaatgagtgtgctaattctttccttgagtttacagcatcctggagttctgtaaagatcaagtaggtctaaaacactttatgattgataaagacttacacacacatatataatataggtttatatatatcattgttgtgaattgtggaaaacagctttcataaaaacaattatatactgcatgatgtaagtatcttgggaaaaaacattcatattctactacttgtgatgcaaagtaagactgattaaaatgtttatgtacggacactttatatattcacatacatatatataagcatacatagatataaatgtgtatgttgttgtatagctttgttcagtatagctttgttattaggtttcttcagagattaggatgatttctggattatggctaatgagactgtagaaaatgtgttagtggccaggtgcagtggctcacgcctgtaatcccagcactttgggaggctgaggtgggtggatcacgaggtcaggagttcaagaccagcctggccaagatggggaaatcttgtctctactaaaaatacaaaaattggccgggcgaggtggcgggcacctgtaatctcagttactcaggaggccgaggcaggagaattgcttgaacttgggaggcagagtttgcagtgagctgagatcgtgccactgcactctagcctgggtgacagaggaagactccatctcaaaaagaaaaatgtattttatatatatatatatatatgcataggccctccaattcttcccacagcactttcaagtatgtagataagcccttgagttttactagtgtttctctgtactacaactgtgtttcaatctgtgtcccacatattaaataaatcacaaatgagagaaggaatagaatgcatgatacagtaggttgtaccattgtattccatgcagatcacaaagcatttgcaggtgggaaggaggagattatatctggtcttgggaatcatgattttcaaggaatattatcacactagaatgcatctaggggataatgaccaggatattagtaggatttggaatcatgactcagaaggaacaggtaaagactaaaaatatttaacctaaagaagagagattgaagtaggatatgatggtctgatgattttgaggaagtagaagtaggtttgacagatttagtttgaaaagcagctctgtgccaacaggaagtactattgtagagaacacaatggatgttttggctgcttatcaactttgcagtgactgttattgtacaaacagatgctagatgactgtagggatattgcagagggagttaaacatctgatatgaagcagaaataaatgacctatgaagtgtcttctagctcccatattctgtgtcaaatctaagatgttacgagaggaagagctagtgaattttctgagctctaatggagactggaggggaagctacagaggaagacagagatgcaagacatacttggttatgctaaatagtagaaagtatttcagaaagtatctagaaacatgaaacttgccatttgatttctgaagtgtttagataaatctctaggtacgtgctgttctgtcattctcttctgatccaaggagtcagaactgtgtccttggtatatagctagttctcttctaaataacagaaaaaaatcatcctgtgatagggtttggatctgtgtccccatccaaatctcaggttaaaatgtaattcccagtgctggaggtggggcctggtgggaggtgattggatcacgggggtggtttttcctgattgaacaccatcccccttggtgctgttcttgcaacagtgacttctcctgagatctggttatttaaaagtgtgtggcacctcccccttttctctctcttcctcctggtctggccgtgtgaattacttgctccccctttaccttctgccgtgattgtaagtttcctgaggcctccccagaaaccgagcaaatgccagcatcgtgcttcctgtacagtctgtagaactgtgagccaattaaaccacttttctttataaattacccaggctcaggtatttctttatagaagtgcaagtcctgacgaatacattctttgaggccttcttatgtcttcctttgagtggtaaaatttgctataaaataataaaacccttagcacatagacttggataagtgcataaattgggtggaagaagcaagaatttaatttatgggccacttagttaagaagaagtccatttgacatacttaacagctaactgtgctcctaatgcagagttaatgttttatatgtagactcacagattgatgttgcagagagaatctttagagataatttagtcctttcacagatgagcaagctgaggttcaaggaagaaatctgctaaaggcacacagtctcagcacctagactgagaccctggactcctgctgtcattggccaaggcatactctgactctttatatttccatttgtctcctaaatttgtaattcccatgattacacattgagatgactatttctaagttttcctaaaaataagggtggattacttgagcccaggagttcaagatgagcctggccaacatggtgaaaccctgtctctaaaaaaaaaaaaaaaaaaaaaaattacaaaaattaaccaggcatgatagcacatgcctgtggtcccagctacttgggaggcatcatcacttcttatctctaccatcctgtgtataaattggaaaaattttggaactgacccagaggaaagcaccattaaggaggcttttctcacacctagtgacatgtgaggagcaaatatcaactaacacagtagcccaaaactagaaattcttgcacctcttgaagaattgtgttatatcggtgtgatcctttctcttttaatcaacgtatctaaaaattaattaagctttgtcctagtaatggtgtctgtaaaatcacaagtttagcatgctgttttttctactataaaaataattactttaatataaccatacttttttttaacagtttcatctgtgtgtcaactaagataattttgtataccgtgctttgggaattgctgaggaaatgagactgtttcaaaaaactctgcaatgtgtaataataatttcttcttctccaccctccccatctgactactaatatctcagtaatttaagagaaaaaaacatcaatccctacctttgcgtgtgtgtgtgtatgtcatttttatatatttttttctttctccataagggtggaggaaataggaaagaactggaaactaatttgttagaaacatgaatgaatcaggttacaattatatattaactaatgatatgaatcttttggctagaaaaagtgattaagaaaatgtgcaaaataattatttcattccttcttaagtattgatcaggtgtttacaaatttattctcattagatatgtaagatacaaacaaagtgtcctttataaagtttttcttcctgcgatgccaccaaaaagtccatacaaacctagataaacattccaaattcagtttaggagatttaagtctgtagtatgaatactcttacatgatgaatgacactcctgttttgatcccaatggtgatgggagcaatctgtcttgtacacctaccattgtgtttgagctcaacttaatgcatgttgcttgagagacacaataccttgatcctatctgagcgagaatttttcattttagtaaattcatggttttctagtgctttctagccagtgtgcataattacctgtcctccagctctaagaagccttgttattttactctagtgtattgtacaataattataattttctaggtgtgacatgacatgaaaaaggctaggaaatactactggaagacgatggagaacaatgcttgtagtttatatacagtttcagagtttatgtaacatcatatacattaagtctcttgagatacatagcaattttgtgaggcagacatgattatctccataatttagatgaagatattgcagatctaagaggtaaagttgcctgtattagtttccacagctaaaggtggtgtcaagtgaaggcttgtaaataagttcatcacatttttcatccaatgagtcttctacactacagctgccttaagaattgcaaaacttcatgatattaggttatgaaaactcaaaaatgcaaaagcacacaaaacagctgatttttggtacctatgttttatagaaagctattttgaagtaaaactcccttcaaagatgattactgatctatctggtgcattgcagtatgacatagcacagatgagatccttgccatcagagaggtcatggtcttatggggagaagaggtgtttacatatacaaacattgtaatacaaagcatcttgggatatctgttacatggtaagtgtagacaaaattctatggaggaataagagagaaaaaggttaaatagaagtgaagaaggaaccaaaggaagggttgtagaagaaatgtgtttatgttaatgataattctttggcctgagtaaacttttttgctttggaaaacaatttctttaaatatcacatacagaggaatgcacgaatcatagatatacagtgtggtgtaatttcacagagtgaacacaaccatgtgactatgacgtagattagaaaacagaacattcccagcatcctggtagctctacttgttccttcttccagtcactgccctccccaagggcagcaattatcttgcgatgacaccatcgattaggtgcctgtttgaaaacttgaatcaatgaaataatacagtacatcttcttttaatcctaggtgctttgctttgtgttatgtttgtgagatctatccttattgttgcatgtggctatagttgcaatttgttcattttcagtgctataaacataccacacattatcctttttaccactcatgtccatttgagttgttttcagtttggggtttttatgaatagtgttttctatgatcaatctctgtctttttggtaaatatatatatatgtatatgtgtacgtatgtgtatatatgtatataaatgtgtatatttgtgaatgtatacatatgtgtgtatacacatacatacacatgtatacatacacacttatatgtttatatatgtttgtatacaatatccatacacacatatgtgtaatataaacatatatatgcatttcttattgaaacattactaggggtagacttactgagtcatgaaatacacctgtactaacataacttttgatgaagaaaaataaagatggcaaaatacttcagtgatggaggtagaaccatttacaaaatcctgcagcgaaccacagagagaattcagagaatcgtgagcaatttgagtggctatttgagagctaaagtggaaagcagatttaaagagaaacacaagaaacaaggtgagacttttctttagaagtcctgagctactaaaaaaaccactgtatcacttagaaaagtattccactgtaagttacagacttcagtgtcttcatcaaatgaggatggatttttctcaaatactaagtctgaaagtaggcattttgctggatttcacaaagaacttagtatttttttaacttttattttaaattcaggggtacatgtgtaggtttgttaaatagataaacatgtgtcatgggggtttgttgtacagattatttcatcgcccaggtattaagcctgttacccattagttatttttcctgatcctctccctcttcccagcctccaccctctgataggtcccagtgtgtgtcattcccgtctctgtgtctaggagctctttctgtggtatctttagtgtgttgccatttatactctgacttgcttttttagtctcaagatagttgttgcagttccagatatgaagcctaaattcaaagcagcaaaagggtggcagagtgatgcctgccaccctagtctctctttctcctcaggggagtaaaagtttcccaaacatccctgcaaaggcttcttcccaagtctaattaccgaaagtaggtgacttctggctagaagtgaggcatagtattattaagtttggcttgcgttgattatgattagttacctgggactaagcacattgttgttctgaagaaaactgagactctcttggcaaagaagaaaaagaaatggatttagataggccattaaatgggtcttctatagcaatgacggcattggagtgaagaatgaattaggggcatgggttttttgtaatgtgcaattttatattcacatagagaattaaaaaaaatggaaatttgtatagggaaaattaagtattccatttgatgatgggaaactcactaagtctttttatgtgtagtatttttgctctttttattgttatttttattattgtgataataatgatatcacgagattaaaaaatgattagataatatgtctaaaagttactttggcccagcaagtcatcagttacataaagtgactttttaccagcttttccagaataaagtgaaaccagagcgcaggcaagcattgtgagatgctgcaattacaggcagtggtgtaaagagatttctatgatgcataaattaaagcatcctatcataaggctaacagatccaaaatagccccaatttggtctttcatgtgactttatttctatctctaacctgcagttgttgatttctgacaaattaatttgtcatgaaatcagttgagttagtgcacagaaagatagcacattgattcagatgttgtttcaaagccgaagtatgtattgccctacagagagaaagatggtcatatgaagttcttgaggttctttttgttttaaacaagtcttaggaatcaggttagtctataaattccgtttcctgacagttgactccctgcaagcagcaagacgaggttctcatccaattaaggctcacacaacataacttttgtctttgatggtcgtttgttaatatttagtttggtgataaggtggtagaattaatttggcaagagttgacattttctgtattgaatggaaggaaagagaaagaaaagaatcacaactatgtcatttccaatgtggtattgataaaggtggagctaatggactgagagattttcattttatgctgagtctgatgaatgtcttttccgtccaagaagttttgctcaggaagaggaagaagaggaaagaaatgtgactgtgattggaagatacaatttagacctgggttaagcaatatttaggtaactctattttcgtatgtggttattagtgatgaacgttatatttccatattaggaaatattccccagatatttcataatttcataattattgtatctattggtatgtttcaagattatgtattgaaccaatagttacttttatcaagaggtaattaatgaagaattttattattctgagggatattatagattcataatataaatagcttaggaaaacagcatatgagccagaagccatagcttatagttaagtaactggtgttgtttggagaagaaagtgatatagacgatgcttctgttattttagagatcttgtcagcaagcatgagcatggttttccatttagccatctcatatgtccagagcacaatattgtgctgcatgtctcatagcctggcattcattcctactcaacaaaatatgtactgagaagcttcccaggtcccactactctaggtactggagttacagtaatgaacaagttaaaattcccgacctaatacccttacattcttttagaaacatttagttttcatgatttgactaaattgcatactttccaggcagatgagagtaaagggataaaactagaaacaggcttcagttaatctcaacccaagaggttacacataaaatacaattaggattgtacattctttacgtttacattataaacatattataaacaaagcacgttaggcagcatcgattttgccaactaaaacacttaattttgtatacaataccctgcccctcaaagggtccagcaatgacatgaacagtagatgtaaatagtgcagaggccctgtgtgaatgtcttcagaaacaagcatgatcgaacaggcgagcttgagacctgggataatggctcacagaactgaagctaagcactaggcttggatgagcaatgagataggacaagttgatgtttcatgcctaggtgtggtcttggagaaacaacggacaaagtcatctgggactaataagtgaattaagatcaggtttagaaaaaaaagatcaagttggcatagtctttaccaaggtttcgaagcggcactaggaacagctcccaagggctgtgattgttattagttactatggttgctatgaggaagtagaaaataataaatgcatctagctgtagccaacaagtaagaaaagtgaatgaggtaggctagttcttaggcagtaggggatttggaagaaatgtgacaaatatgaaatcacagcactttccaaatggggaaattaaccagctactactcagctccagccagttggttctaggcaggactgcaggctcaatgttactggatcttccagaaaataataataataataatagtaaaacaaatccaaagatgcaggaggaaatccagatattttaagtgaaatctcatgattttaataattttggcaactcaaattaaaacatataaaacacacttgtaaacacagtcttggctctagttccttttaagacagttttggctctgaataaaagaggtcgtatccttgtccatctatgagtgttcagtgtttattcatgacacatctagccatcttacccactgtagcctgatgttctcaaaatataaattatatcatgtttgtctactgcttgtactcctcaatgtcttcccattccactcagaatgaaagaagaacactttaacatggccttcaaggccctgaacagggtgtcttgcttacctctgtgaccttgtctcatgctcttcttcctcctgctcacaattttcgagccacagtattcttcttttacttcctaggctatgccaaacttttccgacactagaggcttttaattttttgttccctcttctgcaacatttccccttgccatccgtgttcactctttgtttttacatggctcattctttcatcaaggcctcatctgaagcaatatgctctccaagaggctcccacggatgattatttaataccaactggtcctcccagttactctgtttgccacaggaccattcatacactgaatgcaatttgaattaaaaaaaaaactatttgctttcatgttaattatctgtctcactcatttgagtgtaaactacttgaggataagaaacgtctgtcttgctcattgatatataactccagtgtctaacacacaggaggcattcaataaatatgaatggatggatcactgcataaaaggacttgaaaggcttatgtcctggatgtgttggtttggtgctgtattctttggacctagatcttctggagcagtgttcctcgaacttaggtaaaggactcactttttataatgaaaaaccgtattaatggccatccactgtcaacttaggttatttttactacgtattatatatgcacgtatatggcataaaattctcttgtttatagtgcgtacaaaatgatgaaactagataatttacaaattaaattataaacaagtctatacagagacaattcaatctaaattagcaatattaatttaatgtttaatgacataaaattatctcagttcagatgcagttatatatttaatgtttctatgcttttatttcaataatacttatacagagaatctgttcacataagtatgttgaataaaattatattactaatttcttggtttttttacttaagggtaattagacttcatacttaactaaatgtttgcctgctagaaatcctaaaatgctaaatgtaatgatatcactaaaaaaaattttggaagacagttaataagacagcattactgaaaactacattaaaatgttttatcaactaattgctggaattgggaacagataaatttcttgttgaatatttgctatttagtcttactatgaatgaattattctaacaatggtattcctagagctgggatttctgaaagacgtatgcctgctaagtaaaatgtcttcttactgtcgaagcattaatatttaacttttcaaaagtctggtgattactccattttctcaatttgaactacctcaaacaattatttcttcaattcacagtgatttaatcttaactttattggagtgaaacatataatacaaaccagaaacattcgtttcaaaattttgtggcaataattagtctccataaagtcaataaagtcattgctcagatgccttagaatatgtctacttctaaataatagataaacatacttatgcacacatgcacacctgtttatagatataatacatacagatagatggatgtttatgtgtatacatataaaatttaaaattttaaaatttatgtgtacacatataaaatttaaaattttaaaatttatgtgtacacatataaaatttaaaattttaaaatttatgtgtacacatataaaatttaaaatccaggcattgattatggagggtggggctgtagaccaatcttgaaacatgtagacttaaattaaaaatacaaataaagagatgaaactcctagaaaatgcattgttgtctttgaactgagctctggtctagaaaatagccaacaagttgcacagttccgggagcaccattcacatggctttctggaattgtgtttcaagaaattacatttcatataaatacaatggaaatagtgccctttgggcctgtgcaatgtgggcctgtcgattcagcctgggagagtgcataaggtccgcccacctttatggcaactgtcctctcttttcacccagagaaacctgctcttctcctatactacctctcacagccgatcattcactttggcaacagtttaaatgataattccctcttacagaaatattcacatcctaaaagttaactgctgtatattatgaatatgtcaataatagaataataaggtagaacaacaggctgtattttgctttttgtggggatatgcgagctgtaatcagcatattttatcatgcactgactgaagggtctgtgtggaatttcagagtctatgtttatatcaggttctagagcaagctctagattaatacaaattgatgttctttttttttttttttttttttttaggaaaatggaaggatctctattggattaaaagagcatccagttgttgagtgttcttttgcatagagatcagaatctttgcacctaagtggtgataatagagagtactctctcagaaaaacactggctttaacagtatcacctgtccccaaagtgcccttctctttgattcaagaccaaaatagagtttgctatttcatctacttaactgggcctctgtggctagtcttcattgctatcagggataaaatcagttccccaatctttcaggctcaaattcttggatttacctttaatatcctacaattttttttatattgatcagtcacatataattaacatttgttctttataatgtatattatgccacaagtgacttctcaagagcataatgtctccttcatatgtacagcaatacgcctgttaaaccttacagcaatttttattttctattgatgtgtggcacagcccatgtgattgttagatgggttacttctctacctttaccacaaataaaatacattttttttcttctagggtactgcttatatattttttctagctggaacgcctttccacttccttttaatgcatccaaatagtaaccttccttcaaactccacctcagctacacttctacttggcaattcatgctggaatgatcattctctgctttgaattcttctctcatttacacaaatagcttgtaacacgaattcccctataccatattttctccttctattattttcgtttatttattgaactgatatttactataatatttgtgaattatctcattttagcatcttgaggaaataaaaccgtatcaggcataattctgttcataaagcctttacacttcagtaagagacattagacattttttttacgtgtggctgttgtataatacgttttcattttgtttggtttcgcttttaagagcaagcaagttacaaatcaagggctgtggaagtttagagaatgaaggatgacagctagtggtggtatatgaatccccaggaaagagggggcatttgaactgggctttaggtatagtagtccattaaaaaaattgtaaatagtaataatgtattaaaagacataggtagatgttaggtaggcagagaaggagtattcttcaaggaggaataacaagagccaagatatgtaagtggctaacataaggggtgctgagaatgaggtgtctaggaatgctggacggcagggttactggcatgcagaacttgtaaagatgagtagtaggaggtgaagctggaaacatatattgaagccaggttgtaagttgtagaagactataaattctattctaaaatatttggactttattcttcagacaatggaaagttggcagcctcgaacaaggaaatgaatcagtgttttaccatgcacattttatctttccaactaggttaaatactattcattttgtggaaatcatatgtgaataataaatattttattaagcttttttatattatctaatatcatccttttaatagcttttgaaaattttattattattttgttttactgctgaagggagtgcctcagaaagtttaagtaaacagcacaagatcacacagctaaaaggcagagaggaatttaaccatgtctcaagattcatactccatgctgttctttttttgttttttgttttttgagacggaatcccgttttgttgcccaggctggcgtgcactgatgcgatcttggctcattgcaacatccacctcccagtttcaagtcattctcatgcctcagcctcctgagtagctgggattacaggcatgtaccaccacgtccagctaatttttgtatttatattacagacaggttgtctccatgttggtcaggctggtctcgaacccctgacctcaagcgatcttcctgccttggcctcccaaagtgctaggattacaggcatgagccaccacgtccggctcatactgtttttctttaccacggtacctgttctcttctctgttgactttttagttttccagtaaaagcttaggttatcatttaataaaataatcttaaataatatatgaatatgtttatattttttctcatacacattttgcttagttcttttcaaattctaaaacactaaggttgcaatctcttctatgattgaggttcaaaactcaaacttggaaactcatagtgatcccaataatgaggtgcaatgttcttaccattctcagcagtgataaggttggcttgtgataatgacatagtagcaaacattgggcccaggagtccccattagttactattcctaaaaatcatcttatcttcttcatgtgactcttctttacttcttcatatttagacaaataaaaatatgcttgaatacccagcagtctttaaggttcagtttattattctctgactataggctctgtgaacaattgagcaatacatgttgcatagtggttaggatacttttgggcagaatttcagaaaatatgactcagcctggcttaaacaccaggggataacgtgattcattttattggaaaatccagacgtagaccgaacttcagggtgggctggtcgagtggtacaactctttcatcaagaactagatttttcttcacttttcgctctgccatttacagtgttactggcttcattcttagattggtttctcttgtggccatggataggaggctgcctgaagcaaacttacactactcagcaggatagtgtggatgccactgaacaacattcatgaaatctctgtggccagagaattattattaattgattggtatagacctagtttatcttaaacaaacaagatgcataggattacctttatagatgtggattaattaggaccttcccctagttggagatactggtaaatcctatcaaaagaaatgactgctacccaatggaatctgaaaagaaagactagggtccagtatacatcaggacaaatgattttttttttcctcagagaggataagtgcatttttttaaaccatccaagctatttatgctctttttcattttcaaagagttttctttaaaaattttatatcaacgtacccttacatgaaatgtattttgaagaatgctgataaaagtcattcctcagcaagccctagagatcttagaaatgaaatttctcttatatgcagtattctgaacaagacatacagcaaataaaaaaatgtcatctttcagcattatagttacttgattttgaggggaggttaaattcagcatgtttttttagaaaaataaattaagcatacagggcattaaccactgctactcctttccctgccttcatgttatgtctgaccaattataatggagccttctttgatttaattttaaacggatcatggagtaattaatctgtgttagctcagcatgcagacaaagaaaacactttgatcaatcaatagtaatgggtgaatgtcacaagataatgcagttaagctggtttggattccattctaggtttcacaatgtaatgagttattttattcttaatgtagaatatatcatgtatggaataagactgtaaatgacttttgctgtgttccatattgctggtgattgggactttggacagaaactttttatgttgcttcagtgtagggagagttgaaagaggtctcagtgtttccccatagtgagatacatgctttctgcatttagcaatgagtctactcaatggacaactttatttgcaaaataccttcgctcttttattgtttctatacatggaagcatcatttgtctcagattcctcttggaaagaggactatcttctctagtaataagcatatcctctttgcactggccagcacagcaattatatgccatttctacaatgagtgacttcctagaattagccatgggctctcgtactgatattcaaaatcttgtatttagaggagaagtgaaggaagttaatgttgatacttaaaggtgattgtgccaagtgaaatgctagaatctcatagtccaggttttgtgggagaaaaataggttttgttggcaagggtgagaagaatggtaaggttcctttgcgaagtcttacgattaagttttttcctctttattctgtctctataataatcaatgcttagcactgaaattgtttcagttgtcgttagattctgtaattccctttctttgtctccatccccacagaaaataattctacttgttggtgccagccaaatattcccagagcactgatgtcctctttgctattatcttttcatcatctgcatggcatttcccccctcctccagcccccaaatccttctttcttctctttctcaatcccaattttgtctttcaaacccaggctggcccatatctgtgccacaaacccttccccagttctcgagtctgtaaaaattcctgattgtatatgctctatagtgtttatagggtcttcattacctgtaatcttattctttagcctaactcatgttaccgtaataatttttaaaatattcttacttcttaatattctaggggatgggaaatgcaacttaaattgtgcaaactccagaaactgggcacagtggaggcattcagttaaaatggaccaaatgaactgggtagcattgtcatgagagtgtaaaacaggattttgtttaaccagactaggttagtagactcatgctgctatttttctcccccaccttactcacacctaccattcaagagtaaggaatctctctttattttggtttgctaaggaagataggagagtctgcagactttttttttccatttatcattttgtttggtgaaagagaaaatagataatgcttaaggtctcccaggtgtttttagttggacatctgaaataaagaagttgactaaatctgcattattaagactccatgtgactttcactgggtgatatgtttcaatgacacctgactcagatggagcctgggactttggacaggtgggcatctgctcagggacccatcctactgctctgtcttttgagatagctgctactgctgccttctgaaaggatgatggtgttagactctaaacatagatggcactgatatagtctcctgtggccttggaagtggaataattccttttagacactggtgaggagaaggagggaggcccaggcatattgcctcttcaaaagggaatatatttcctgtatccagaaaaagaagaactaaaagaagggaagaatttggctttggataagaacactcatctgcatgatgtttcacagtgtttttcaaacagcatgcctcttttaggcttccatattttgatcaatatgtacaaccggagatttattttgccttagtgatgtctgttctgcagaaaagtggactgagcaggttctaaccagagaaaacttttagtaagaattaaaatatataacataacatcaggacaacaccaacagtatgtttcatgcttactggaatatgagaaactgtttcttttgagtttatgcaagtcaacagttacactgaaacagtaatccaattctgaagaccaattaaatactatgatagtttttaaaagaattttctaaacttcatttttctttcagccggtgttcacctttaactacttcaagtatgcttttccacagtctagtatttgaaaattttatcttagtcacaagaaaactgaaaatgattaatagatgatcaaaatatttacatgaagaatgaatacagtagactctttgaaaagttatacttagggaatgatcaagaatcttagatattataaaacaaaaattatacatttgtataattctttacctttacataatattttaacatgttatttcattcaaaccctaaatgactattatggggtaggaagatagtacagtatatactatctactaattatggagtaggaggatatatagtatatagtttggagttgggccaggggctggattctaatcctactttatcatttattagctgtaagactataagtaaattacttaacccacattaataagactcacttttcttatcagtaaaatggagataactgttgtacctgcttcttgggttgtggtgataagtaccaacctggtggttggaaaacggtaattgctcagtatatatgttctatgagaggttaggtagggcaagatatttgcttaaaaaggtcaaaagacttgcccagggttacagagctaaaatgcaatgagattttaggcctaatgcctaccaaggatattttgaatttaacgattcttagcaaagtgaaattctggcttacatttttcataagccagtgtgcttatcagtcacacaaagaggtaacctatggatgcccatgtgggaaagcaattatctccagaattgaaacaagttgtatttttaagtgatgtaaagtacaaccacttagctcctgattaggaaacaccaacgttcttgttgatgacagttttctattgtgtcatgaacctgaaagaataattgatcaaacagcatattaaactatcattataaatatgtggtttcgagtgaagtcatttttaaatcaaccatatgcaattttctgctactaataatttatagctaatttttcatgccagatcaaattaccaatcaaaagtgtgtattttggggccagacttgactcttcccctctctccactcccattctccatttcaatagctgctatacttacagaaactggaactacaatataaatgagtctagtgtttaaaaataaatatagttatacaatcattgggaataaagtatctttatactggtaataatatcgtaccattgtttctacttattcttcatttatcttaatacaggtaactaaaaattgtctataaactatactgcaatagaatttttcttgttattgggaagactttgagccagatatcgttggtttgggcctccagatcccctccactctcccacctctgctttcttcctgggggtctcccctatgtgaactctttgaggggcatgagtgtactctgctgcttgttgggtttgtccagtgggaagcgctggcaggagatagagtgaagagagaaagcaaagtcagtctttattcctctagtttcttccctgtgaagtgacctctggctggccatggcagaatgtcaccgctgccttctgggtagtttacactgtacagctttctcccctggatttgggtagcccctctctcttctttttccgttaagctagtacagctctgctgctactagccctgggttcctacctgctccctgtagtttctctacacctcattcttccttctgtaatcacttcttttgtaagtaaatattcctcaaattatccaaacttaagaatgccatatccttttgggatctagtctgatatcaacttaatcatccgaaagcatttatcagatacttgcttgtatatggctccaatcttgttactcctcctcttaggagccattcaatggctctctattgccttcagagtaaagatcatccaaactcatttacaatttggctataatcagtctttctttactcccactagtgtcctccagacaacctttcttctagcaaaactagactgctaggtacttctctgatcctcagtgtctgacttcagggaagccattttgcttctttgttctcagatcccaaagtttgagcttctttcctgcaattttgcattatgttgtatttgtggaggtaattccatgaaaagtcacagtggggattaataccaacaaaataaacagggggcatattacagatggctgtgaggctgttggacttaatgccattgatcaattcattcattaattatttatcaagtacttcccatatgttgtggtaaaatgatgagtaattcatcagggttaatgtagagtggtggtgggagtcaggctttagactcaaacaattgggattcacatttagattctgccacttttttgttagagacctctgggcttcatttttttttcatctgtaaacaaaaataacaatattttcctcataggtaagaactaaatggtagtcactgggcagaatcatttaggtaaatggatgcagaaaaaagtttcaagattgtagctatgattatttttatgttgtcctgccctttaaaatatagagctcacatgtgatctctgaagccaatgtttaggccatgtatggaaagtctttcgggtgtcatctcacctggagctgcaggtgatctcttggggatcacgttattctattttatgctgtttgatgatggtttgggaagttcatagattgttacattctttgctgagtgggctaggctatttttcagaaatattttatatatctgcctatcattatctatctatctatctatcatctatctatatcatctatcatctatatctaccatctatctattatctatctatcatctatctgatctataatgattttaggcttcaagtggtggacttctggaaggaaattttctgactattaggtcggaatcgtatttcagacacatagaagttgtgttcggtccctgtgaatttccctatcacgagaacagcttttgcactgacgtgtaatcctttcatttctttgtcatttaaaaattatgatatgagaagatttggtctagaaaacatgggcctctcctgaaatactggaatccataatcacttaaagcactctggctttttctgtttggcttagctttacaactttcccatcagtgggtagaaacatctttgaatttgtgctttccttgtattttctgtatttatttcagtatttctggaaaaataattcttggaccaagctggtatttccagtcatctaaggcttgcaaccttgtgcatcatgctctctcatgcccttcactggcacctacattagttgtatgttttgtgtgcatgtcacttttctgtgtcccagtcattccgtttatagattaagggggaaaggtcttccttggatatgggcggaagctctggaaaggctcaggaacaacctatccttaatccttactaatttagagctagaatggaccactgattagggttacctggcgtgctttcaagagcatcatcattctttacaacccaacttgctgaattggatcaatgtaatatttgttctgttttgatttataaactaatggttgaaagctactttaattcaaattatattcaatagtacttgagatacagaaactcaattttaatttacttaagcaaagaaggaattgttagaaggataccaggattgctcacagaaagaagagctacattaatgaggtagatatgggatttcaagaactaggcaaaagactcaagagcccacagaacattctgttaattctcctactctctttgtgggctttgttttgtttttctttttcctttctttctttttttttttttttgagatgaagtttcactcttgtttcccagtctagagtacaatggcacgatctcagcttactgcaacctctacctcccgggttcaagcaattctcctgcttcagcctcccaaatacctgggactacagggacacatcaccacacctggctaattttgtgtttttagtagagacagggtttcaccatgttggccaggctggtctcgaactcctgacctcaggtgatccacccaccttggcctcccaaagtgttgagattacaggcctgagccaccgtacctggccttcctttttctttataccttttgggcatggctgcagtttactacatctgtgaacccaacaaaaaaggtagcagttttctccaaccacttcagtatatggaaattcaaggaaggactctatcatcctagattatgttcctatccaagcaccaatcactgtgacagagaaaatgaggtgctataattggccaaatctgggttatgtgcttaaacttgtggtctgggaagccagtgtcctatgattaaaagccttagaagaattacttgcccctaaaatgagatgagtgttgttcctggaagtagaggaagaaattctgaactgacaaaaacaacagatgtccaatacacaaaggagaactaatttttaaagttttaatttctacatcgttaaacacaacctgttttactttattgcaattatattaattcaaaatatttatttagaaccttttaatgtgccaaactataaaaaggcaatatgatatcattcttatccttaaattaaaataaaatcagtcttcaataatttgccctatgcataaggttttcttctgtgttctgtgtgaagaccaactataaagctgagtggcttacaataaatatttaattcatgctcacacaccatgagcgcttcagggcatgagtctaggtgagtgtagttctgctctatgtttctttgcattgtggaacctttactgaaagagcaacaacccctgtctggagacatgatattctcatggtggagggcaagaacagaaaagcttcagccatccacacagttacactaaaggcttctgtttaatcatggcaaatgtctgctcaccgttcttttggtcacacggccagtgcatatcacatggtggccaagcgcagaatcaatgaggtgggaatgtggttctttcccagagaatgtatgacaagtcatttgacaataaatagagatgtataatcctgttttagagaggaaacatgattcaggacagtaacccaaaatactacacttacaaagtaatattgaattttcactaattcatttcttaagtgtttcagaaatgacatattggtatataagtaataattaccatgagttttctttcacgtagatagaaattagatagagtgtaaccagctaaataatatttctgtatttcatttcctggattcaccagccatgtatacagcctttaatgaccactatgcctttagttaccccataataaccatcaactcatgataagggatggcaagtaatgtcatctggtctagaaaacttgttggaagtaggcatgggaataaattagtgaaagcacaaggaaatcagtgtgtcagccattctgaaggttaggtcaaacttctgcagcttgaggggtgaggtgtggttgataattttaagttacaattggctccaaaacataccttgtatcttgtatttcctgtttcaatcaaacatttttccataaattgaacacaacctaagagttagaattacaaagatgagtaaactcataggctctgaactgaaagaaatcacagtgagtaaaaacatgtcaattgtagaagttttttcaagtacagaaacggcattaaagagaaaatggctaaatctttctggagcctgccatgaaggagagagacatagggagagacttctcagaacaggtgatacttgaacagaattttgaataatgggataggaattatttaggtagaaattacatttgtacttctcaataccaagtaaagagaatagcaagtacaaactcgaaatcatggagacacaggctttgtgtttttgtctttaacacccctggtaggaacgaagggcaagtagtgggaggaggtgaggagacagggctgaggagcccagcagggagagcaagagaattagagaaaatgagacatccctcttcctggagcagagtgtgaatgactctctcccttcctactcttcattcctctgtggaatagctggatgctgttcatgagttttagcttattagccttttgggaatttccagggtgttgtgagtctttggaggccctggaatgtgggctttgggggaacctttggactctagcagaagacagaaatcagagggagaaaaagccaggtgacagtatggagtgtcatccaggtaccatgtggaagtgacagtgttaggaaaggaaatgttaagtttcattccaagtatctgaacctacactggtgtagctggactggatgaccggagaggcctgacccaatacggacaataagggagtgtggtgtctacagatttaaaaatattaggctgggtgcggtggcttatgcctgtaatcccagtactttgggaggccgcggcgggcagatcccgaggtcaggagatcaagaccatcctggccaacatggtgaaaccccgtctctactaaaaatgcataaaattagccgggcgtggtggcaggcgcctgtagtcccagctactcaggaggctgaggcaggagaattgcttgaacccgagaggcagaggttgcagtgagccgagatcacaccgctgcactccagtctggtgacagagcgagactccatctcaaaacacaaacaacaacaaaaacaaaattaataaagtgaaatacaatctataggctttttttgttttaatcagcatgtgcaggtacttgataacatactcttccccttaaaaatcttctgttgcagttgcttacagttgagtttttagaataaatatgtaagcttgaaattctcacattttaaaatcatgtatccttgaacacactgtattctatctatatgaaagctaatttagagacttcccagttccacagtcggtcctcaatacatgcaaactcagctacacatgttcattttgagcataaattagccatggctcagaatatcccagctcactttgagagcagcttatatctatcaattcctggatttaaatagtagatttgaaatcaacaataataacacagtttgtgaagatgaagaagtaatttgagttacttcaattctgtgaccacttgaagagcttttgtgcctagcatttaaatcagtgaaataaaatatgaaccatggtatacaatttttcccttttctaaaaagtatatgaatgtaattgttttatttcttctcattacattatttttattttactgctggtttcattatatatagaattgaataaacactttttcactgtttgcaaatttctctattagtattatgattacaaataattttgttgcatataggagagaaatgttaaaaagtaatttttttctggtgtcatatgtagtaattataccactgcttggctcctaaagctaagaatagaaatagggactcagagaaagctctgttcccgggctgaaaactgcatctgaataaaacattcccaagaagtacatgtctgcaacctgagcgagtatgatgtttatggagcatctaatccttgccaggcaccgttcctagtactggtaacatcacaatgaacaggccttgaagagccatacattctagtggggagagagtgaaagtcatcatgtaaagtaaaatactttaaatgaaacaaccaatgaaataaaactgcactggggataataaagggtggaggagaggtaatttcaataggtggtcaggcaagatgtctggggaagtgccatttgatgagaagccggaggtgtgaaactgtggaggaggaagagtgaagacagaagggtcagccgcagcacaagcccaaggaggtcatgcttcatttgtccagaagatggagaaagggctacagtgactggcgtaaaatgaacatggagaatgaagagattagttttcccttgtgggagaaaaagcccaaggaataactgacgtaccctgataatgatgaatgttcacgacagttatcaaactccgttactaggccgggtgtgggggctcatgcctgtgataccagcacttcaggaggccgaggcaggaggatcacttgaggtcaggagttcgagaccagcctggccaacgtgatgaaaccccatctctactaaaaatacaaaaattagctaggtgtggtggcggtcaactttaatcccagatattcggggggccgaggcaggagaatcacttgaacctgggaggcagaggttgcggtgagccaagattgtgccattgcactacagcctaggcagacagagtgagaacctgtctcaacaactacaacaacaacaacaacaacaacaaagttccattactaaaacaagatatttaatagagccaatgttggattttcaaagcattgtaatgcatttagattgttctcgcatgtcgttttgaattaaaatatcttcagtgctgaattttttaaaaaaacctcttaccctttagcttctggaggccttgaatgacaataaatttaatatgagtaaaaaaattgtttttaagttaaagactgatcttattattggcctttgatgatttcattgacttcttacacattgcctactttgatttttacctccagagaggacattggaattagttacactctccagcgcatcacacatcattatcttggttcagtgaaaatgcatttctcttattttgtcatactctttccctttatatccagttccattccccttcccatcatgatatgcagaatctgatatgtgccaaatatacacacatagctttgtaaaacagataatttttatgtaggcgtgtgttttaaatttacataagtggtattattattgatctcctgactcttcattcaacactgtttttgaagtctatccaggttcagtttattgcacagtgcccactttttatatccattaccttttatgtttccatcccccagtgatggacacctaggttgccttcagtttccacaactacaaacattgtggggacggttattacacacattcctttatagaccttgggtaaatagcacagaacagattctctgggtcataaaacatagagctacttaatttcacttagcctaatttagatcttacacaattctacttagtttggtaaacatacacacttttgtgttggctgagtaggttattgtggaggacaagctctgctattgattgtcctctgggagccaggtttctcatcttttgagaaaaagttacaggtaaagaaggaaggctatcatgagccctctggtatttgattggatttacaggtattagtaggaattcatagtatttaatagatagacatacagagagaaatacaggtgtgtacatgcaggtgttagcaaatgtacatttatttcctagatctattggctgagagggtgtagaaacagaggcactctgtttataatgaacacacttagcaaccagatctaagtttcatttctaaattgcattctttcataaaaagagccaggacaccttagagaagtgctagattgcagcgctggggaagggaaaatgtcagatgagcctggagcatcttgtgatactaaaaaatgaggacgtgcttaaacaggtatgaggacttgtcaaaagaacacaggagcctacctaaaggctctcgatatccaaatctggaacaatttgagcatgaacataatggtagtattagattttaatccacgggataaaagaaatagccgtgaatctatactggtataaataaataatcaaataaatgaatgaatgggggagaagggatcagtcttcttttcagaagaatttctattaataaatgtagaaggaaaaagggaaatagaaaaatcactgttccgcaaaccccacgttaataatgaatgcagataatgtgcctgatggaggctaaaatcagggggaagtttttgagaagaacagatatttgtagaggctcggagtctcctcctcaagatatatattaactacaagtgaaaagacagtaactttctggagaagaaacctggaagatgtcaccttaaccaagtgatcaaagttaatcatcactagtagtagacatattaacatcagctccttgatatgatgtctaagaaggacacagcatgatttttgtggcatcctttcaaaaaaatgcgtagcctccatctaatcatgtgaaaacagcagacaaccctaaattgtgagacagtctacaaaataacccatcagtatactgcagaagtgtcaagattatgaaagacaagattgagaaagtgttgtatgtgatacactggaagagatgaaggagaaatgacaacaaatgcaatttggatcctggataggattctgaaataacaaatggacatcagtgggaaatctggtaaactatgaataaggcctatagtttagttactatggtaccagtgttaatttgctggtttggataattgtactgtgattgtgtgaactgttaacattaaggggagctagattaaggatatacaggaatgctactcatctttcaatttttccaaaaagattgtcattgaaaccatcagacaggaaacccactctttagtcatagaactccatgtctcttatgtattcatgcaaaagggggctgtttgaatttccgtgtcaggacttccccactgtcgggagtgtaccatggaaattggtgtccttggtgaaccctggtccaaggtccacgccctttcatcctctgccgaggaggggaactttagtaaatgcaaatagcaaagacatttgagatgtatatggcctgttgtgctcggtgcctgccgctgaagacttcttttagagcctcttctagatgtcaaagcaaatgtgttctctgagacagctttgctacatgttaagtgtaggacattgacctgggagtcagaagacctgtctttaagtttgagctctgccatttcctagcagggaggcattgggcattcagtggttcttcatgtgcctagtatttttatctttaaaacgggcctgaatcttctattgctaggaattcacaatcatgtagtcctcttttaaaagacaaacagagaccttcctctctgtaagtgtagctgtgtttcttgacatagcatgtcagaggcagccaacctgtgaatatttctttcttaattatggtaattccatataaccttccacgttttcctcttcagcacagtgctctaggcgtcccgctcacctgttcggcgcacagtctggctaaagtagaactctgctgccatcatctggccaattctaggtactgtaaggctgggaaactaacaaaagagtaaacagattcaggaatttacagaatcatagacctctaaggaggtgggagatccctcagaattcacctaagccgatccctttgttaataaggaaactgatgcccatagagggagagtgaactgccttgtgctacttactgatcagtgggagaattaggagcagaacccaggcccatgcagttgaaattaattttccgacatatatgatgataggaaaaagattcgaatactacaaaatttgaataactgaaaaaattctaaaaccttttgcacagggcctctctagattcgtcttcttttaaatttactctatgcagatgttacaaacaattaagaaaaaacctaaaaattataaataagaagagccattatctattgtttgtatcatcttccaacaaaatggatattttaaccctaaaaaaaggcagaacatagctaaaaatatgtggcgatattatattacttttttttctcatttcgctgagggctaatgcaacttctttgctggtataaatgtctgtctacaaaccacatttgagggaactagttataatgaggagaagccaggggctctggattttaataactgggtctgatttcaactcttccataccctgtgagtgtgaagtaatttaaccttgatcagacccctgaccttctttctcttgtcccccatttcctcatctatgctagtgaatagcttcctcacaggaaatttgccaacattaactaagaaaattaaggtaaaattggtggtaacctgcaagcacaataagtatgcttattacttttttataattatggagtaaattgagatgagacaaagaaatttgttaatgatatggagagctctcaggaacccctttcgtcttctgctgaggagggaccctttggtaaatgcaaacagcaaatacatttgagaggtatatacctgttgtgctcggtgccagccactgcatatgtgtgaatttattacatgtttaattttgtctctgagtgcgtgtgtgtgtgtttaagtgctttcctgaggatctcgaagaccacgcatacattctgtgatttgctggaaatactcacaggatttagtagatatcgtcatgtgaatgacataacagcattacagtcaacaagagacttgcctgtatgatggtaatcctataatgttataataccttatttttaccgtatgttttctgtgtttagatatgtttagatacactaatacttactgctgttacaatcagctgtggtgttaagtgcagtagcatgccgtacaggttggtagcctagaagcagtaggctatgccacatagcctaggtatgtaggaggctgcaccatctaggtttgtgtacgtatgctccgtggtgatcgcacaatgctcacagtagcgatcgcctgatgatgcatcttccagtcattaagcaatgcataagcatagttgcactatccactgaagtttattgcagggaaaggaaatataacaggatcaataggggaaaagatactcagagactgtagagattcatgcggaggcttctgatgttttctgtctcctctgagggagcactgagggtgctcttttcttcagcagcaaaaaaacgcagtaacatgtatacaatgtttcttcccaggaagctcattagagacagagcatgcaaggaaattacctgacttgggagtgggggtcggggagggcgacagtcacgtaggcaccctctgcctagcagctatcaaaatttaagaaaagtagctattcagcataaatcgcattgtttgtatagacagtctgtgcacagcaaaccatctttatcagagagagaatggagggaactctccatcgaccaagtttccagacgccagcccagggccaacctttcaagacagacactctagagacagcagcctcagttccactttcttaacttttttctgcacagtcaagataatttctacagattctgagtgtagggcaagtcttgggtttatttttatcaatatggttttaaaaattcatgtattcaccttatatccatatgttaattctcaacttttacctgattgtatatttttagacggtgtttcggaatttgggatttttggaagaaatttaaatatttcactgttgccaggctatttctttgaaaagttaagtcttcagtggactcaaacatagagaagttttatattgccttattaaccagctaatttgcatttaacttaagaaaaagttctgcaaggtaaaaattcttctataagtttttaacaaataattgggatttaatctgccccaatttagatgccagtgaggaatttacattattatacacccacagaaatatcattatataatgttaaattgaagttgtactgtgttatattaattaaaacatacatgatctgtaataagaaagcacgggatatttgggggccttttctcattaaaatcagatcacaatgagataggaacttctcctccacttgatgctttagctttgctcattcagctctagggcatttttcttcttaacagccagacctctcagaggtgtgtctgcacctactgtctctattgccacacctgtttttaacacattcaggcaggcttgcactacccttccccagtccacaggaaaaagctgtaatccagttgtgtaaagcagagccccttctcccaaaggaaacttctgccattcggtccagcaatcctgctactaggtatctactcagaggaaaagaagtcattatgtgaaaaagagacttgcacatgcatgtcattacaattagcaattgcaaaaatatggaaccagcccaaatgcccatcaatcaatgagtgcataaagaaaatgtcatacacacacacacacacacacacacacacacacacacacacacacaccatggaatactactcagccctaaaaaggaatgaaataatggcattcacagcaacttggatggagatggagaccgctattctaagtgaggtaactccggaatagaaaaccaaacatcctatgttctcacttagaagtgggaactaagctatgcggatgtaaaggcataagaatgagacagcggactttggaggctcaaggggaagggtgggaggggggtgagggatacaagactacccactgggtacagtatacaccgcttgggtgatgggtgcaccaaattctcacaaaatcaccactaaagaacttatccatgtaaccaaacaccacatgttccccccagacctactgaaactaaaaacagcaacagcagcaacaacaaaactcatccctgggccccaccctgagcagtgtaattggaatctctaagggtggacccaggcattgtgtgttttaaaaacttctcacgtgcctctaatttgtagtcaagagtagaaccactgatctaagagtaggagtagaaaaaagagggtagtatggcaaggttggagagcttcaccagtgagccgggtttgggttgggaacactggcaggagtcatagtatggacgataataaagcatgttgttttgcaggtagctttgttcttaatttaaaaaaacaaaaacagaaactaacctaaaaaaagaacaaaacagatgaataccagctactctgatttaagtgagttaagggactaaatcctacccacaagctcttactcttccatcatcctttcacatgattccctgtcatgcctagagcttctggaagcagagttccgaaagcacccatctaggtgccagccactgtgctgggctgggaaggtgtcgggtggtttttgggaatcaaaacgcacgactgttaagtgcaactggcagctcataggatatgtgatgttaacttttgggaatggccaggtaagcttgaagagttcatccccaaaagataaaaccataaccagttgatggaaacaaggtatgtcttttattatataatattttgataattcctttgaacaacgacaacaacaactttttttttgagacagagtctcactctgtcacccaggctggagtgcattggtgcaacctcagctcactgcaacctctgcctcccaggttcaagagattctcctgcctcagcctcccaagcagctgggactacaggtatgtgccaccacacctggctaattttttgtatttttagtagaaatggggttttgccacgttgtccaggctggtctcgaacttctggcctcaagtgatccacctgcctcagccccacaaagtgctgggattataggcatgagccaccgcaccctgccaacaacaaaatcttctatcaccctaaagtaacaactttgaacagcttggtctgttcctttctaatgcctttgatattattttccctcctctatacctggggatttattataactacagttttccagcttgctcttttcacttgacacaatagcatgagcatggtttcatatccccacaaactcttcgtacatcatatttttaatatccctgaaagcttttcgtaagccattacagttgtgtagcttctacagagtgcttctcttatatggctgcatatttaaatttcttacattataaatcagttatttgtataattaatatatatcattatcatatgaaactttatacataaagtcctttttaaaatgtattaagtctactgtaggcttttaaatcaaaagttaggggcatttgtacctaatgtcctctcagtgaactgtcatattaaagaaccttggtaatgccttcttaactatctgagagttcttaacttgccaataactctgtgtcagtctattttctgttgtttataacagaatacctaaaaccaggtaatttataaagaaaataaatttatttcttacacttatggagattgagaagtccaaaattgagggggcatatttgctgaggaccttcttgctggtagggactctctacagagtcttgaggtggcaaagggtatcacatggccagggggctgagcatcctgccatactaactcagatctctcttcctcttcatgtagagccaccagttccttcccatgataacccattaaatgcatgaatggattaatccattcatgagtcagagccctcaagacccactcaccatttaaagacctcacctctcaatactgccacattgaagattaagtttcaacatgagttttggagggtatactcaaaccataataatctccgtccagaagaatttatactcccactgttttattgacattagaaattcttaatagtttcagtgtttgttaattttattattttaatatacatttctttattactagtgagttttaaaaacatgttttaaatttcaaaatgaaacaagccatatattttatttgattcattttcttatcatccaataatcattaagtaataatgtgtgtttttttttttcttgtgacagagtttcgctcttgttgcccaggctggagtgccgtggtgcgatctcagctcactgcaacctccacctcccgggttcaagcgattctcctgcctcagcctcccgagtagctggaattacaggcacgcaccaccatgcctggctaattttttgtatttttagtagagacggggtttcaacatgttggccagactggtctcaaactcctgacctcagatgatccccctgccttggcctcacaaagtgctgggattacaggtatgagccaccgtgcctggccaagtaataatgatttttaaaaaacatcttccccacacttctgcttacacacatacttctgtttagggtcagataactgaaaagtgaattcagttataatctcagttatatagcttgtaggaatgagaacataaaatttctttaaattaagaaataaaaaccacatcagataaaaatactgattaggatttgatagatactagtttataatttaccttataaatatgatggaattccagtcactattaatccttcacaggaattttgtactcttctcttactttagggtatttaacctaatttgggtatgttctatagtgctcaccatttttgatatcacagtgccaatattttcaattgtcattataaattaggcaaatgtgttccatgaagattctgtttaactttctttttgatgatctcaagcctgaatgttttgagctggaggtgtgcatgtggatcatttttttggcatgtctttaagcatgttcctcccagtgtaattcaaggtatatttgttattcaaaaataaatgttttacaatgttcatttacaaaaatcccattgttaaatgattgcattttctgaataagcttcagcctgtgaaaaaatgtgtcctgtatgttatataggttatcacattgagtaaacattacttgaaacagatcatggattatagattttaaaactggcccccatatcacttagcacaaactgtgagccataccacatgcttaatgaatatatgtactctggataaaaaagaaaggtgcaaacacttagcagtaccgtatggcaggaaatacataggaattaaaaatgcttaactttttgctccagttcagttaaagtgattgtgagaaattcattttaactctctaagccccatgattcttgccctaaccagcttagagtgctcttgaaagtagcaaattaaataatatataagaaaaaagtttccaactgtaaggcactatctaaatgcaagtaaatgcaaagtggatatatatatatatatatatataaatatatgtgtgtgtgtgtgtatatgtatatatttgttgttgctgttgttgtttgtttttgttttgtaaaggggtgagtgtggagctacagaggggagattcggaaagcgtctgtagcctgtgcttgctggttgcagagcacgtgtactctgcttgcgggtttaaaggcacttatgtgacatttgtttcagagttgattctcagagacctgatacatgagccttatattccactgtttttcagtggacatcctgaacttcgctgccattcctctagctccgctctgaggctgtgggcaaagctcagacagagaactcaggcaggtttctgaatttagaaaaaactccctcttcctacccgaacttaagcatgagtaggaataaaatttgtgtgatccaagtggttagttcagctgagtcttttggaaaaggaagaagttcaggcaaggaagaaaaggttggagcatgctttacattttctttgcctattatgactgagatcttgtgcttgtctttctcattaggtccctaacagtcaacagagtgttccctaactcccccctcccacaaggtagagttggttacctttcttctcacccaccaactcttctttgtaagtatttgcattatccccatatcgtaaatgtacttatgtctgttcatcctgcatgactcgaagactagattgatctagatcatctttgtagcttaaaagtctaacatgtctctcagtacatgaaaggtactcaatgagggttttttgaaggatgttgaatcaccttctgtctccttctctccctctcacacacacacgcacacacacaaacacacacacacacacacactaaacatacatgcaggaaagatttcttttcagattattaagaatttttcttaaaaggttgtacaagtataagcaatgccatattttaaccagtcagattaaagcacatacatcttcaaaactattttatttttccttctggaaaccatgcaaccattctaaatttgattctattattaatccactttaatatttgaatcaatgtatgcaatgtgcccaaagacaaggctcatgcagaatgatgccttgtttttgaagacaaaaaagattaaaatgtctggttcccatgggaatgtagccatagacatggaagcaatcaaataagattcacagttttgtaatgttgttactgcacagcattttccaaatcctttcattttgaatgtagcatcataacaaatgcgagttaaacaatttaagttgaccaacttatgtctcctaaataccaggcaattcttttgaaatgaaagagaatcagatgtaggaaatgccaaattttgttgccgttttatttagcattcacaacaagaattgaagctcaatttttagatctgatgagaagtttgctaacttaactaagttggtgaaatcgagcaactccagtatttgataatttaattctgaattgctatggaattctaggaattatgttacaaaaatagacaagatgaagtctctgcatgtattagcctgttttcacattgctgataaagacatactctagactgggaagaaaaagaggtttaattggactcacagttacacatagctggggaggcctcagaatcatggtgggaggtgaaaggcacttcttacatggtggtggcaagagaaaatgaggaagaggcaaaagcagaaacccctgataaacccattagatctcgttagacttattcactactgcaagaacagcataggagaaactgccccatgattcaaattatctcccactggatccctcccacaacacgtgggaattgtggggatacaattcaagatgagatttgggtggggacacagcgaaaccatatcattccacccctggcccctccaaatctcatgtcctcaaattttaaaaccaattgtgccttcccaacagtccctcaaagtcttaactcatttcagcattaacccaaaagtccacagtccaaagtcttatctgagacaaggcaaatcccttctgcctatgagcctgtaaaatcaaaagcaagctagttccttcctagatacagtgggggtacagttattgggtaaatacagccattccaaatgggaaaaattggctaaaacaaaggggttacaggctccattcaagtccaaaaacctgtgaggcaggcaaattttaaagttccaaattgatttcctttgactccaggtctcacatccaggtcacactgatgcaagaggtgggtttccatggtcttgggcagctctgcccctgtgactttgcagggtacagtccccttcctggctgctttcatgggctggcattgagtgtctgcagcttttccaggcacacagtgcaagctgtcggtagatctgccattctggggtctggagtagggtggccctcttctcacagctctactaggcagtgccccagtagggactctgtgtggggactccgaccccacatttcccttctgcacttcccaagcagaggttcttcatgagggccccacctctgcagcaaactttcgcctgggcatccaggcgtttccatacatcttctgaaatctagacagagattcccaaacctcagttcttgacttctgtgcacctgcaggctcaacaccacatggaagctgccaaggcttggggattccaccctctgaagccacagcccaagctttatgttggccacttttagccacagttggagtggctgcgacagagggcaccaagtctctagctgcacacagcacagggaccctgggcccagcccacaaaaccacttttttctccttggcctccaggcctgtgatgagaggggctgcagtgaagatctgtgacgtggcctggagacattttccccatggtcttggggattaacattaggctccttgctacttattcaaatttctgcagccagcttgaatttctcctcaaaaatgggtatttattttctattgcatcgtcagctgcaaattttctgacttttatgctgtttcccttttaaaacgaaatgcttttaacagtgcccaagtcaccttttgaacgcttttgctgtttaaaaatttcttccgccagatacctaaatcatctctctcaagttcaaagttccacaaatttctaggatgggggcaaaatgccaccagtctctttgctaaaatgtagcaagagtcacctttgttccagttcccaacaagttcctcatctccatctgagaccatctcagcctggaccttattgttcatatcactatcagcattgtagtcaaaaccattcaacaagtctctaggaggttccaaacttttccacattttcctgtcttcttctgaaccctacaaagtgttccagcctctgcctgttacccagttccaaagtcacttccacattttgggtatcttttcagcaacaccccactctactggtaccaatttactgtattagcacattttcacactgctgataaagacatagctgagactgggaagtaaaagaggtttagttggacttacagttctacatggctggggaggcctcagaatcatggtgggaggtgaaaggtacttcttacatgccagtggcaagagaaaatggggaagatgcaaaagcggaaacccctgataaaaccaacagatctcatgagacttattccctaccacgggaacagtatgggggaaactgcccccatgattcaaattatttcccactgggtccctcccacaacacatgggaattatgggagtataattcaagatgagatttgggtagggacacagccaaaccatatcactgcatgtgtggatttatgttataatctagaagagagtgcctagcttttgagtgtataggaatcatacattctcatagtactacctctattcactgcagtatggttgaactgagtctccaagatatttactaaacatctatatagctaaaccctgcagggtgtaattcttaccttgcagtccttatctgcaaagagttcatacataaaatgttctaggtggtggtatttaagtcatttcatttttttaacttttaaattatttttaaaaatttttgtggatacgtattaggagtatacatttatggggtaaatgagattttaaaataacttaaagaatcaaattagatcatttcacttattttaaaaatgtattcatcaatttttttctacaataagcctgtatcacatttataataaaaaagattaatctttggaaagtatttttaatgaggtattcaaaactatctaattgcaatgaaactccattctctagcctgcttgacagcaggctttgggctaagatatctctaagtctcagatgacctctgcctcttaattccaagtttggtcagtggcataacaaatttggttttccagtttcttttatacataatcctgaaagtagaaagaaatttttgataactgtgtaggtctaaaacataacaatacatttcgaattttagagcataattacatttcaaatattttctcttgtattcttcataaattgtgaaaatgtaatagacattaccatgtttttatcatctctcatattttgtcatatacccagaatagtgatacctaatgtatcaatcatcttttcagagtttaggtaatgtgagtcaggttgagttgataacatattatggacccaaaagaccagttactggctttaggggaccacctctgcaaggccccacttattaaccactttgcttctgtcttgagcatcccatgaactgtgtgaagtatgttttcatctttatgatttttaatgcatgtatgtggaattgtgtttgagggaccaatggaactgttgacatttggtatcatggaggcgtgtggttattctgaacatattctcagttacatctactaatattctgcagaaaatcttagaattatttatgatagaaacttaaagccatctaaatatgcagaagcatggtaaagactaagtgcattagagcaaatcattggaatattattcagttattgataatgttataaaaagtttataacaacacgtatgtttatatttagcatataatgttaaataaaaaagttataaaatgttatcattgcatctaatcccataaacacaataaactgtgtagagattaaagagatcctgtgtgcagaaggggccagccctgaccatctctctgtctaaatatatgatgttatcatttctattctgctgtaggtacaccatgttgatgcagagtttccttgcaactatttctcttcccagaattccacataagatttgggtccaaaggcttctgtactctcagtttcttcctgatcaagagtttcaatcttcttgtcatcaccccatctgagttgagaactagagtgacagagtcatcagaaacctaagaggctcagagagcttttgatcctcttcttgtcccctctccgaaacagtatttctcctccaaagagtttctatgtctgcattttatgtggtggaaactttctgtacatcatattattcttctttccaactctataggcttttaattttaggaagtaattgcccactcttttccaagcaataagtcttatggcttagctttgatgttagaagttcagtaaaagtaaatttctcaccagtaagagaaaatacattgagaattgggggagttttttaaaaaagtattctccccatttgaaattaataattaaaataattattagagaaagtggaaatattgtaaaaactgagatgtccaagcccacagacatccagaatagatgttgagccttgtaatgtccgtcttattgttgagctcacaattgattgtctggttatgtaccagacatcttctgaatgtgtcacctggcctgttctctagtgtgacacctttttctcctcagatctgtagtaattaacaatcagtatcattttaaatttttggtgaaattatcgctaatggttttgtgtcctttgtcattttctaaaactttctttgccgtgtgaaaagggctggaactatgtagtctgagaagtatgcctttgacaccttgctgtgtttctctccttgcaccatgtttatcagactacaaggtttaagccctttttaggtttatgaagtaagccttttattcctgaatttttttttctccttgtacttttcaattatttttccttattttagaagtatctctctttttgagtgcataacatttctagactgtatttgtaccagacactccccatgttcattttattctgctgacgaaacaggaaaatctttgtgtttttgataaggactgtggaaatagaacatgcaggcctttcttgttaagagagatgtaggctggcgcagtggctcatgcctgaaatcccagcactttgggaggccgaggtgggtggatcacgaggtcaggagattgagaccattctggctaacacggtgagaccccatctctactaaaatacaaaaaaattaaccaggcatggtggcacgcacctatagtcccagctactcaggaggctgaggcaggagaatcgcttgaacctgggaggtggaggctgcagtgagccaagattgcgtcactgcactgcagcctgggcgacagagctagactccatctcaaaaaacaaaacaaaaaaaaaaggagagaaatgtagatatacatctttaactttttgccaaattttgattagaaaggaaataatagaccaaaagtattgcatggagagaaagaaatatctttggtcctaaatatgtattatttacatagatattatacttattaaaaatacttcaagtttatagagaaataaagtttaaacccagattagttaaatttgatttaaacaaatggattttgctaactaactgatcaaggcaaagatcaatatgagcgtgaaattgggagactaatcccatgggtcttcatgctaggagagctgagcccaagccaagcaagagacatcccctcatcccccaataaaacaagcaaaagtgatcacagatcagtactaaatcctgacaaaaaaaatgcaaatattctctgaaggaaagcaaacatagttaatcattttctaataataccttaaagaattaaagtgtttttacttccattttggaattcagttccctaggagacaaatagatcctcagaatgtaaagatattagatagaatcagatatgaccttgaagttaaatgtgaccaaactctccaaattttttttttaaaaaggggggggcattcttaatgacccttcaagaaccaagaacttcatatattagaatggtcagtttcagaataatacagagctatgtataaaatattttaaaagtaaaatttataagtttagatatagaaggaacaaaagattttcaaatgtgatcaaattagtttcccaaaagaatcaaatacaacttttaaaagtgaaagatataattgaaattaaaaacccaatagatggtttggaagtatatcagacacagctaaaagaaagaataaatgaaaagggagacatatatgaagtgattacccaggtcataataatgcagagaaggaaggtagaaaatatgaaagaaaagttaactgatatggaggacacaataaatatctaagctagatccaactggagtcccagaacgaaaggacaaaggcagttgagaaaacaagtaactgaaaattgtctggaattatggaaagatacgcatcatagatacacaaagaaacaggcacattaggtaggttaataaaaaatatgcatgtatatacaataaaatatttgaatgtcaaagaaagtatagtgaagttttagaacaccaaagaaaaagagatcttaggagcagctagagagaaaagactgatcatctgcaagggaacaataattaggtaaagagaagacttctaaaaaatggaagctgaaagaccggagcaatactgtccacattttgacacaatcacggacaaggatgctgagtggagccacataggctgtgcactgaacaactccagaggggtgtgattcacataggatttagtttgtgtagtgttccctggagttggccaatgcagcataaaatagaattttgaactcaacaaaattatctttcaaatatgacctgtaatttttcaggaagtagaagaggaagcaatttcagcctcatatcatgagaccaatagaaccctgttactaaaacttgacaaaaatacttaagaaaattagtagagactatagcacgtaacacagagccacaaaaaatccataataaaacactgacaaatcaaatccattaatgtatcaaaaggagaataaattatggctaagtggagtttgtccttagaaaagaagtttggtttatcattaaaaactcaccaatctatgcaattcagcatattaacagaataaaggttaaaattcacatggtcaactcaacaaatacagaataaaaacatttaacaaaattaaacacccattcacaaaaaaatctcctagcaactgagaaatataaggatctttctcaatttgatagaaaatatgtaccaaaaaaacctatagcttacctcaaagtgaatggttaaatatcgatgcttttctgctataattgggaatacggcaaagatatccattttcattacttctattcaatattgcactggcgatccttaccaaagcaaacaggcaaggaaaagaaaaaaaaatctattaatgctgaaaatgtgaatactccataattatctattctactttaaggcaaacattctagctaaaactctttacgcatcaccaggagacacatgtaagaatgtttatagcagcaatgtttagcctagcaccagtctttacccaggttccgtcagtagcggaatgcataaataaattttagcaaattcacacaatgggctattatacagccatgaaataaattaactacagctatgcattactacataggtgaatcttagaaacaaattgttaagaagaaaactgttaagtgcaaaatcctaaatatatgtgatatttaccaggtcttgacatattcattgtgtctgggacttttagtagttttttaactttagtgatctcctaaaccctcaacatgacttatctttagtccattaaatacctaagggtctactaatcatcacaaacttatcttttaatatggcaacctcctgctcaatagtcataatgacatcaaataagttcctggtacagtaggctggtttcagttctcatggtttggccatagcaagccttttacaattttcctgttgtcaagaacaatgtattttatgctgtcagactggtaattctcacagttctcccattctttcagctgtctttaaatcttgtctcttgatacttacaatggcatagaacaaagagagtgttggaaagtcaggagacttggattctactcctgatcattctttatacctactgagttaacctgagaaattgttatgaagtgataaatatctatcattgggcactgtcaatgcagaaaccattgtgtttacactttgggtaaaaatcatatcaataaagtaattcttgtcccagagtaacttacagctccaagagaccaaggaagatacatatgtagtcaccatacaaagtagagcacagatcatgataagagaagcacagatcattctatgaggcttccagtgttggagaaatcacttttcattttgttagtggagactagccaaagcttcatgactgaggtgatattggaaatgagtgtcacacaaaggtgctgaggtgtgttgaacatatacaggaagctgtaaccaatggaaatgctttggaaaagggttctggcaactgaaataagtataggattgacacatagtttggtattttccactctattttaaatttgacaattagatacggaggctaaatgatctcttcactatcagaaattgatcaaagatggtggccagattggtactgtggattcttaatccatgaaactgttacatttttattcagattctaatattaggtgccaacttctctttctatactaagtgaatgactcttgatgattataaagagtaaagcatctttttgttcagttttgtttatttggatgaatcataacatgaatgcctgataacactgtggtcattgtaattgtatagtttatttcatcaaaagttaggatgttaatctactcagtatcctgtgttgagttttatttggtatcctatgttcggttctatctatgtttagtattactggtggcttcccaaatttgctacatgattaaaattggatatattgtcagtctccactttttgctccttaaaaggatctgcagacctatttctgtgtaatgggtagtcctggtttggtacatagtatgatatgatgcttttgtctttgagtctctaagaaaatgagttggaaggagattgctataaaatgacactgaggttattttattatattaggtgtttcttcccttcttctccagtagtttttattcctggaaagggtatcttggtgcagtgggaaaaatgggatttttagatttagaaggtcttggttttggtcttggctttgtctctgctactcttggatttcatcatcttgaaagatggtgtatcaattgtggtcaactcaggagacagaaacctcacagtaatttgaaaagtgagagtttaatataagaattattcattgtaatgtggattgaagtaacagaaaattggctagtaagaagtacaaagaattctataggatgcagcaatagtatatataaatatcagctgctgtcataaggctgagatacagtgtcaaggaggagccctctaaccccacctcaggctgagatccagactcccttggagagggcatgcccatggctgattatgaattattgaaaagtcatcaaagtgcctcacttctgagacttgctggaaacctgccttctggggtacagaaaagcaatccatagggaggtgttgccctcaagccttgctgcagagttgccagagtcagtgctgggtgcaaccgttttctgctgggcactgttggtcaccagatgctacaagaaccaagggatagagaagccttcgtctgtaggaatggggcgttggagaaactgcattctagaggggtccaatgcttaagaatgcataagccctgcaggaagtgagccctggcaggtgcacaggagcttacccgacagcagggtgctgtggaacctgggatgcatggtgtccacattgggagatccatggcaagatgatcactgagctgaaactggggacgcaagcttaccaaggggcttcacattctgggtctgtgagcaccacaatttgtgagtattcccctcacaaattagctgctgacggccatccaaaacaaataacaagaaaatcaatatagaagtaaactggaagcagggagagaaaccacttcctccagcaccctctagtgacaaagcttaatattgtgtttgctgcaaagaacagagacttaaagggttcaaggccattgttgccaagtaggtaatgaaggatggatttgaactgagacacaataaattgataacttgcatagaggaagggacagatccccgcaggtatcggaaggactgaatgagatttgattttaaaagcctttgtgtacactaaaacagaatacaaaaatatactgttgctatagttatgattcactgtaattaaacatgatactgacataaatgtacagtgccagagttggatcagactgattctgctgcagcaagtctgctgttcttgtttttagggaatttattttaagattatatttgggaaatattgcacctgaatttaaacttatttgggtcttctaagctaaactgtatggcatattggtggccattcatcagtataaaaaataatatttattgaaatctaatgatatgccagaatacatttactcatgctgatatttatattactggccctgtttttaaaatgaggagctgaggtaaagtagttttctaagaccatacagaaggaaataatccaggaatcagttccaggtttttcagattctacaacctgtgcctctaacttagaattgaagcatagtatcactcaagcctagtatactgtcaaagtgccgtcacttgggcaaaatgcatatttgctttggacctttcatgtctctgtcctgcttacagttctggtatattgttacccctccctcccaattttcagggggatgtttttcttttatatttagttgcttttcaataactcacacatttgacactaggagtaaataatagataagcagaaattgatttagagttggttgtctagctctaacatcagaaaatgaattttttgcagagtgcagaacaactaaggcatgttcaaaagaaaacagttttccacatccttggtagatttctgcagctcatttcattaagaggtgttttatgctaacagtatgactagactgaagcatggctaataacaggaactgaatttaatagctgcaaggtagaaataacccaagtgtccttccgtggcttggatggagtgtagtacatataaatgtgtgcttatatgtgtatgtgtatacacacatatatatatgaaaatactttgaagaaatgaaaatgaataaactacttatacaaaagcttggatgaatttcaaagacataacattgggcgaaagaagtcaggcaaaaagggctgtgaagttcagaaactggcgaaacgaatttatggtgctaaaagtcagaatgataattacctttgggggtattgcctgagaagggacatataggagactttgggatgctgctgtgtcaaatacttgatctgcgtggtagctatgtaagagtagacatttgtcagtttcatagagaaaagatttgtgtgcttgatctatgtaatattttcaataaaacatttatgggtaaaacttaagtttttaaaaatgggaaaatgataagtatactgtgtaatggtaaaatgatttaatgttaagtagtcattacgtaagtttactaaaaaattttacgtgatgagaaaagagtgcttaggttacagcgttgagaggaaacagattagagtccaagtctgaatgcactgtattattgccactatgtaaaccaaatgtctagaaaatttgtagaaaaaaatgcatcaaatgttagcagtactacagaaatgggtgatttttctttttacttcactaagttttttcagatttcctgcaataaacgtataaacacttttaataatcagctgtactaattattgaaaaaaaatgagtatttggagagcgtcttcatctttaaagaccccaatgtttcccattacctaatgctcaagtactctagaaaatggcaccaatctgagtctgtatcctggattctccctccttctacaaatattccctgtgccttgagcaaattgggttttctcttttgttgttgttaattcattaaacagttttcaagcatcggttatcagccaagcactctaggaacacagcaacaaatgagtggctgtgatttcctttcccttgattactatttcctctactggggaagacaataaataagcgattgtcttaaagactgattaggttgaagatgggaaaaaattaagagtattaggaaagtttatctacaagggagatcacatccaatctaaaggtgcagtattattgctgctaaagttttgtttaagcaaagactaaaaagatgaatagaaatctgccaaatgtaaaaggacaggacacgtgatggtggacgggagtgagaacgaaggattagggatctcaggaagactgaggaattgttgggaagtggtggaagaaaatactgtaggacaggagggaggtgagtcagagttggatgtttcagatgaagatttcagaggtggtgtatgtccatgtttgccttggatgcgagttgtgaggcaggatggaggaaaatattattcaaggtgaggatgccggtggtctgacggctggtgctggatgcgttacacatgtagatgctgacctcactggaaagacaatggagaggagtagaaaggaaagaccatctctgtttgctgactactgtcagactatgcatctttaaagacccacgggaagcagaacttctacgaggccatctgtgaattgcccaatttgatacatgttgtcattcttttaattccatagcatctaatggttcattgcataacttggtgctcaacgagcatttgcttaatttaatgcttccgtgatacatcactgttagaaacggatgtgttgagctaaatgaactgtgtgtttaacctgcatctattgttatgttccaacagttcaggcaaactgaattgccgattctgaaagcagttttgttgagagaataccaatctatgtttttcacttggtatacagccatatagtttagaaagaatttccctgtatttgtgctaaaagggtaaaactatagctttttaagtagtcacttaatgtttatatttctgttcagtgtctgggtatagtctcacttttctgtagataaacttgcaacttcaaatgacaggcatgaattcgagacagatgtctcccatgtctggaatcaagacaaattatatcacttggctgtcacaaagaatgcctcttttgacgttatggagcaatttgtttaatgacacaattgctaggctgtggaacagatgactgtctcctttgttgcttagaattcctggggcactgcagagagccaagcagttgcaaaatgattggtgtgtctggataactctgcagtcacggtgcctgagtggcagaggagaggaacaactctgttctactggtggcagctgttctgccactttagggaaggtgggaggtttgttttctggtggccgtgctgccaatctttttgcttggctaattatttgaatccataggattccaagagcaaactcataagagtttgggatgaactctttaaaccttgccacgtgcaaaacgctgctgcatgtattctgaaagcccatggaaagagaagcgtgagagacccccacctttcagaatttctaggtgaagatatggatctctgatgagctaaaataggaaggtggagtaaaacgacccctggataaggatgttcttggggtgaaggactcaggaaaaggcatctgtttgaattttctagaataaattgggaaagctttctagatgagatgctctaggaagctgggctataaaaaactagtaatagtgtaatttgcaagaacaatggcaattctattcctaaattgcttaattcctggattcaatgaagaaagcagtggggtctctaactggagcgcacagtgtgcaagagaatcaactagatgctaacctcaaatgccccttcctgggattcagccccagaaattctaattcagttgatgttgggtagggcctaagaagctgcacttacaacaaaaaagtataggttatttcaatgcaaatgtctataaatcacactcctctgtgaattgctggtgttaaatatgaaaaggtaacttgtttttgcaaaatggatggtagtttcaaagatagaagagattcttcaggaaagatttaatggaagagtagtaattagtgctctgctttaaagcatggtggaatttactgcccagatactatgtaaattttaacttgaatgcaatctgcataattagtgctcttttttctttctttaaatttctgttacaaatcttttatttaaagaagcgaagctactgttgtccttcaccttaaattttacctgaggacggattcaccgtacagatatttctcctgctactcagagaatccctaagatagagaattcatgaattcaggcttcgcttcactgactggaaggtgttcaagccatttaaaaatacaattctcttaaacgtgttttgagagctaagccgaaacacagtctaattcgcagagggaagcaatttccctcatgtccacgaggtggcgctcgcccaccactcctggcctcctgtgcgtagcaagcagggctgtgatggtgtctagaagctgagagaatctggggagatcctgtcagcattatggcataggcttgtttgaattattcttagaacatagaatgacaatatactctgcttttttccccactggttccagtcttgtctaatgctgaaggtcacattatcttgttccagaagcaatgttaggatcaattggctaactagaagaaacaaagacagtttcacagaaaggcaagataaaaaaaaagacaaaaggaacaaacaaagagggctgagtcaaaagcatggaatccttctaataaacctactgaatgggaaatgttggaaggtgtgaagagagaaggaaattgtggcggatgatgaattcaggtttgaaaaaaagtgagctcaaatctttcttctccttttttcaaggtcagctgtcaaggtcagaccggagagaactggaggggatatgggtgatgtcacacactgtggcaggctgggcgttggttttagggcttggctacggaactcaaggcggccagactgatggtcattttcctatttcttcctcacaatcaactcgttaaagtccatgcaaatgtctgtggtttggtgaagaattattactttattatggcactatagggacttccggaactctgagaatccatggtcctgagttgagaggaggtctgtaagtcctggataagcccagtgcctgacattgggccagcattgcaccttgcagcgccagtgcttctcagccactctgtttgagctctcttgttgctacctgccccacctgctattctcctggttcccataagctacagaaccttgtgtgtgcatcatggagcagaacttgaccatgatggggaatttccatcctggcttattttgtgtgaagcaaataaataattgtgaaaagggtaaagcaaagtccaaatgaaaatgcagattttgctgagctggaaatcatctttaaatttttttgcttgttttcataacttataaggtatattgagagacattttgaactcaggtcttaaccgaaatgttattttaaatattgagccaaaacaaaattattagctgtaagttttgaagcagaatgctgattatgttgcaactgcttttcaaaatcttcaatggcctgaaagatacagttaaatactaacctaggtattcaaagctctccaacaacctttccagccctacttattactactgtcctgcaatacttaagttatttatatttttataaaatatctatcttctatattattatccacatttaaaatctgtatgtaagagcagaaaagaatattccattctatcacaactcagttgtggatataggagctacagtgacacaattgtacaaagcagtgaaaacctcacttaaggttatctctgaatactatgatgtttacgtattttccaaagaggatggatatgcttgaaaatgtctgaatttctctgtgttgtatcaactgaaatccagtcttcccaaataaaactccttctttcagcttaatcaaagatcttgttaataaagatggaagacacggccgggcacggtgactcacgcctgtaatctcagcactttaggaggttgaggcaaagtggatcatgaggtcaggagttcaagaccagcctggccaagatggtgaaaccccgtctctactaaaaatacaaaaaattagccgggcatggtggcaggcacctgtaatcccagctactagggaggctgaggcaggagaatcgcttgaactcggagggcggaggttgcagtgagccgagactgcgccactgcactccatcctgggtgacagaatgagactctgtctcaaaaaaaaaaaaaaaaagatagaatacatgtggctcccatttctctatctgaaaacaataacaggttctttagctagggctcatctcagttaccaggcagcattattttggtaccatctgaataaaagaattcatgtaaatactgagattttgggtttactgaaggttaattcagaattgattacatacaccagtgtgatgatattcacatttctttatcatcttctctccaaagaaaaacatgtgtgtaatcttgacttcttttctctgtcccagatagacagtacatctgtaacttgtttgggcatcttcagattcttttccctctggcacctaaaacttatagaatccaactagactcaccaacatcttagtctgtcttgagtctattatcttttcttttataatattgctgatttcacttaattgtctcatgcatttattcaattaataatcagtagatgtccatactgtgccaagcccagtgctatactggaagcagctttcatccacaaaccattgtttttcactatatagtcagtgcgcaatgcagtgtagtaaacactggatatatatcagcccaatgaatgcacagacatacagaggtgaacaagagacatgtgttccctgcccactgagcttgaatacaagggtcatgtcacagacttctttgaatcattcacctctggcagtttattttgcactacaggtcctctgtcctctgtctctagttggtcgtcctgtgggcaaaagaaagtctcactcaacaatgctctaattttgatctatatagttactgtaaatcaaaattaggcttctaaaatgtatgtacaattgttggcattaaagtgagtcagcagcaatagcagttttattattgtcgttctaagggaaacttaagctataatgagttcatctaacctagagagtaaaattctggtacaagtatggaccttgggattacaaacaggaaaattctgtaatggatgaaattgttcactgggaaaccaggccagtctttgagaggtaattggtacctttccgtatctgctcacaagattctggccttagaattgctaaggactcacttgttaaacaattgtgtttcctaaagtggaatttctcttgctatctcttggacaagaagaaaataatccagacaatcttaggggtgaaactaagtgctgacgtttctcatttgaaggagtcttttcatactggaaatgaacagtgctttcagtttattgcttctttcttcatcctcaaataattgagtaaagaggttctttctgtggctccctgggtctaggctgtgacaataggatgtcagaaaaaaacgtgcaacatcactgggagaggcgttacagggaaggaaactgaggcacagaaggagaagaggctgaccccagatcagagagtcagtggctgaactggggctagaaccctggtttcatgactacctaactaatactttttctactggctaaatcctccctcagattcccccagtcaaagattcatttgctcatgcctttatttatccaacatttactcagaaaaagataaggaaagctgtcctaatttctgtgatgaatgctgttgctttaaagtatactatctcatttcactgaatcttcaatatttataatggaggcagttgaagcccaagaaagtgaaataatttgcccagttttacgtagctagttaagtggcaatactggcattaggactcaactccacaaaataagtctctttttattatgccataaaccattgccggtgcccaaaacagtgttagggattgggaaatgaacagtatttaatttatcagattgaagtcctttatcctagagcattttctacaatgtaagatggggttcctgctgtcattgagcttgcactcaacttggagagaaattctatatcctttaaaatgtaagtaaaactgcaagttaagtgtcatcaccagattggtatatatgatgggacagagaaaagttaccagcctcatgggatgcttacagggactgaagagttagattgtgtggctgacacatagggcatcaattgttttactttcaatttgttgagtgattaatatgtcttagaagagtaaagagagttaggttttcaaatgtggcagatgtgtgaaaacctcttaccatctgcaaaacaagattttaagagatgtcgcctgatatccttgtagctaggaaaaagcggagggttagtgaaggaaaatcgtgaagctcaacacatcaaaattcaaatgtatgattttattgctcacagtgtgtctgttggcagtatcgctacattccgtggatggtatcacactatacatttattccagaaacgttgacacattgttgctctcccccaaatcccatctgactaatcactgattgccccactgccaccgctgttgtcttgtgtctttcacctgagctgctggaaaatactcccgtccacccttctgtgctaaatgctccctttgcttgaaaatttcccagaccacagtcagagtgacgttttcaaaatgcagtgtttttcatttatctcactaattctgcaaaaccattcaatagatttcctgttgctcttataacaaataaaaattgtttttaatggtctacaaagaccatttttttccagtctttgaaaaataacttcctcttatcctttacactctttcacatggcagtcttcctacatgctgttcccaatacctgaaaaagtattcacctgggtacctccactcagcccctggacctcaattcaacatttacttcttccataaagctcccctgactttcctctccttatattatgcttttttttttttttttccatatggagtcttgctctgtcacctaggctggaatgcagtggcgcgatctcagctcactgcagcctctgcctcccgggttcaagcagttctctgcctcagcctcccaagtagctgggattacaggcgcccaccaccacacccggctaaattttttgtatttttagtagagacggggtttcaccatctttgccaggctggtcttgaactcctgaccttgtgattcacccaccttggcctcccaaagtgctgggattacaggcgtgagccaccacgcctggccatgttatgcttttatacaacatgtacctctctggctcacagatgcaatttcccatttaacttacatgatttattcccacctgtctctcccaccactagattgtaagctcagttgaggcaagaaccaggtctgcttttgctcaccattgtatccccaagccagtgaaatgctcagcacatagaaggaaactgctaagtatttgttgaatgattgatccaagaaaaatgggacgattctgattctaggaagggaagattaaggtgtggctttaaaaggacctttataggagttgcattacatggagaaaagtttgatgttcttttcagctcccctgaggatgggtaaaagagctctgcattgtgttggacataaagaaatattgggatgaattaccagtagatgctctaaaatctatataaagaatactgatagtgtcagaatgtaggttgacaggagagaataaaggctaggtcagtgaatttctgaaggggccattgtagtaaacaaagttactattttaataaaagctttaggcaattttaaattcctgcttgagtctttgacttaaatctgaatctgattgccttttgtaatattccataagaatgtgaaaaaggcagtcgatctcatgttggtgatacaatgtcttgggtaattttcagagacccgctgcaaactgcaaaccagtatatgcaactaggtccatagagttagcgttgcagttcaggacaaggtgggggcttacccacacttcatgactcccacatagaaactcttgttttacattcagccctgtagaggtgcttctctcaagccaacctgttctgtttcagttcttttgaaaccggggggctttgtaaagccagagagcctgagagactaagaggctttgacatgttgaagcgcatgcaaactgactttcttggtcacaccaaaagactccactcctactggtcaagcacaaacgttgttattggaatactcacaaatcatcaatctttgacatgaatgtttccttccttagtggagtctgcctgattacagcagcaaacctggtctcctgtctgggtacccttccctggcttttacccttcagaggctgaagcagaaagaggcttattaattagtgatttcactgcactggcaccaggaaatacgaagagcaggaatccttagttctgcctctggactggataagaggagccaaatctattttcctgcatccctgaagatggcttcttctagattggctataagtttccagaaggcttaacatcagacttttgtatccatttataccttctccaattaatttaaaagatgataagtgcaagccttaagtctcacacatgcaaacactgcatactctttgttcttaatgattttaacatctggatgagaggtaagagtagagggtcatgagctatcgttgtaaagttagaggaaggaagaagaaccaaaggtgggaataatactcagttagaatcagagatgcttttatagcacatgtgagattttttaaaggacaataggatctcatcaacgggtgaaaatgagtaaaatcatatccttcagtttcaggtgtctatgtggttggtaacttgtaaaatatgtacaaaaggcaattgaaaatgagagactcaagctcagtatatttgcagatgttcgaggaaaaaagttggattcatcactatagaaaggacttttttagtcagttgaggggatatgactgccaaagaagaacagaattcagagaacacgtttattcagggacaaaagaaggaaggagaggcaggaaatgaagctatacaagggagtgggcaaagagtaggaggcaggccctgatgcccaaggaagctggagactttaagtgagagggattctccaataaagcttccagattacaaagagactgaaggaatagatttggaactgggggttactagcaagtaatttgctcactgtttttttttttgtttgtttgttttgttgttgttgttttttgagatggagtcttgctttgtcgcccaggctggagtgcagtggtgtgatcttggctcactgcaacctccgcctcctgggttcaagcagttctctgcctcagcttcctgagtaggtgggattacaggcacccaccaccacacccggctaatggtttgtatttttagtagagatggggtttcaccatcttggtcaggctggttttgaactcctgaccttgtgatccacccaccttgacctcccaaagtgctgggattacaggcgtgagccacggcgcctggccagtttgctcactcttacacattccactgacttccttaaaccttctggctaaaaggcgatgctacctctcaactagttctctacacaaatagcattttttgttagctccttgtatttgatgaacttctttaacaaagatgatagtatttctattttcctaatgattttgagagtggtattgttagtatttttttgtagtctgcaatcctatcacaggcacttcctctagtcgctagccttttatttcctccattttcccagagttctccctgctcccctgtgcttacttaactatgccccttctacccggcttctcttgctgcaagaccttttaaggaattatacactattcattcataagatgcaattcagactatatcactctcgtccttaaacacctccatagcctctaatttttagaaagaaaagcctgagtttcttggcacagcatagagtgagcactcaagaaattttttacgtagataatttcatacattaatctttgtgtcctttcatatcttcccacctttgtgttctccagcactggaacacagtctgtgttgggagacagcagtttgcgtatagtcagctacccaaaaaagggggatgcgttctagttttttctgggaatgccaccttaagcataacttcacctagaatttcaatctacagggcaagaaattgttgatcagacaggctactcagaaacatgtataatcttaaaagtatcttgaacatgcagttattttgggaaactgacattgtgcaatctaacccagtggctgtccagcctggatacaccttagaaacacctggagagctttgtaaaactaccgaagtcaaagccttgctccagacaaattagcttattcatgattgctcgtttacaacggaggttttccaattgtgggccccacatcagcagcatcggcagcacccaggagctcactagtactaaaatctcttgactccttttgaattggaaatctggaagtaaggcccagcgatccgtgttttactaagccctccacttgattctgctgtgtatgactatttgagaacccctaatttacagcagtaagctctgattctcagtaccactgtatcccagaggcaaagctaggcgcaaaggaaggtgaatgttcctctctggtatggtactgctctacaacaaagtatctaatttttggcccaggaggcttctcatctttattaatttaagtgggatcaccatctacaatgggagtgagcttcttgtagacatggactatgacagtattgtcctgaggtcacgttcttctgtttccttcagagctccaacccctagcacgaggcctggcgtgaagtgagtgttcaataaagacgaggagaaaactttgagaattgcttgggctaactgagagaagtagacgtattcgctgtggtgtgttggtttcctcaaattgtgttgtttcaaaaaatattcttcaaaataaatattctttttaaaaatgccagggaattgtaaaagctggttaagcaaatgttatttatcatttatgcttctgaaaatgtgataacaaggcttagcatggtaacacattgaaaattactctgcactgggaaaacgacagaagcagattgtatcctcagagcccaaacagaagaacaggagaagaaatgcttattttgatttaggcttgatatactttatcagaaaagcaaagctgtttcatccttcagagtaacttgccttttagaaaacagaatttctgagagagaaagacctaaggaagttactaggtacagaggagaaaagtaaggcccaggaggctcatgtatagcctgctggccgaacaatgctgttctgggaccagaaattgggtttccagtacattatctgtgataccacatggtcaaaatggatcgccaacttcccgaaacttgcaagttcaggacatcaccaagcctggggattatcacagtgagcagtcctgggagtaagaagccagatggccaggctcttttagaggcttttgctaagctctcctgtctcttttaagtagttttcaatttcagaattaaaattttcactgtatttcctttagcagtaattacaaattcattcttcatttagcagtcaaagaaatgaagtttttttaaaaaaaactagtgttgcactaaatgaaaaagatctgagataaacccagaatattcccccaacttcacagcctggaatgttcttctaaagctttctgatttgtggtttaaagtagaaaatagagactttatgctttatagatcatagaacattggaacagctgtaaaatcacttaccctgttgaggaaaatgagaccaagacggggataggagctggagttgtccaaagtgtcaaagatggaataattgtgaaaatgggacctaaggccagttctcctgactttttcttcagtgctctttaaacccttcaatggctaagacagcaccactgagaaacatgcgcatagacctgaaaagcggttggataaatgtactgctaaccgcaattaaatggatagagaagccatcatgagttagattatctttcttgttttttttttaatatcctgatcataggggttttaaactaataaacagcattctgggggaaatgctttgagattggctttgcaaccacgacagagtcaaactgtatttcgagtagcacaactgctccttatggtactttaaaatcaactctatgacccaattttattcctaaagactctaactgtaatcaaggagaacaaacaagaactcaaaaaagtcaactccatatgaagattgatcacagaacacttctttcctttcctctctgccaggtacatacacatgcacacacacacatacatgtatacctgcacatgtacacatatgcctgcacacacacatgcacaatctcaagcttactcctatggcagtctgtgtagcacactggtaaaaagtgtgaaggcagcattcaggcttcctgagttcaactttacctgtacactttactggctatgagactgggaagttatgtaacctttccatgccttgtttttcttattccacaaagagcttgatctgtctcagtttttcaaggaaaagctgatgtccttcacttccgctgaacagaggctaatcaaaccacagcttcatcagttcctcactttcctcacttgcacagccccttccaagttctgggaggggctcccggagggtgttcacatgtgttttgttttctgggtttttttatttgcaaaagtgagaattttttttccacaattggttaaggttgctatctttttccactcggccatttgctttatcagtttttctctgtttaagggtggtggattcgtcattgccagttttggctctggctaaggagaagttgaactggggatacatttagcttggttttggtaggattatcatttatgtttacagtcacttactagtaaatcattgccagccctcctgatgtcgaaatggccagaaatactgaaactgcccactgtgctgactcagtgtggggcatggcacaaaagtgcatggcaagagattgaattgtgttgtgaacataccccatggggaggtgaagtgtacaggaattaatcgtgggaaattctcccacgtttcttagctcatatgtgaaatatttgagaaatcaaggaaactgagtttgttttaaaatcaaatttgatactagtctaaatatttacatgacgttagcaataatgagtggtaaagctgaatttaacaattcttaactttcacaattaaaaataagttagtcacattggaggtgagactgatcatctgttttacagaaaatattgttaacatttatgttacaggatgaaaacatttacagacaaaaattataaagaaaaggtattaaagctgtgtctgaattttgtgatgttaatttttcaaatgcgcaatttggtctaaattctttttcttatatttagtaaatatttgcttggtaagtaatttgatatttgtaaatttgtattattttctttaaggagagtttcccaagttatataagcttcaggccacacaaaacttgtttgtccttctgcagttgactatttgtaggaggtgaaagaagacactttgggcctgttttcatctaaaatgaggatcaggagaagattactcccaaatatctttaaggatcattctatatctaaagtactgtgattctgttttctcagcacaatgactggggtgccagggtccctgggggtgccctcaaagacaatgaatctaaaaatgatgaatcaatgccctttctaggaattccctggatagaacatatgtgtgcgttggagcgagggggtgggaggagattgatgacagctggattctcacgtttgacgatctgaagggtaccattccctagaaattgtgtgggaaatcagatgatatggtaccctcagggagttcaccaatgctacagaccaccccgactcacttcatttagggaaggtgtaatagttctctcatgctgcataacaaattattactcaaaacaacacatgctcatatctcagtttcggtgggtcagtaaaccggacacagcttcactgggtcctctactcaggttctcacaaaactgccaagtgtttgccgtgctgttggttctcacatggagctcagatcctcttgcaagttctttcgggctgctggcagaattcaattccttgtgtttgcaagactgacatcctttcttttcttttctttctttctttctttcttttttttttttttttttttttgccagatgtcagcaatgctctctcagttcctacaggaccttgccccatggcccttcccacaggcggttcacaacatgacaatttctcctttaaggccattaggactctctctctgatctgctaaggaggggtcttacacaacacaatccagagagtgatatctcatcatattcatggtctcctacttatgtcgaaggggagtggattatatagggtatgcattttaggggacgagaatcttgttgtgtttttggaatgtctcttattctttaaggtctggccttaccgtcattccttccatcatatgaatcaatactcccacaacactttgaacaagattgtatttggtttattctgacctgtagtacacttatttattaggttgtgttacctccattagactctcagctacttaaaggcaaaagtcatcattcatttttgcatctttgttagtacttaggacagctcctgggacataactggtgtcagtaaacattgaaagatggtggttgaaataagtcccttgaagaatgggaattaagagggagatgccacaggtaagcagacctgatctatgtggtgctgccgaggtgaacggtgatggaatgcctggataaagggctgccagtgggaacagaaaaaagacaacaaagagacattgtggaaacagcatagtgtacatgtgtattgatatgtgtgtgctgtgcttggggtacatgaaggagaggctgtagtcagagaggatgccctgtgcttcctattaaatgacctggtgaaggttaatgctgttatcccagctgttatctgataagcaatgggacaagttaggctgatttgacatgttgagtttagtatttcaacaacatttctagataatagaaagcttacataagtctaagtctagatacaagtctattatacactttatgataatacaagtcatcattggagaaacgcttggtacttgagttgggcaacttgaccttccaaccctaggattctgtgattctatcagaattgttttctgttgagcaggttttgtattttgaactgattttccacttctccctgtcatttttcattacaggaagtagaataacagtataaaaagagtctcttggttttctttagttttctagtcacattggcaatagaaatacaagaataaagtgctatatgctttttaaattctccttcacacgttttctttttaatacagctttaccatcagggactccagctattttgtttctcccctttagctaagatctaatcagctcctttctattttgatttccaagaaaatcaacctgatacaaactttaaatggaaaggtttcacctacaactgcttacaggtaccgctgaagtttctcttttcagaacccagctcctgtgtaagtagggcgagcttatctctgggattcattgtgggtggtaaaggccgtttttgcctttgttagagtgatccaagtaatttctccattcagatctcatttatgttggagttctcaagataactcatatcatctgttccttcattcctttggcttacaggatatcttcaaaataatatctggtgcttggagaaagtgggtggactccattgtgacttgaggttaacatgaaaacctcaggtatctcttgaaatagagaagtgttcagtggaatttaaaaactgttgatattgagcatagacccaattgtttgaaaaactcaaaggttgagaaattccaataacaattatgctcccaatacactggttatagtacagaagcaggttgttgtattccgtatcaacaggagtcatgtctttccttacctgtggtcactaagacccacccaagactaccctcttcatggtggcgaaatgccttccctcattccccctttcaccctagggccaaactcattacttcaggcataataggaccccaataaatgaattgaatgtcttctagccaacttgattattactttgagaaatatttgtacattgtgtggtaactatttagagagtggtaatcaaaacctaaatggcaggggtgaggttgaaataattgcaggcattttgtttcaaagaagatccagttctttatttttcattgagataaaacagataaactttaccatctttactatttttaagtgtacagtttagtaatattaagtacaccgctgtgcaatggatctccaaaactttttcatcttgcagaaccgaaactatacccaccgaacagctattccccattttccccttatccagctcctggaaaccaccaccctactttattcttctgtggatatgatactttaaatacctcatacaagaagaataatacagtgtttgcctttttgtggctggttgatttcatgtggcataatgccctcaagttcatccatagtgacagaattcccttttttttttaaggctgaataatattccattgttggtacataccacatttggtttattgatttttccatcaatggacattgagttgcttccactttttagctattgtgaatatgctgctatgaacatatgcaagcaaagagaaggccaaattcttaaggtaattataatacttccaaaatgagattatcttaaaattgctaatgctatttaactaaaatagaatagtggcaacagagacaagcattttattaccattgaaaatctactctgtgtggctttgaagaaagcatctggtatatctatacagaagtgtatttgtttgttgcaaaaaaatatcttaagggccttttaccttattgtttttccttgagagtattttctagcaaaatacaccagctgcattttttttccagaatggcgttaagagatatcttctcaaatctataaatattgttacctaccttacctcatttgccaagataaacaagcaccaatgtatagtacaacccccacaaaaagtaacatacattgtggtttaaacacaagtgcattaatatctaaccagctttcttttttcttatttttcatggcagccatcacgaagtacacttggccttttgggtaaagtgtaggcacatagttctagagaaggagtaatgcatgtagaaagcagagagattttgtagtattttaaggatatgactatcaatactttatgcaaaggagaaagaggaggagcacataaaggaagacaaggagaaataagagaaaaatgttggagggggaagttaggaaaagaaagaaaggactgcatttttctcagtccacttctttttccaaaatactgcagtatagaggacaagctcctccttccattccatcaaaatatggcctgttctttgagtgatccttcacaagccagtctttaagtggtgccagtgtgctttacagtttaaaattattaatctgcgagggctgttataaacaagagtcagatgtcttaagcttcgtgaagaggtaagttgatgctgtcctcttccctcatctcttccagtgaacttaaatatttcaactcaatattaatttgtgaagtactctttttttcaggcattgtgctaggtgtttggggtgagtagggtaaacatagtttttgcccaaaataaattcatgatctaattgagaaagccaacatatatcagtgtataaataaaagtatttaaaagtgatccatgggtctttaagaaggatgaataaactgactggaggaatgagagaaggtttcaaggaaaagacggcaatggaggtgggtcaaacacagcagaagtaattccagacagaaggattgccatatgcagactcacagagctttcaaagcctatgaaatacttaaaggaacaacctcatatccttcatctaaagctaaggtgctggaataattgattcataaaatccctccttctttctgttagtttgtaaaatatacaggttttttttctctcatattttactgtttcaaagtctgacattgtccccagtctggggaagtacgggattatgcccagatttggacttccttctaccatcttccgaagcattgcccaattatgagaacccaagagaagagtcactgtcaagttttagatcatttatatattaataacattccaagcagtgttttttcttttttcttttttaagacccagatactctaatttatttttcagatggaaccttctcataattatctgtttgacaagtcaggagtataaaaatcaacatcattattagagtggctgctttcagacatagtaatttatttcccttattttcatacatgtgaactgtttcccccttcccttcttcctctcctgattcttccctctaacacacctttaattaaactgactgtttctaaaaggaggaatttagactccctgccttctaggaaatcatggtcgagtagaggagatagacacaattgagacacaaatcaatgtaatgcaaggtaggaagctgcctttcctttggcaaaaccagaaagtgcttttgacattcagacttgggtggcggagggggatcctgttaggagaccacaagaaagttgcaattgagaaagatcttgaagggcttgaataagaaaagcattttctacctgacccaacttgctacacaatattaacatcctttggctttggttggcaaagcacagttgaagttctaagacattctcagtggcaggttatgtgagtgccttgagtctgcactctgatctaagcaaacacaaaatcaagagggatattgtttcagatgccagcaggcatgagaagaggctgtgtcccccatacctacttctctgctggtggctgcagtaagtggctgtctctgtgtttcttggaagtcacacagatgagtgctgctccctgctgccaagtcttagtgacattgatgctctctcagaatggtaccagggaatgcacttcaagagcctctcagtatctgctcttgaaaaaattgtctctttacacatctttccagaaacacatactactgggcactaaatgaaatgatgtgagaaccactctactgctatttgtatttatttactaaatgaaataaatgcctaccatattgattagaattaacgtcagattgtcctatccagataatgcaaatcacatgtcaaagtgttcatgctaatttaaaaattcatctgtgttttatgttcattgagaacctagagtatgtttggcactactacgtacatcatgagaaagtgttaaacaacttacactcttctacttctactctttttttttttttttcagagacggagtcctgctctgtcgcccaggctgaagtgcaatggcagtctcagctcactgcaacctctgcctcctgggttcaagcgattctcttgcctcagcctcctgagtagctgggattatgggcgcttgccaccacatccggctaatttttgtatttttagtagagacggggtttcaccatgttggtcaggctggtctcgaactcctgacctcgtgatctacccgcctctgcctcccaaagtgctgggattacaggtgtgagccaccatgcccagcctacactcttctactcttatagtgctctacaaacgttattgaaaagtcccaggaaaaaaagctagcatttattcagcacatactgcgtgccataaaccatgccaagtaattactataatgtatttttgtatacctcaaaataatcgtatcagtaagtatttttatttccgtttcaaagatgactaccaaactaagagacagtaaattagtaattaacctacgtttctaccgttatttacttaaataattaaaatttaaaatcaagattttggttacaagtcaaatactcttctactcttgagacatttggttcttttaaatcctgatactacttatgtaagtgtctctctttcaaacatagctaaggataaaagtaaatgtgctcacagtctctctagctcttaatatagttactgggatgtcaccatctttcttttgtattacactttttatctcctacaactctcaagtaatttaggaagttgatgaagaatattattatacatactggattgccatcatctaaaatggggtcatctctggggtaaaatataacatctgtttgaagagctacacagatttccaaatttgaagcctaatatattttcaaaagtagcattaaacataatgcaatgttcccttgtagcttcctgcctcatttttcactttatacctgtatttgttcaattttaggtgagtaaagaaaaggatgtgatatttttccctctgacaatactatgaggctcatcactccctagccctctgctgtgctaagtgtggaaactaacagaggccattccagagaccacattggaatcacagactatcagagctaaagcagaccatggagggcaccatttcccccctccttttatagattagggaactggagcctagcaaggggaggaaaagcccaggatcttagaccaagttaatggtaataacaacaccaaatccaggtcttacactactagtccatgctgtgtgttatgtatagccgtgggagagtttgtggatatttatatgtgtttttctacttatgaaaacagataacttttcaataacatttgtaaagagctataaacttggtgagagtaagtgtaacacctatgaacttgatctcttggagctttgtctcaagtgctatttatatccatttaagaaagttgtagtaagacagttccatccccatgtaattttaatgtattgaaatttagtttaatactatttaattttaatgtaatgaatgaatctgattactactctgttgtaccacatttaaaccaattattttcattaaaagctacaatagtacatgactttatagattaaattctatcacagttctcttaaaaaactttcaatagctctctgttgcctttaggatgaggcacaaattccacagcaatgcattctattcgctagtgatttattatgatttctatcatatatctccatatatcttattttcttgacccaataagctggtaacactctccaaacactgttcattcatttattgttttgtttgattgatttaattttattaatcatgagtttgacatatgagaaatgatagtagacacataggatcgctgccctggaggacttccacagcctgacataaccttgatgtttgacacctttgtgcttttcctttcctgtctgtttagaaggcctttctcagacttattcctgggagactgcatcccacttttccttaagtgggcagttctcatgtcactccatggtgaaaccttgtaaggacccttgtaattgagaagagtgtccttctctcctgaacatcccagcacagagcccacctttcatttgtgtttgcttcattctgctattacataaaatatcaggtccatccactagacagtacgttctaaggagagaaattatgttttatttctttatgtctcccatgtgataagcagtttggcatgtggtaagtgcccaatgactgagggatggatgtaaaaggaaaagcacataaatgctttggtagaaaaagttggcaggagaccgcttttcttcctctccttcaccagttcttaccttagcattttaaaattttatacacacatatatgcagtatacatataaaacaacaaatatgtgtatgcatgacaactcaccttgtatgcatcttgtatgtaggatgtatcatattttataaacatatgtatattgtatatgcataaaattataaaatgctgaggcaagaagactggtgaagggataaaaaacatggcctattgcaaagttttattataggtaaacaaagaaattggtaagatgtaaagatacgtgtgtgtgtttgtgtgtgtgtctctctgtgtgtacggtgaatcattgctaagaataaacgttgtttatagactctcctcctgtggcatgtgattcaaattatatatattcaggacaagggcaaattcatatcttcatgaaattttccctagactatagttgttttaaaagataacttgcaggttaatgaatactctagcactgagttgcaagttttgtgtttaattgaatccttgaagccaagatgcacaaggggtgaactaattaaagaaattagttatgtgactatcagatgctgcaacatctaacacatatattaaaggcaatgcctgtcttgaaattacctggtggagaagatcctgaggcaaagtttgcatcctgcctttcagctcctatgtatttttggcatggtgcaccagatgttttgcaaacagcactacctggtgaagaaaattctcattagcattacaaataattctgtattttgatgatacttctatggttacaaaaagaattatgactctcttttcctatgcaataaaccagtgtgagaaattcctactgttctaaggaatcctgttttatttgaaaatagatgtcagatgaacaggatctggggaagtggccagtgaagaaatgcttagcttatatgctaactggggacgttttggggaaagcattaatagtctttttttttttgaagactttataattcatttgatctgacgtgaaacaaatttaaagagggcggggtgaagaaaaggtccgaagaagaaaataaatttcaaatttcggagatcagagctagaatgctagtgtgaccttggaccacttcctcagcagcctgagcttctctttatgcatctataaattaggcatatagtgagtgttgataataactagtaactgtcttactgagtggttgtgaggcttgaatgggaagcttctataaactgtgtcattttgtacctactagcttttgttagaacttttttaaaaagcctaaaatatagtctttaatagaaaaattaaaccttataccagagaaaccactgatcgtagaatcaggaggcctaggctgtgtttctgcttaagctaccaagaactgtgtgacctaaagcatgttgcacctttcttggtcttcaatttcataatctttaaaatgagggcataagcctgaataattcttaaagttctttccattccaagtattgtatgtggtgattccatatctaaatctttgcacgtaaatctttgtcatgagagtctgttgtattcattttggaaatgatcttaagaaacaaaaagtttaagctgtttgcccaggctctctcaataagctaacagcagttatacattagaatgaaaaacccgagaatttagcgacttaatgctgtgttaagtcgctcttctagatacatacttataaaatggctccctaagatggaacactccaaaaagaaaatcagaggttggtattttatgccaatataatttctaaaacactcacacattttagtggctctaggagaattgcttagcaaagctatacatactttaattacacaaattatgcaacagggggctctctaacaaaaaagaaaattagtgagccacacatttaggcctgattctgcttcagaagcaggattaagtcttacccacaattttcaaggaagtagaagtgagatgctatgctattacagggctcagttaggattataaactcacggagctgtcatatcaaggcttacttagaagattttccggtatttggaaggggaaagcatgggcttgctcccaactcttatagctgagagcattcttcacatcaggttttcccaccctgcccagccacatgttttctttgcatatagaacaaaaaagaagagctatcatagccatcactagcaccagaactagcacccttcctctcctactacactgggaccacataactgaaatgtgattcatcaattactaagaggctgaacccaaacttgctgagttcaaatcatggtcattccctttgacagctgtataaccttagccaagttacttttttttgttcctctgtttacgtgttgacaataatacccatttaatagggtggttgtgataataagttgatacatataaagtgcttagaccagttcctggtaaatgataagcacttgaaaaatgttagctttaaataatattgcctttatccagagttatagagaagggctttgtggcacaagattaatgagtcaggtttagttcttctggggactgagggaatctagccaatggcctggggaaagaaggataaccaatgctcttttcactttagttaactactctgaagttactttggaagatgacagaaaatgcttcctactttgttttgtttaagtaatatgatgtcggtgagcactatatttagagtcatagaattttagagtagaaagagaccttagcaatcatctggttaatctcattttaagaataaggaaatagagaccaaaaaagaggaataatttgttcaaagttccgtactgagtaagtaacatcagaataaaaattcagctcaggctagaaacaaatccattagaatgtatttcctctgttgactctcctcactatagaattatctctgtcttttatccaaattattacaaaactgttcaccaacagttatctaagatttcttatctatatagaaattgtacacaggaaaaaaaaataccaaaagccaaaaaaaaataaactaaagcaaaaacctttgaagtccaactatgacagggacagctttatgttgttttgggccatctccccagttaatagacatcttcatatttctttccttcaccaccaccaccacttattcagagatagaggaattcagtttgaactaaaattgggagaacttagcagcttcaagagagtttcgttgagatgagtcatttactctttttttttttattatactttaagttctggggtacatgtgcagaatgtgcaggtttgttacataggtatacacatgccatggtggtttgctgcacccatcaacccgtcacctacattaggtatttctcctgatgctatccttcccctggccctccatcccctgacaggtcctgatgtgtgatgttcccctctctatgtccatgttttcttattgttcaactcccactcataagtgagaacatgtggtgtttggttttctgttcttgtgatagtttgctgagaatgatgctttccagcttcatccatgtccctccaaaggacatgaactcatccttttttatggctgcatagtgttccatgctgacaatctttgctacagctactaaagccattttttttttttcaagtaagcagtcacattgaaaatatttgggtactctagactatatacttttttttcttattgtttagactctctaaaactgagtgtcacacatggttccagaacccttccaaaagtaatcttcattaaaggacttaaatcataaagatcatcagttattcttttaacaatttctcattttatggatgagtaaattgatgtacagaggttaagtgacctttctatggtcacacaactttctcacctactggtggaacacatgcttactttctaattttaaagataatactgtgcatggagtcagttaaacattgtcaagcaggaaatgggatggttgccttttaaagctcctaacttcatgcatgtagtggccactgtcgattctcgtcgaatatctctccacccccttcattgtgttttgtagcattttattgataaaacattttgtaagactttttttttccaatttgtagtcagttttctccaattggttttgagtttttccaaattgtgattcttgtttttcttcctgacaaatgaaatcaaagatactatatgatgagctgtgagtgtgtactgagatttacgtatttctttctttttgccaataattaagtgtagcagcccatttgatgttgctaaaaacaaatacctgaggttgggcatttataaagaaaagaggtttatttggcttgtgattctgtagattgtataagaagcatggcaccagcatctgtctctggtgagagcttcaagaagctttcactcacagcagaaggcgaagggggaacagctagtgccacatggctagagagggagcaagagagagagggggtacaccccagactgtttttaacaattaactctcacatgaactaacagagtgagaactcactcattaccgtggagagggcaccaagccatttatgaggaatctgctcccatgacccaaacacctcccaccaggtcccacctccaacattggtgatcatatttcaacataagagttggaggggattaacatctgaactacatcattgagtctccagatttctctgtgattacttttagtggaattggtagatctcgtgggaaataaccatgactgcaacttaaagtaagtatttccttttcacactctctaatatgagcctaacacttaacctgcagaaggcctgatgtgagggaaccatagcagagctcctaatagcacgatttccacccccgaccattttcctttggttctgtgctcacctttaagctcatcggcttttggttattttgaggtgccttaccccaaactgggatctttcctacacaagaatccaaaagagtcaatgaccatcttccatagaatccactgtagttttgacgaacaacctagtagctttttaccctggcctttccaggggagctttcctcacatacaacttaataggttaatatgttttctttttcttattctcaaataccacaactcagaggaacattatcatttaggttttcaaccatgtgttaaaaatctacttatttaatcaattatgccagcctttacaatacacatttgatgccatatagaagtgtttagctctgtgctttctttccgggttagtaaagatgtgctttccgtgactatctccttgaatcttccatccttctgtcatttctcccacatccccagcaatcagtttcattgttgattcatgattccttattttcccttttttatgtcctttaaaatgaacaaaagttttcccaagtattgccttggatgcagcctataatgattttgattcactctccacccccagcaatgctgaccttaatcattttatagaatacctgtctgatttcttgaaacccacttcccatggtattgctcctgatcttgagtggaaagtctctgatggtgggaaaaccacttcctcattttgcgatgtaatctattccatgggtggaagagaggcatccaagtttgcctctacacacacaggatatcttgttcttagtgtgaatctcttgcacacacacaatactcaagttcttcaaacacttgaacataggcctcactttcctcagtttctctttccccagctctatttgttaactagtatttcaaatggggtcatgatcaacaaggaacaaacagcagggatgcccctgacttagactgtgggtggccctaaatgatgttatcttacctgtttttaacacttcaagaatatgaattgtcctcataagttcattttgtggattcatcatcctaaaaaaagtcatgaagagagctttggatttggagtgagctaaactagatttgaattctggacctgaccccatatttcagacaattaatcaactttctatgacttttagctttcccactgtaacatgtgaataacagtgttggccttgccagggttattgtgaggattaggtaaaataacctgtgtagggcccaggactgtgcatggtatgtagaaggtgtctaataaatcttaatgtccatattagtctgttcttgccttgctataaagaactgcctgagactggataatttgtagagaaaagaggtttaattggctcacggttctgcagactgtacaggaagcgtagcttgggagacctctggaaacttaagatcatggtgtaaggcaaagaggaaggagtcacatcttacatggctggagcaagagcaagagagtgaggggggatgtgccatatacttttaaacagtcagatctcatgagaactcactgtcacaagaacagcaagagggaagtctgcccccatgatccaatcacctccaacctggcgcctcctcaaacactgggattacaattcaacatgagatttgggcacggacacagattcaaaccagatcaatgtcccttctattccctaccctatccttcgtgtccctcaaacacttttaacctataattggaacgcagagttttttgatatttttctgtggttcaaaggatttgcctgaaattatataaggacttggtaaggaaaacccaacaacttcttgactgacatcatactgttaattctccatagtctgtgttgaacgagtgtcttgtagtgaggactaactcaccccagagatacagcttggagactctaattaattatgtttgttatttctatggtgctgcgtagtatgtagctcctggcctaagcattgacatattaacttttttattaattaccggcagcaaaagagagactgaataggaacattaacataagactttattgaaagccagtgtgtaacaaagaaaattacaatgtggagagtaatttgcatctaacatctacataacttgatatagttcactctttggagtccacaactccagactaatatcttaaaataatccctatgagattgttttcctgtgcagttcctggcttaattctgcttggtagaggatttcttcctttgtctgtcagcacaaccataaacatgggcaaattattcaaaatccaggcacaaaagaacaaggcacatcctcttttttgagtttaaatgcaccttccaaggctcagatctcttagctgttgcctgaaactatgatgtttccctcacttagggcataacctttcccttccctagagtggtgtgggtttaccttagggttttatcagggttgcagcagggttttatcaagggttcagtatctgctagatgtacaaaggagataagggaaactctcctagattaaaaccatttgttttttaccatatttatcaaacatttatttcttgttttaatagccactacttaactgatgctatcagagatcaaaggtgattccactattaataaaagcatgcctagggttttgcttaaggtgacattgagattattcttattcatcctgaacatttattatttttaagtcaaagttaaaaatcaacacatgcttacagtgtctatcttatattccaaacactatactacgttcttacaggaggaacaaaaattctaagtcagattcttacccttaaattctgtgtctactcttatacacagatcatttttagcatttttttttttttttggtaatgaattctacttctcttggcatgaagtcaacattctttccctgccttttgtccttacaaaataataaacgcttttggttacttatcttttaaaggccagttacggctatttcctggtcatggccttttaaagaaatgagagaaagaactgtcaaaatgcaatgaggatcatgctgtttttccattgccatgccattagcatactcaaccaaccaggagacaatttccagcctacttttaaataaatctcctctcttaaactgttgctagcttactacaatgtgtatacattacctagagtaggctgatgacctcatgagatcccttgcagttaacactgcaagtttaaatatgattatcctgtccaaaacattggaaaaatattgtttcttcctgctgcaaatactgtttaaagaaatattcttatacattatcttatacctgcttttctggatagctgagcaccaaaatgcatacctatctatatctatctgtctgtctgttttggctgtagacttcgcagacacacagacatctacatcaatgcctccttgatgtcatgttgcaggttggattagtggctaatactaggcacaggggaatattgttttatgtaaaaattacttttaagtgagtgacggatttttattacatgctttcatgtactatcctagaattcttcaatgtttttaatctgctaacaagctctccacatcttgttaaatttttattgggagcaatttcgcttagcctaacaatgctaatttagggatatttaaatgaaatatgctgtatttcctccatacaaacatctgtccactcatctgctgatctgttcattcatttattcattcacactttttctcatttcacaaatcagtgccataatttcaacctattattttcaccaatttaggtcctataatgtagttgtttcacaggcaaataaacttcaactcaggcagacgaagtagctttatgtaaggacaacttatctactctaaattgcatactctttgtacttaacattttactcttagagaattctacaaaattaggacaagaaatgtcctattggtcaccttgtccaaacttccatttgatcctctgacagattttttctaatcagttagtatatttcagttatctccagtaaaatcttactcaacatcagatacctgtgaatgcaggatcagtgagatctctcattaattgtctcttactttcacagtgtctggtgctgtgtgcatgcagaggacaaaaatatgaatttattgtggttttaatagtatattttgagtgtcagtcatgtgctgggtgctgtaagagactgctatttcaacaagatccattccctgaaaatttggaatctaaatttagaaatgagagcaactaggaatggcccatggagaaagaatctcagtgaacatgggtgacagtatgaatgtgaagattattaaaccattttaaggtcattttagtcatattctgagattttaaagttgcctactcattttacctgatgtctgtggctctctgtttgccttattatattccttttcttctgtgaacatgagtgtgtgtgtgtgtgtgtgtgtgtgtgtgtgtgtgtgtgtgtgtgagagagagagagaagagaagtatcagaactgaaaatataggcctagatatggggatgggggtgatcagagcagaaacctaggtaccatgtaccctctgaggatatcagatttaatatttaggcagagaattttagggagtgttgataaaacaaaacaatcaactttggaaatgtggaggctacccttgagttacctgagcttatttcctgatacaaagagttgataccccattcttcactttgggatgacccatgcatctatttggctcaaaaatctgggtggatggattgatgaattaattcatttatttgagtattttttgagtatctggctatgtgcaaagattattttaagcactagagataagaaagtaaacaaaatagacaatggccctgtccttatgggtattacattcaaatagggatcttctagccgagtttctctttgaaaaggaaaaggtgccactgggttagtgacagtgggacttagagtagggctaaaatgatgggcggtctgttgtgacaggtctttcagcatccttaacccagctatgaaggaaaataaccaagtatcaaccatctcctaggtggtataagccaaaccaatgtacatttttaaggaatgaaaatggaggaaatttatatttttccccttataagcttctttactttctgttttaacttagtttccctttgattttcttattgagctcgacttgaattactaaactaagaaggagagtgtttcaagaccaccctcctagaaccaaagaaaacatagtaccctatcttggccaacaatagtaaaaccaggagtagcttcctcatctagaaaaaggaaagagcttcacggggagagaattggggatacttgtttcctctcccttccaacacaaaatgatctcttcaaggtcattcacaagatgtgaaaccatgttagaagctagtgaatggaagtacatttggcattctcatttttcccctccaggttactttagttagggcagtagtcacattgaggttaaaaggcctggattaaactcatagatcttcactcattgattgtatgaccttgggcgatcacattacttattggagtctcagcttgtgaaactgaattattattttccctttagcttccatcataagattgttgaagagtctcagtgagataatacatgagaagatgatttgtaattagtaaagagttacataaatgtatgtgatctgcacattcttattttattgactttattacatgattgtaattattcatggtgttttgtttttgttgacatgcgtatagcacagaggtaaaagggaaactctggaaataaattatatgggtgtgaatctgaactctggcaattcttagctgggtgaccttggttaaacaacttaacctctctgtcctggtttcttcatttataaaatggcgatatgacagaacttacctcatagagttgttgtaaggattcaatgtgtcaataattgtaatgcacttataagtgtgtagggcacttctcattggctcacattaattacatctatgtttcttatcaaaatacctattctccagaacattgaaaatttccctttttgggcaatgataccacccttcatctatgtcataaagaggaattaaatctgttctcttttctgttttggaagatgatcaaaaccagatggacatataacatgtagtaattcagttgtcgaattgttgaataaagcaccatgaataaatttgctatataaaggaatttacaaattattagaaagtagttctttatattgcttttgtcagcctactgtaactgacaatatgtcagaaaaaagcaagtggaaatacagctactttatataataaaattcatggagaaaaggtcttcttccatttgctgtggcagagcccagtgagctcatattcacccgactttgagtcaggggcctgatctcagagcaagatgatgtatgagcagagctagacttctttgtgttctcaagacaaggacactgacaatattccactaatgaaattctgtttgccatgacaatgtcaaggttaatcattcatttcaagtaaattttcagcctttgttaaatacattccaagagtgaatgatgatgtgtatgaatcataaggtgtgttttcctgttttaggaaatctgtattttatggcagggacttaatttaaatggagattttaataacagcatggtcattctcatactttacgttattatcacatcttctttgagtctttcaagagcctagttaggtactgctagtattattatgtatctattttgcagatgtagtttagagaggttgaataacgtgtccaacagcatacagctagtgggcgattaaaacaagagccaagaaagttcataatgtcatgaactggaagcttgttgagggcagagagaatgtggaagtgtctggaatttcacggtaactgacagagccctggatgtaatctgtggacaatgcaatgtttaaaatgaatgtgtaaactagccctaatagtagatttggaagttgaaagacttggcctatgaataagcaaaagaccaaaaagcctctgtttttccttttaaaatgtggagataattaagactgcccatgtttttatttgtttgactagagcccaaaaacatagactatatatatataactaaatataactacataattatcattttgatgtgcatttgacaattttcttcaaagtaattaaaacttcttccactcataatgtcttcagaataggaataagaaattcttaagttgttcaaagaaagcataaaaatcaaagtattggtatccctgggacataaccctttaaatacctggttgttagtttaacctaaatcatcagtaggttggcttaatttcattcctgatcccaaaatgcaaagatattggaaatgtacgagtaactgtggagaaagacttatgagatttagtggcccaggtaggaaacctacgaatttctatatataaaataaattgatttaagcattgcttctgagctcaatatccatatatttaggtcttagctaacttcttaaatttctttatactcacctcttctcactggggaaatggagtaaattatgctgatgatgacttaaaaagccaaaaagctctctgacaatagctgcaggagtgcgagggaaaaagtagtctttgttgtccgattgaatccaaaacactacattcttttaatagagatctaaacacagaaagaatgttgctcccagaaagctgacattgtttttgttctgttctttaaatgcctaacttgatgttgtcaggttaagacagagaggagaacttcaaacagcaacagctacctgccttttcatctttcctcataacttccttctctcctgtgcctctgtattcgttaccttctgcaccagcacaccctcatatctcataaacctacagaaaaaaatcagcaacacaaagactaaagaatacacatcctctttccaggccttttatagggggcgcagggtggcggtgcacaggactgcagttctggagaaatgtactatattttacttttgtcttctagtattatttatgttgcaaacatacattaaactctgacactttgacacctggagaaattgtgaagaattcagattcccaggctctacccatacagacttccacttcgtgttttgagagaccatcaggaatcagcatgttaacaagcatttcagaaccccagctcaaagggattgtgacaaggttattcagccagcagggatacttcctgcagatgcacccagatggtaccattgatgggaccaaggacgaaaacagcgactacactctcttcaatctaattcccgtgggcctgcgtgtagtggccatccaaggagtgaaggctagcctctatgtggccatgaatggtgaaggctatctctacagttcagatgttttcactccagaatgcaaattcaaggaatctgtgtttgaaaactactatgtgatctattcttccacactgtaccgccagcaagaatcaggccgagcttggtttctgggactcaataaagaaggtcaaattatgaaggggaacagagtgaagaaaaccaagccctcatcacattttgtaccgaaacctattgaagtgtgtatgtacagagaaccatcgctacatgaaattggagaaaaacaagggcgttcaaggaaaagttctggaacaccaaccatgaatggaggcaaagttgtgaatcaagattcaacatagctgagaactctccccttcttccctctctcatcccttccccttcccttccttcccatttacccatttccttccagtaaatccacccaaggagaggaaaataaaatgacaacgcaagacctagtggctaagattctgcactcaaaatcttcctttgtgtaggacaagaaaattgaaccaaagcttgcttgttgcaatgtggtagaaaattcacgtgcacaaagattagcacacttaaaagcaaaggaaaaaataaatcagaactccataaatattaaattaaactgtattgttattagtagaaggctaattgtaatgaagacattaataaagatgaaataaacttattactttaaaggaaaggatttggagaattgaactcacaaactgatgttatatactcaatagcttaaactcatgataatgctgcgatgtgtggttttgcttgattttgtattttatttgggcatctggaattgacacaccattacattctgtttgcaggattttttttgtaaccatgaaattgaacatttccaaattataaactatgttaatacctataaaatatatagccaggaaccatttatcatcaagaaaagtgtaagaaattatttttgagatgtaatttaagattgttttatgtaaaaggaaaatcttgtatggcatcgaatagccttaatgagtttaattctttcacaaaaatgatttcaaattatcctagagtataacatttttatcaaagatattatttccggagttcttctttctttcttttttttttttttttagtaatttagcaaaaacattactgttctaatgctgaagtgacttttgccagtgccatgtccaggtggtgaggtataagttacttgctcttagcatttggtctgatttttttgctttgtggacacctttgagagtatccacaaagcaatgtctcaggtgtggacacctgagagcatgttttagaaagctttgtaccctgtcttgtggcaggaaagaaagaacaggggttttacataaggaaataagtcctaggaaattagtcaacgcaaattgcatttgcgtttgtaccttaccacagtcttatattgttttttaaactctgccatgaaatttggagacatgactgtgaaattcctaacttactatcttacaaagccagtagctaatttgttgctctatgtatgatcctgttacaagtccagtttgcaattcatttgtttcctagaacacagaagggtaccagtaatacactaaattttcaaggtgtgtagagaaataatatggaattagcagctatgactccaacagacaggattgtgtgagcagctgaaaggagcaaaaaagaactcagtgtaagagaaggcacatacatagttaagaatactaaagtatttttaaaaatcaaggaagaaataaatgttacacaatttgcattggaataaatagatctatttagtcctacaaatcaggagtggtgtagagacatccaaatttaaagaaaaaaaaacacaaaacagaatgttaaaaaatgtatgcagatttatggatattatcaatgagaagacatagcatgtaacttctcctatatctctactgtccagcatgtattgttccaaatatgactccctaaaatatatacactttgcagaagctctaggccctcacctcaaaccttgccattggttgccgtatttcaaggtcaatatagtttccctcactttacacaatcattattcttcaatagtggaccatatccttcaccaggtatcctatttctgttatctagaggttagcagaaaatgaaatgaaggaatttccctaagcagttgggaagaacaaattgtatgcatgtaggcaaagattttgaagatacatttgcaagagatatttgtttaaccaaaatatttggaaagtaacaaataaagacatttaaattttctaaaaatggacttgctcttctaggaaaagaatacccctggggcaaaaatataactctagctgtatttcttcttgtcactcttgattcaacttgattataaatacacctgtcactaccagaaccaaaaaaaaaaagaaaaaaatcccaagcacaaagcttattttatttgaaaaaaataaaaaagaaacttcaacactatgggacactggctcttttagcatgaaatgacttgagcttttgtagtgatgatacacatacacactcatcagtaaaacgatggtttcataaataacacaattgatgcaaatcataaaaatcaattacaattatgatttcatgacaaaatatatttaattaagtttgttatgaaaaaaatagagatatgaatcactaacaaaattcctccattttcagtggctattcatcatttatcatctagactcacatttgtctccttcctgatagcagttaagaaaaaattctaaccacacaatttgtatattgtttttctccgtattatgttaagcaaatgttcactgcagtaaaatgttttggaaattagctttgtcttatttccagtttagttcagagaattaattggaaacctgatttcttttacacataaacctgacaaaaaatgtagcttagagcaaagggtgaatgtttgcttaactcctgcttacttctcaagtacatgaaaactttaatagaatatgccagtattcactgagtttttaaaaatattaccatgtgtaaacatataatatccaacttcatccaaaaatatggttgagtttaagtactttgtttttcaggcttatttcaagtataataattctttgattttcattgttctgatttctgggtcttcaattcattcgtcacttttcctttttaagtaaaataagcttttttttttttttttttttttttttggagttgcattgggatttttcccaggaaaaaatatggcttttagtaatgctttgcaattggctacgcagatataaattaagatatgtttattctgagttcttattggaataagtttcaaaatcaacgagcttaagaatgaaaacaaaacttttgagagtctcacaaaatagctttctggtcaatacaccttacttgatttttaagctcgcagaataaagtatagaaacaaatggagctgaagttccatttgctaattcagagacttttgtgcttccgcaaattggagggcagcaagccatcctattctcatagtaatcgttttggctttgaaatttacatacaatttaatagcacatttttagccattatggattggcgcaataaagagatatcaatgtaatgcaatgtgatgctttatgggcctcattctaattcagaaagcttgtttaaaagaactaagactcttctgtttaataaaatagcaacaatctaatatctagattggtagtcctgcggtgccactagtgggagatgagagtattaagacaagagtaaggacaaggaaagacttaaaggttgcatattgaaaagtttggaattcctaatttgggagcactgatttcttggtgaagaagtaagtatgactacgttgccagtaattttttaaaaacatagacccagaaatagcaaatcgatttcaccctcataccttagtctacaaggccttgctcttgagaaggttttccatgatattgcttaatttcatctgcacaagatgagacacaaacataaaaattccctgctcattttaataccataaaaggctgaggttatttctctgtcataaaattgtaaatagcattttttaagtcaaaattacatttaaaacagtggattgttctacaaatatatatgtgtatatatacatatgcttctgaaataaggatatattatatgagtttttatttgatttgtggtctttagtcataggtaatcaaaaataaagagatttgaatgcaaaactttatacattaatgtacatttctaatgatggtacaaattgccactttataataaaaaagaaacaggtgggaataataatcaaagcacgtgttccttcagtactttggtgatttttaatcccccttgtgatgcacaggaaattattttttagttacaaaaagttatcttagaaatctatacttcccaatacagatttcatgttaagtcatatcaaattgagaatttgtggtgaaagaataggaaaaggatgctagatgctgatctttctttttcaggatttttcctggagcccaagttaaaaattcaatacttaaatctaagttaagtgaaaattaataatgttcagaatgatgtattgagctttagtaacagacggaagcaaaaaaaaataagaatatttaacattatgataatagccttaaaataatgtaataaaaattgcatcattaaatgttctattagttggaaagaatgagctgatgtttctttgtctttgctccaagtacaatttaaagacagtgacattcattttacttaaaattgttcaaaaagtccaaaacatactcccatggctagaattggtattagctccaatacaaggttaaatgttacaatcttaagaaattattgacactgaaatgtttagtaaacatgttgtatgagaaactaaacaaattaatgtttcatttttccattaaagcacagattattcaaatcattgttttctgagctcagatttgtaaaacgtttatacatcattaccctcctggaattaaaaacaattaaaatcctgagatgctcatgcacgtagacgaaatactggcacttttttttaaacattaaacttctttgagaagtctacctttttttttttagtgtgtttatcctatattgctgaaaaagcgctgtgtctttttaagaaaaagatcaaaaattgatttacagatgggaaagatgtctaattttgtagaagagttgaaagaaaagtaaatgtttctttgtaattacgtagctacttgtctcaacctgacatcttgctttcaaggattaagaactaaagtacgttcatttattcttttattcataacataccaactagaggctcagttgagtttaggcatcatacactgaattgcaatctcaaaacaacaacaacaaaggcagacacataaataaataatgcaatacctaaaagtatgtgctatgataaatgcaaaaaagattttatataccactgaggaggcaacaaaggcatcatcagggattagaggcaagacagcgattgaaaaagaacagatatttgctgagtgataaagggggacgacaaaggcctctcaagtagaggaaatcatttgaatgaaagatggatacttggaaaacagggcttggttgggaagaatgttcagaaaaggaggtggaagaaaaactgagttgagatcaataaaaacgaaaagttactcaaaggttttcaatacagcctttgtatttgtttgaacatctgtatctgctaggatgcttctggttgctcagacagaatccccaaaccaaactggcgcttcatctcgaatatctaggtacacagcatcaccatcgaggcttactttgtagttctctcagctctgtccacctccatgtataacttctcccttagaggcagaatttcctttagtagtttcagaacctgcatgcttatatcatctattctctattagaatcccccagacgacatcttacatttcgttggcctgatttagatcatctgtccacacttcagtgactgaccatggccagagacttgagatatgttgactagtgtaagtcaaccaagacctggaggttggattgtcccccaagatacaagtctgcatggttgaggagtaaatatttgaatgcaattcagatcccttttatcaagaggaaatgtaaatgaagagcaaaaagtagcaaatctccattactaatgaatagatgtattttctatcacaagtcattggctattctaaaaatccgcagagaaatgcaaatattgattaattaaagctactgccataaaccataagaacaaacaaaaacattgacaattcaattccctaagcattattaagtgactgctatgaagaaggcactgtgcaggtcactgatgaagagataaacagctgcaattttaaagaaaagtggtacatttgacaataactcgatatatctgatatgttcaatgcttttagatgactctcatggagggggttagaaaatgcagcttgcttattctagatcagaggttcatatcatacctacttttattcatacccatgcaagcactgctaggattaggccattagaaaatgctgcacttcaaaatcacctgcaacaaccgtgcatgtctttctttcttttttttttctttttcttttctttttttttttttttgagacggagcctcgctctgtcgcccaggctggagtgcagtggcgcgatctcggctcactgcaagctccgcctcccgggttcacgccattctcctgcctcagcctcccgagtagctgggactacaggcgcccgccacctcgcccggctaattttttgtatttttagtagagacagggtttcaccctgttagccaggatcgtctcaatctcctgacttcgtgatccgctcacctcggcctcccaaagtgttgggattgcaggcaccccacctcgcccgaacgcgtgcctttcttgaatctcctctacagaacatagcacgtgttttgaacactttgaatgacactaagtgtattaacaatccaaactaccctattccatttgtgagaagtattggttttatatttatattggcatcaaaaccttgggttaccatctttcaaaaaaagtcttgattttccactgactttcaggtttgtttttttgagaggattgaatacattttatttaaaagtaaagtgcatcttctgagcacatactttcacaattgtttttcttatgagtataaaataatattgctgttgtcacattatttttctaattcattttgacaaccttatctgaaagacaatgtatcttaatttctgtgctatgtctcttatatattatacctacttgtgtattaaccttgcctacccactgcaatttgctgtcttgaaaaatatgttcctgacccagagaggcacacaaagacatacacaagaagaacattgcaggaggagtatttaatatatgaattgcatgtcagtcatgctatgacttgtctctgatgtcattttccttgcctgtttcatctttttgtttcttatatgcattttcggttgtaccactgcttcattgactgacttaactctgaatttgttgatgatatttttccctagtgttttgagtaattattttctatgctgacggcttcacctcataagcataccctcataatagatctgattggtactttacctttacaaccaagaaaatagtggctaaattaaattggaaggttgtgggtttgtttgctttttgtgtgtgtgtgtaatgataagcctgaatacaggcattccacatgttatttggaccattcaaagacatcatgaccgaagtctctgcaattcaatgtactttttcttcaaagtaccatttattcacagtccaaaatggctgctccagttgtaggcatcatgctcacatctaggacacagaaaaaaggaagacagggaggtggaaatatgtggtacctctaacatggaaacatcttttccagaaacccccagcataggtctcactggccagaactggaggttcgtgggtaaggaagaaaaaggaattgaaattgggtaaggaattagacacttctatcacaaaatgtgaactgccctcgaggtttgtactgggcatattcacaacctcttccattgtctagtacgtcctcctgctgaaggtactaacaccaacaggctataaggtctaggttaacgatgtttttgtggtccaggatacttgtttctctggcaagttgagccactgtcatttctgatctcctgtacgacaaggaaaataactaactaacctacatgctgtctgggtgttccctataagaaatcaaagagaggcacactggatgtatgaggagatgagttctttctttgaacagtgtggattagagtagcaatattctctaaatcgtataccaagaaatcttggtcagatcaccctagaatgatagagcatagatgctattacttcaccatatctagttcactaggagaatgatcatcacaacaccgcaatttgggggtctcactgaattagaaacttgcccacactactagcagatgacctgtgctgggacatctcagcccaaaggtgaactaatcatggaattatggacaagagtgatatgaatctgctttactaactcactctccatcttaaatgccagagctatttctaacctggctcgaaacaagtgactgtgacctgttagaatatagccagcataattgtccatggacttggag

SEQ ID NO: 2563 - DNA, 1455 bp, Homo sapiens
ggaaattattacaaagttcagctggaagtctccttctccctgtggaccttccccaattccactggctgccctcctcaaggacccctgtgagataaattcagaaatggctatccttggcttccctggggaacaagagtgcctgcagttcttttcccacttcttttacttttctatttcactgggctctctaaattcatttcagctctaggtaaggttaaactcttctcccgtcttctggattttcaggttctccagggccgatgtatgtttggagatggatttccccctctcacacttcaggcactcagttttttggcagtctcatggagttttcagtggcaagccgcttatttcaaatgggatttggaaaggattccgtgatggttaatattgagtgtcaacttgattggattgaaggatgcaaagtattgttcctgggtgtgtctgtgagggtgtcaccaaaggagatgaacatttgaatcagtgagctgggagacacaaacccatactcaatcttgggggacaccatctaatcagctgccagtgcaactaggataaaatcaggcagagaaatttggaaagactagactggctgagtcttctggccttcatctttctcccatgctagatgcttcctgacctcgaatatcagactccaagttctttagcttttggactcttggacctttggccacagacggaaggctgcacttttgaagttttgggacttggactggcttccttgctcctcagcttacagatggcctattgtgggacttcaccttgtgattgtgatttcaaaccttctgggtttcttcccagcgctaaatcctgtcgactggattcactaggatgaatagagaaagaagtgttacattttaagataatttcttttctaaacacacagaaaggtaataattctggcattttacaaagcatgtcaattagctttctcaatgctttttttttcaattgtttgctcaccagttttgttttagtcttttgctttcttgcatatttagtttttaattattgggagtcatgaactcattggaaagagtacactcagaattagggagttgggtacatctttgcatggggcaaatatgaaaaacatgaacagcaatgacacttatgattagtgtgctctacagtgaacttcctatcatgctcccaggaaggaggcttagcctctcctggagttcagtgttatactaccaagtctagcacattgctttgcttttccaaaatagcaaatgtcttagcacttacctaatgatgatctaaggaaaagtactagggaaatggcattattctgaagactttgttgacagctgcaaaccataggctatgatagcattagggaaatggcattattctgaagactctgttgacagctgcaaaccataggctatgacagcattgcgggaaagcaagagaagacacacctcttcc

SEQ ID NO: 2564 - DNA, 414 bp, Homo sapiens
caggaaccattgatggccaaggtgatggttgtggtgctggcttgggaactataatctgagaattacatgctataaaaaattttgacatggatggttctaacatggactggtactgaaaatcaaggtaaagtcgtatggtattggagaagaggaagatatgacttctcattgtaaaggaatcatagtaagtctttcttgatgagatggcattggagcaagagctcgaaaggtaagtaaagatggggaattcagatatggaattagagcttattagtggcacatagttcaattttgcttgaaggtagatgaactcaaggtagagagttcatgtaaggtgacatagaaagtgttatcaattagtgctgtctaactgaaatataatgtaagctacatacataatttgcaatcttctag

SEQ ID NO: 2565 - DNA, 3609 bp, Homo sapiens
tgatatttcactgaacacgctcgttcttagattagaaaattcctggagtcgtcgcatatccagcataaggaggtgaaactatccagaggagaaaacaaacttacaaaatgaggatcccttggttactctgcttccatgctatgaggactcagcaacacagaagagccacatgcggatgctctggtgcacattccccgctgagcaccgccttagattcatcccagctcaggtgccagacataagggtgaggaagcttccacatgattccaagtcactgtcattccaatgaagcccagcagaggccccagatatcacggagcagagacaagacatctcactgaatcctgtctgaattcctgaaccacaagatcttcgaggaaaacaacatgattataattatttgaacaaggtctgaggtgctttatttatgccatcatggtaaatgaaatggaattggggatctagaaatgaagtaccaccaaaacaaaacctaaaacaggtggaatttgtttttaggattgtgtgtcagacagatgtccaaaaagccttgtagtaggctaaaaaatgcccttcaaaagatgtccacatcatcacccaggaaactgtgaatgttatcttttttaaggttctttccaagtgtgatcaaagtattctgtgatagggagatttccctggattatccaggtgggccttaagtgcaatcacaaatgtccttataaggcaaaggcagagggagatttgaccgcacccagagacaaagacaaagtaaaaacagaggcagagattggagtgatgcagctaccagaggctgggagaggtgaggaacagattctgccctagaatttttcagagggattgggaggccgaggcaggtggatcacctgaggtcaggagttcaagatccgcctggccaacatggtgaaaccccatctctactaaaaatacaaaaaattagccgggtgtggtggtgggtgtctgtaattccagctacccaggaggctgaggcgggagaatcgcttgaactcaggaggcggaggttgcagtgagccgagatctcgccattgcactccagcctgggtgatgagtgaaattccatctcaaaaaaaaaaaaagaattttcagagggagcatggccctgccaatatcttgaccttccccaatgaaactgatttttgacctgtcctctggaactgtgagagaataaatttctgttggtttaaactacccagcttgtggtactttgttgtagcttccacagaaaagtaacacagtcctcaaaaagggagtcagtgaaagtgtgaaagagactgaggagattgttattggaagctagaggaaggaaacttgtatatataatggtagaaagcttgtcaacacagttaccaccagtaatacggaaaataagaaatatgctaatgaacttaatcaaggtaaggaggtttttggaagaagagtgtaaggtgcattgtggtttcttctagccagctatagtagaatgtgagagcagagagaaattaactaaaaaataaactcttccttttcaagaacaactatcaagggtttaggagagtctttccagacagaaaaggcttctcaattaagaaagagtcattgattcaaatattaaatccagagagctagcagaaaaacattgtcttggaatcaagatgaaaccttagatgtgactacaaaaccctttatgcagacctcggaaaaatttatgtttgtgccctgtagacacactgagatggaccaaaagctttcaaaccatcttcagggcatgtctctgttaagaaaaatattaaggcttctaaaggtcttaagaatgttattccaggttgggtgtggtggctcatgcctgtaatcccagcactttgggaggccgaggtgggcagatcacctgaggtgaggaatccgagaccagcctggccaaaatagtgaaaccctgtctctactaaaaatacaaaaattagctgggcctggtgacgggcacctgtaatcccagctacttcggaggctgaggcaggagaatctctcaaacccagaagtggaggttgcagtgagccaagattggctctgcactccagcctgggtgacagagtgagactccctctcaaaatgttagacttataaattgacatacaacaaacccacaacatttttaaagaaattatatcagatgggaataaaagggacagagacagtatcaaatgaaaaaaggcttttgaactccaaaacttttactggcaagatacatgatttaaaaaataaagaaacagacaaatacaaatctgcttagctgtagacatggactactccttataaaaaggaaaaatgactcgggtggaacaaagagcccaggatgaatataagagctgcggagaagaactctcaggttgtgggtctaagccttatcaaggaactggtaacatgttccctgctggatttcagaattgctatgaaacagtgattatattttcgaatagcagtggttatcctatatcggtttgactattgtatgttcagtgttttggagaaagataacctctctcttacattcacaggtcagattgcaagaaatacttgaggaactgcactcgaggtgtcttatttacatatcacccatttgattgattgactgattgagatggggtctcactctgtcactcaggctggagtacggtggagcaatcacagctcactgcagcctaggcctcccaggctcaagtgacctcccacctcagcctcctgagtagttgggactataggcatgccgccacgctcacttaggtttgttttttgtttgtttgttttttgcagagacgaggtctcattaagctgcccaggatggtttcaaactcctgagcttaagtgatcctcctgtctgggcctcctaaagtgctgggattacaggcatgagtcggcacacccagccccatatcacccaatttagatgataagattctggaccttgagtctaaaatgaaagtcaaaatggagacttttgggggtcttgggagagggtgtttttattttgcatgtcagtgggatacaaattgttgtagccctagggcagattgtggcatgctgcattttctaaagatggccaccaaatagatcccattcaaaatatttctctaaaatgtgcgttgctactctcccctcaaaaagtgtagcctatgtctccttctcttgcacctgggtggacttgtagttgtttcaaccaatagagtacaactacatgtgcaaatgctgctatgtgacctttaataccagatcataagtatcataatgcatttatggttgggatgtttgagaccctcactctttggacatcgccccttggtatgtttctcacagaacctagctacaggtctgggtgggttcagaactagcctggaacctagccataactgtggaacacctacctgcagcctgtccagtgggtaaatatcctaacccagttccagtcaacatttccagctgagtccagcctttgtttttgttctgtttttttgagacggagtttcactctgtcacccaggctgggtgtacacacagtcctgggtgtaactgttctagggttcttaatggctttagagcttagcc

SEQ ID NO: 2566 - DNA, 3659 bp, Homo sapiens
tatgatcatcaacaaaattagtttcttataaaaagtggcatttacatcaacaactttgcagaaaactaatttatggctcttcccatctactactcctgggattcagtcactgatgcatgaattttatgatgtggcaaatcctgtgggaaatcctggctcagtcctgacccaatactggtctcttttaaatgtatttgaacaatttcagttcatgaataaaaagacacagccacatccactggaatgggaattctttcacagaagataagaacattgaaaaaccacaagtgccatttgatgcaatagaaaataaaaaagctgcagttccacaaattaaaaatgaaaataaagaaatacattgcagtgatgatgaaaacacaccatgtcatatcaagcagatcttcacacatccacatttggaactaaatcctgactttcatccaaagatcaaagattattactgtgaagtcccatttgatgtggtaacagtgacaattggagtggaaactcctaagtgtctgtgcaaggtgcacctgtacgagcaggcagggccaagctttgccagctaccctctgggcttaggaatgaacaaaatctcaatatttgttgtggatgaatctccagcacacggtgagactctgatcacgtacaaactcaccatctatagagaagaccgcccaagtctgcccttgtttgaggccttcacagcatgtggttttgtgcaggtaagtgaagtttacatttgcacttgggttgaattgggaatgatctgttaacccaggcggaaaatgccaaatgaaaattattacaagaaattgtatgccttgaaatcgaaactgtggtctcatttcaaaaaagtgagaatcccagccaggtatctaagtcacctcgttgtgagtgattttctttttagtgtgatggctactgtctgtgctcattgttttcagtggacttattgtggttaatgttcaaaaaaaatgtctgaggactcacacttagttgtgaaatcggtttcacattttccttttaaattgggctatttttcttggatttgtccctggatctacttttgaaatgttaaactagatttagtagaatttactttgaagaataagaggaaaatttatgaagctattttacaagacggatactggataaatgaaactaaatttgcttgggatagttaaatttctcattcacttctcatacagtaatcattttgcaaggctgtagtttctcttgtgagcaacacataccattttgtaaccttgttcattttggagaaggatgaatgttaccctaacacttttgttctacggtttttccctatttttgctcttttaaggatcccatgtataactttgtacagttcctcatatcatataccccttgctacaggtgattccagggaagtagtaattggtatttttatcacatatctattaattcactcagaaagtatacttgcaaatatatcatgtcacattatatattactgggagctttgaagaatagctggttagtaaaagagaggtattgctgactgggccttgataggtagcatggttaccatgttttttataaatgtaacagccaggcacagtaatcaccccgccactgtcttatctgtttccaagagctttaaaaatctcagggattggtataatttttattttttgaggaaaacatatcactaatttaggaattaccactaaatcaaatggaatttcacattagtctgaagattcattcaaagaaagacaaatatgttattctcaaagatattaataagcacacttaaaaaagagtagaatacagttccatggtcaaataaacccattggttgatgaagcaataagctaaacaaagttaagtagatgtctttactataggacttccctgaacctctaatatagtaatttaaatggtggttcatttatagtacggaaaatatatagtgtgtttcatttccaaacttatttgatatggttttaatagaatagctattgatatttttgtgggacagatttgaggaaacactggtctacactatggagaagactttaaaatatgttcctcttaggttttgacctttcaatttgctttatttggattgctgtctcaacttgcttctgaattgaagaacaaataatatagccacaccaaaaatgtttaaaaaaataaacaaaaacttagagggaggtgtgcttttgtatatttgtgtatatttgtgtgtataattatttctaaactaaatattcttaccctttttggtggagcatttttttcatacattgctgggagaagtgtgaaatgtttgaccactttggagaactttggcagtatccactaaagctaaatatgtataaatgattcagcagtccttctagctatacacctaagataaatgaagtcatatgcccataaaaagacacacacacacaaaatcttcgtattggttttattcatagtagctaaaagttgaaaaaaattcagtaagaaaggaaacaaatccaatattatactattggggcattaaaaataaatgaagtatggatacacacaaatatgaaacaatcttcaaaaccttacattcataaaaacaagccagacatcaataatgaatgctagcaaggatgtggagaaaagagaacccttgtactctgtttgtgggaaagtaaactagtacagccactgtggagaacagtatcgaggtttctcaaaaaactaaaaatacaactactgtgtaatccagcaatcccactgctgagtatatttctgaaataaaggaaatcagtatattgaaaagctatctgcattcccatgtttgttgcagcattattcacaatagccaagatatggaatcaacctaagtgtccatcaatggatgaatggataaagaaaatgtggtacatatatacaatggtgtattactcagccataaaaatgatatcctgccatttgcaacagcatggatggaactggaagatattaagtgaaataagtcaggaacaaaaagacaaatatcacatgttctcagtcatatgtgggagccaaagacaagtggatatcatggagataaagagtagaatgctggttaaccatagtctgagtagggcagtggagaggctgggatgaagagtggttgttaatgggcacaaaaacaccaatagaaggaataaggtctaatgttcaatagtataacagggcaactgtagttagcagtaattcatggcatatttcaaaacaactagaagagtggaattggaatgttcctaacacaaagaaatgacacatacttgaggtgtgatagatatcccaattaccctgatttgatcattacacattgtatacttatatcaaaatatcacatgtatcccataaatatatacaactattatgtatccacaacaattaaaaacaaaaaaaattaaaagaagccagatatataaagaaatactgtatttcacttatatgaagttcaagaataagcaaaactaatctatgtttatagaagtcagaatagcagttactagaaggtgtaggtacaactaagcatgagggaattttttgggcaaatgtcctatatcttaatctgggtgctggttacatatataactaggtgctatatagatagatacaaatttaattaactgcat

SEQ ID NO: 2567 - DNA, 1194 bp, Homo sapiens
ttggcacattttactcttctggcagctggagagagctctgacctgtgtctcatcagtgaatgctggttgtgacaataatgaatttctaatggcaattaacacagtgacagggtttataaattatagattatgacaacactccctgcgatctggttttttcctttgaagaccacctggctaccaataacggtctcaccagccaaatcctgtatttgtgggccaagacagaagaagaacaacaatgaaaaaaagctggaaatcttagagcagactcacatcttaactaggagaatacgtgctggcccaagtgccccaggactgaagcaaatcagacataggggaggagggagaatgttagaatgaggcacacctgattcagccgctaaatagtctggttggctaagaatcacaatcgaggcattttgcctttctagttttctttggtgaagatctgtgagcatccaaatgatatgaagagcaatatggctaatctgcactacttcggaagcctgggaggaatacttcctctttgctggatgtggcgtctgcgtgtaccatctggaattgctgtagccaacttacaaatacagacgaaagctttatcaacctgctgagcacagcagaatggaaagatgcaaagcaccctgctcttgggaactggccaccttcagacttcttgctacatcaggttttatctactacaaaggatatcacttgggaaggaatttcttgaaactgctcccaagagagccattggaccatgtggtaaacaactcctagctgatggattattgggaatattaacatcatccagaatgctatggggagaagacaactggaagctccgtgtggacaaacctcctggactctgccccacatatctcttcccttggctgatttgaatttgtatcctttcactgtgataaaccacaaccagattattacagctttagaagctgacagctgacacgcccttcctttgtgcattttatcctgggacaaaatgagaagacatccttcagttcccgtaagtactattcttttagtaggaaatcaaacacaccccctaactggagtactatttattctattccatctgtttcacataagagcagtaaagtgattggaggtgaaatgaaaagaaagaaaatggcaagacatggtgcacaaataactttcaaagactcataaatt

SEQ ID NO: 2568 - DNA, 495 bp, Homo sapiens
caggtgcgcagtgacccccggaccctccctcctcaggcgctcgccgatcccgggcctccccctcctcagatttgccaagttgtttctcattaaacctaaaccaactcttcagccgcgccgcctcggggaccgtaagccccgctctggtggacgcctggagtcgccgcctcccgagagtccacaccccatcttgtctccagcctgcgctgggaagaagctgaggtctggaggtcttcctctgaaggagcacagtccagggagccacagaaggctgccttgaggagtggaactgcttcagggatcaatgcaaagtgtcccctgtcaggagaaaaaccactcagaggagagatgggacctcagtatgtttgccatgctggtatccagcttctggcctcaagtgatcctcccgactcagccttctaaagtggcaggattacaggcatgaaccaacatgcccagcccagagaaatcaactcctgtgtgccaagattaggt

SEQ ID NO: 2569 - DNA, 794 bp, Homo sapiens
tcgtgacaaagcaaattgtctggtatcatgaatttggaacaccattccagaccaaaattgaaaaaatggttgacctcacccaggtttttgccaatccagaagactgtgtagcatttggcaaaggagaaaatgccaagaagtatcttcgaacagatgacagagtagaacgtgtacgcagagcccacctgaatgaccttgaaaatattattccatttcttggaattggcctcctgtattccttgagtggtcccgacccctctacagccatcctgcacttcagactatttgtcggagcacggatctaccacaccattgcatatttgacaccccttccccagccaaatagagctttgagtttttttgttggatatggagttactctttccatggcttacaggttgctgaaaagtaaattgtacctgtaaagaaaatcatacaactcagcatccagttggctttttaagaattctgtacttccaatttataatgaatactttcttagattttaggtaggaggggagcagaggaattatgaactggggtaaacccattttgaatattagcattgccaatatcctgtattcttgttttacatttggattagaaatttaacatagtaattcttaagtcttttgtctgatttttaaagtactttcttataaatttggatcatgttatgatttgtaacattcacacaacacctcacttttgaatctataaaagaattgcacgtatgagaaacctatatttcaatactgctgaaacagacatgaaataaagaatttaaagaatga

SEQ ID NO: 2570 - DNA, 53690 bp, Homo sapiens
gtaatgtacttgagttataaagtttatatttatataactcaaatataaatattaaaaatatataaatataatttatatacatatcttttatttatataaataatgtataatatttatattatatatttggtattataaaagcatatgaggattctgagaagatggcaaagtaggaagtacaggaaatctgcctccccacccagacaacaattacattggcagaatctgtctgatgtaactgttttggaactctggagtctattgaaggcttacaacttcctggggagggtgaggatagcaaattgtagttaattttggtcaatttcccctcttagcacctccaaggagcagctacccatcccccagtccccagtcccacagcaggcagctgtgtgcattcctagagcaatctgaacacaacttgcaggagctggagtgagtaaaaggactctgtcttccaaatgtcaaggatctgtgctccactcctgttacttcttcttatcacagaggtacagaaaaagaggcaccgatgttccacctcctccctatgttgttccccctcctgctcatcctgaagtaacttccacaggattgaaaggccaatgcctttttctttcaacctctttcatttttttctcttttgggaggtagacatcaaagattaggacattcaactgcaaccatatatatggggtagattagaaattcggagcacatgttcaagagaacatctctactaaagatacaaaaaaaaaaaaaaaattaaccaggcacggtggtgtgcacctgtaatcccagctacctgggaggctgagacaggagaatcgcttgaacctgggaggcagaggttgcagtgagccaagatcacgccactgtactccagcctgggcgacagggtgagacttgtctcaaaaaaaagaagaaagaagaaagaaggaagaaggaggggaaggagaaagaagaaagaagaagaaagaacaaagaagaaagaagaaagaagaagaagactgaagaaaagtaaacagagctctaagggacttgtgggacaccatcaggtcaaccagcaatacactgcggtagtcccagaggaagagggaaaaaggtagagagaatatatgaagaaataatggccaaaaatccccatttggtgaaaaacatgaatataaacatccaagaagcagggagataggatgagcacggaagcaggatgaactcaaagaggcccacaccaagaaacagtataatcaaactgttaaaagacagagataattttgaaagcagtaagacataaatggttacatactagggatcctcaataagattatcagcagatttcacatcagaaacattggaggccagaaggcagtgggttgatatagtcaatgtgataaaagaaaaaaaactgtcaaccaagagttcttataaggatgcagcagaaaaaaacaaaatgtttttcctctgcttaaccactcacagtctacacaacacagaatatttcatctctgactaccaaattgtggggagatttctctctaccagcaaccaatcaattcttcagcagacactaaatgggtatccttcaattccattctgatactgtctacctggaaatagcatcacatcccacaggctgaggcttacttagtcccataagactggttcccatatcagatgccagttgccaagtactaggttgtcacatatacttctgactgagggttcatgatatcctccttgggttttgattaatttgctagattaattaacaaattagagtggctcacaaaactcagtacaaaaaatacatatgaatagccagatggaagagatgtatagggtgaggtaagggagaaggggtacagaacttccatgtcctctttgggccagccaacctctaggcatctccatgtgttcagctatccagaaactccctgagaccagtccttttggacttttatggagatttcattatacaaacatgactgatttaatcattagtcactggtgatcaaactcaacctttggcccttctcccctgcccagaggctgcagggtaggactgaaagtcccaacctcctgatgaagccttggtcattcgggtgaccagacaccatcctgaagctatctaaggggccaccagccacttgtcatctcattaacatgcaaaagaccctcttatcgctcaggagattccaaggattttaggagctatatgccagtaaacagggacaatgaccacatatatatttcacaatatcacaattctatatctggcgaaactgtcctttaaaagtgaggagaaattaagatattcccaaataaaagttgagggagtttgttcctaatcaacagacatgccctgcgagaaatgctaaaaggagggcaggttgaaacgaaaggacattagacagtaacttgaagccatatgaagaaataaagatctcagtaaaggtagtaacatgggcaattataaaagctagtattactgtaaccatgatgcataactcaactttttgttttctatgggacttaagagtctaatacaattttttaaaagcaattattagtctaaaagctagttttatcataactttggttggtaactcattttttcctacatatttaagagactaatacattacaaaattattagtttatgtttttggacacacaacaaataaagacgtaattttgtaacatcaacaacagaaagtggtagaaacaaagctgttaaaggagcagagattttgtatgttattgaagtttaactagcataaatttaaattagagtgttataactttaggatgttaaatgtaatctcaatggtaatctcaaaattactatagaaaatacacaaaaggaaatgagaaggaaattaaaatgttttactaaaaaaaaaatcacctaaacacaaagaagatagtaatgcaagaagtgaaggacagaaatcctataaggcatatagaaaacaaataacaaaatggcagaactcagtccttccttatcagtaattactttaaattcaatggattaaactctccaatcaaaagagactgacagaatggataaaaaacaaaaacatgatccaactatacgctgcctacaagagactcactttaaatccaaggacacaaataggttgaaagtgaaaggatagaaaaatatgttctatgcaaacagtaaccaaaagagagcagaactggctatactaccacaaaataaactttagatcaaaaaaagttataagagacaaagaaggacattatagtagtccccccttatttgtggggaatacattcctatattcccagtgaatgcctgaaaccactgtttttgcaacgtgataactgagatggctactaagtgactaataagtgggtagtgcacacagtatagatatgctggacaaagggatggttctgacgtgggtggaacaaagtgggacagtgtgagatttcactgcgctattcagaagggcatacaataattaaaacctatgaattgtttatttctgaaagtgtccatttaatattttcggaccttggttgaagtaggtaattgaaacctcggaaagcaaaatcatggataaaggggcctactgtatatattatattaatgaaaagtaagggggactattgtatatattaataaaaagtgttggccgggtacggtggctcacatctgtaatcccagcactttggaaggtcaaggcgggcgcatcacctgagatcaggagcctggccaaaatggtgaaaccccgtctctactaaaaatacaaaaattagccaggtgtgtggcggatgcctgtaatcccagctactcgggaagctaaggcgggataattgcttgaactcgggaggcggaagttgcagtgagccaagaccgtgccattgcactccagcctgggtgacaacagtgaaactgtctcaaaaaacaaaaaaataaagcgtgatacagaaggaagatatatataacaattataaacatttaaacatctaataacagaccatcaaatatataagcaaaaactgatggaactgaagaaagaaatcattctatagtaatagttggagactttgataccccattcttaataacctacaggaaacccagacagaagataagtaaagaatagagagcttgaacaacacaataaaccaattagatttatacagagtactctacccaataacagaattcacattcttttcaagtgcacatgggaaattttccaacctagacatatactagaccacaaattaagcttcaatagattttaaaagacagattacaaattttcttctcttactacaaccagacgacattagaaatcagtaacagaaggaaagtgaaaattcaaaaatgtgtggaaattaaacagcacactcttaaacaaccaacaaatcaaaaaagaaatcacaagggaaattagaaaataaatagagacaaaaaaaataaaaatacaacataacaagacttagggaataaacaaaagcagtgccaaagggcaaatttgtagccatatgtgcttacaataaaaaacatgaaagatcttaaatcaacaacctaatgttacaatttaaggaacttgaatgagaagaacaaattaaacccaaaactaatacaggaaggaaacagtaaagggtagagcagagtacaggaaggaaataaagaataagaaaataatagagaaaatcaataaaaccaaaagctgtttctttgtaaagatcaacaaattgactaacatttagctggaggagacacacttcctaatttcaagacttactccaaatccccagtaatcaaatcagtgtggtactgcaaaaagatagacatacagactcatgaagtagaataaataatccaaaagtaaacccttacatttatggtcaaatgattttaacaaggtgccatgactattcaatggggggagggaaatcatttcaacaaatgattcttcgaaaactggatatttccatgtgaaacaacaaagttgggcctttacctaacatcatatacaaaagttaattcaaaatggatcaaacatctaaatgtaaaacctaaaaccataaagctcttagaagaaaacaggacaaaagcttcaccacattggatttggcaatgatttcttagatatgacactgaaagcacagacaataaaagaaaatctgaggacttctgaaaattttaaaaatttgtatatcaaaaaccattaccaacagattaaaaggcaacccacagaatgagagaaaatatttgcaaattgcatatctgataagggattaatatccagaatacacagaaaactcctgaaactcaataacaaaaaacaaacaataccattcaaaaacaggcaaaggactggaggagacggatctccaaagaagaatacaaatggcaataatcatatgaaaacatgctcaacctcactaatcattatgaaaattaaatcaaacctataatgagatagcacctcgcaaccattagtatggctactattaagaaaaaaaaaaacacaaaataacaagtgttgtcaagaatgtggagaacctggaacccttgtgcacttgtgaaaatgtaaaatggtacagctgttacggaaaacagtatggcagctccccaaaaaattaaaaatagaattaccacatcatctagcaattctacttctggatatatactcaaaagaactgaaagcagggtcctaaaaagatatttgtatatttgtacccccaggttcacagtggtattaactgcagtagctaaaatgtggaagcaaccaaaatgtccattcacaaatggataaacaaaatatggtctatgcatacaaaggaatattattcagacttaaaaagaatggaaattctaacagatgttacaacattaatgaaccctgaggacattatataagtgaaataagtcagtcacaaaaacacaaatactgtatgattccaattatatgaggtatctagagtggtcacattcattgagacagaaagcagaattgtggtttccaggggctggagggttgggggaaatgcagagttgttgtttaatgggtacagagtttcagttctgtggatgggtggtggtgatggttgcacaacaatgtgaatgtacttactgccactgaactgtacacttcatcgttaagatgccaaattttgtcgtgtgtattctaccacaataacaaacatgggaaaaaaagctatagaaagcttaattaggtttttgaatgcaatgacagtaatttatagaagaatttgaagagaacaggaatctgcataatgttgagtcacccaggatcaggctgtatctctccaggttaagttctattccttcagtaaagattttactttatcccataaaaaaagaaaagtatatgtatgtgtatatacaccatgcacatgcactcacacagacacaagtatatgaaacgtactcattccagagttctggggtcatgtcaatatttgggctgaaacctggctgtactacttcccagcagtgtcatcttgggaggtcatttaactgctctgcttctcatcagtaaaatggagcaaataatacctacctcacagacttgtggtcaagatttttaaaatgggaaatcagcactaaatgctagtgcagcaccacaacacgtaaggattcaatcaaaatcatgtcatcatcaacgtctctggatggtagaattagggatgactttcatttgatactgggaacaaactggtgttttccaaactctccacagtgagcatgtgttgcttttgtgatgaaataagacaactaaacattgtttaaagccatctagagggatggctaagccaagtggaggtgagcaggaagccaggcttctttagctaaagagtgcagcctctcatctttcacagcattaatccctgtagctcccagcaggcttggaccagccgttgatgctgacctacagatgtctcaggctgtcctgtttccttgtggaaaaagacaatgcctctgccccaccattgccatggccatgtgaaggcagctgtctgcccacgccaagtcctcctgagctgggcctcaatggcccccacctgctgtctgggatctgttggcagcactggctgctgtctcaggggtaacatcattccagccaggaggtaaccagggcatctctaagttagctgtctcatatccagtatgtcatagtggtcaagacaatcagcttttgagtcagtaagactgggattcaaaacaaggttctgtcaatctccaaaacctctagggctcagcttctcttaactacaaactaaggatgacagctacctctatgactataaagagattagctcaaggcctggcatgtcataagaaggtaagaggactttaaaacatcatgatgcttctctgttcaaggcatccccatgatagacacaaggagtatcattttagaccagtggaaaaattgacccattgaatcttctgtcaattccattcaacacctatgtgaggacctcctgagtgccatacacagctgaaggcacttgggatacatcagtgaataaaagggatgaggatctctcccttcctggagcagagggagatgaatgataatcaatatcaatacacataaaaataaataggctggttgcagtagttcacgcctgtaatcccagtactttggggggctgaggcaggcggatcacgcggtcaaaagattgagaccatcctggccaacatgctgaaaccccgtctctactaaaaatacaaaaattagctgggtatggtggtgcatgcctgtagtcccagctacttgggaggctgaggcaggagaatcacttgaacgcaggaggtggaggttgcagtgagccaagatcacaccattgcactccggcctggcaacagagcaaggctccatctcaaaaataaataaaataaataaataaataaatgtgtagaaattgaatacacataatgaataagtgtgctagaggtgaaaagtgcaagaaaaaaatagaagagggctgagtgtgcaggggcagaaggcaaaggttgtcatgtcattaatgtgggcagttgagcaggcctcactgggaaggtgagattgggcaaaggctagaaggaagaattatctgggacaagcatttcaggtctcgagcaagggtgagcccggtgcctgggcagaaggaagagcgaggaggctggagtggcttgagcagagtgaggaggggaagcaaaggaagggtcagggaagaatgggaccagataacatggggctgtggtgtccagtataataaggacttgggctttattctgagtcaaagaaagagctggagattttggagtggagagaaatttgatctgagttaaacgtgttaattaatgacatactcaaaatctacacatattcttgctcccttcagtaaggatatccaaggcatgaccaaatcctctctcttcttggactcactccattctgtcctccatatgaccaagacaaaccctaaccttgctctttcaaagctcttggctataaagcactctgaaaacacaaagggtgaaggctccatgacagcaatgattgacaaacagcagtaaggcctccccagtaccgagaaaggtcttggggtttcacctaagtgtaaaaataaaactaatcctcaatgttctgaccttaatggaccaagaaccctcacctcaccctgcccccaccattcttttttgaagagagactattttctgcttcatgatgacagcccaagcccaacagtgcacaccatactgaagtaccaaggctgcccctgagaaccagcatgctgggcacaggcagttcctcaccagccatgactcattttgttgtcctttcactcacaatcacgtatcatcacctaaaataaaaagtcatctttagaactgattcctcctatcattacacattctatgcatgtaacaaaacatcacacgtaccccataaatatgaacaaatatatcaataaaaaaaactacaaagtaaaaataagtttgaaaatggaaagaaaacagtcatctttactaaataggctgaacctctttgtttaaacaacaatgatatgaagaagacaaggtagatttgcttgggaaacatattctaagtggaaagatcaccctccagtcttttgcacagggaatccaaccttcgggaaaggttgccatcatgagcccaaatgttcgttttataaatgcaattatgaaaaaaagaccagcatacagaatctggactctggcccaatgacagaaatacagaattacagttctctcaaataacagagctaaatgacagccagtcctttctgaatctggaatgtcattccggatggggaaaaaaaaaaaaaaaaaagactgccaggggaaaacagttccattccaatacctgaatatatgagtaatcatagtactaaatatttataaaccagagaaagtgcacagagtgtccgcaattccacagaaatgcacttgccaccacatttagagaaatctaaagaaatgttctacaaggcccgacatttagggcaatggtttgaactaaacctttgttttatcatttacaatttccttttaaactagggtcatcctttgatgcacaatataaaggcatcaaagatgaaggttttcctcattatcttattttttatgtaatcaccgaatacatttagactttgttcagttttatatatatgaaacacccaggcattgatcaaaacacccagacatggatcaaaactgaaagtaggcacagagtgaggaatacagttgaaggcaacctggcattttttttatgtttgaattaacaacatgagtgacacatggctagcatcaaaaattttaaataatgattagaagataaagaaaaaaactaaaattaccccaaatgccaccattcataaatattcactgttgactttgggaaattatatttttcatccttgctcatgtaaagattgccagttctttatttcccttttcattgaggtgtataattcaccttccgtaagattttcaaaatcatgttattgacatttaatgtatatgcactcacattttctggtatttataatgcgaaataatcctgaagacctcttttgcccatcctttcctctccttcctgtcgccatctgagtccctctgcatcatctgtctctgggcgattcctaaccggtttcctctccttgagtttcaccttctctaacccactccctttgccgcctattatgtggtctttaattcataaatccaactcactcctcattgaacattattttctggtcccgctgcatgtcttcacggcctgagaaaggcctgcctgcccagcagtggcccaggaggtctaatcccatctcgctgctgcaatgtgtcatgcctctacaaattcacatggctattctgtctgtctgtcccacctgcaaactcaactgatccttcaaatttgtctcttcttctactgccttctttgatgtctcaaacttagacacctttctaatacattcaattcctctgtacgcacctccattacgcatcacatcaacatttgcttcaacactgatctcaccagcctgcagctctggaaaagcagggataggttcttttcaggtttgtacgtatagcactttgcgaggtatgtgccatacccccaaaattcaataaacatctgttgaatacactaatctgtaaaaccacgctgcttagcaggaaaaatggaagtattcaatattaactaagctatgggacaagcacatggagaaatgtggctcctgccagtgagcagctatcggatcagaggagaatcagggcaagcggggcccggtgcagccatgtgcaagctgtgagaggctgcagtcagccctgtccagagacagaatcagcagaatatgaaacacacacatgcacagagatttcaaaaaatgagattacccaattatgggggctgacaaagccaaaatccactgtgcaagcctacagggtggaaacttgggggcaggagctgatgttgcagtcttgaggcacaatttctttctcttcagggaagcctcagttttgctctttaaggcctttgaaatgattggatgaggctcacccaggctaaagaagataacttctttttcttaaagtcagcaaattatagatgttaaggacatctacaacatacctccatggtaacatctagattcacatccaagtgaataagtgggtactctggcctaaatgagtgtccagtgaataactgggtactcaggcctagccatgttgacacagaaaactgaccaacccagaggggaaatccagggagtgtggaaggacaggacagagacctctcactcacacttgggcagggggagggggcatgatatcaggtaaggatctctggaggaagtgctactaaagctaaggttttaaggctgaagaacaagttaggtggtgtgggagcagctcaatggctggggccaggagcaggtgagcaagacgcatgtgggtacacaagagacacccaggagcccagacggagagggcacccaagacagcacctggggcagaggctggtgatcagagcactgaacactgactgagcactgaccacatgcccaccactgtccagtgtgctttacatgcattttctctttaatcctcacaatcgccctgtgatatgggtaccattaaccacatgtgctgatgagaaaactggtgtacaaagtggccagtgaactttccaaggtctcccagctcctgagtagagacgcaggaccccaacataggcattctaaggtcttcaggttgtaggatgaagtagagcaggggtgtccaatatgtagcttccctgggccacattgaaagaagaattgtcttgggccacacataaaatatactaacaacagctgatgagctaaaatttaaaaaaaaaaatcacaaaaaaatctcataaggttttaagaaagtttacgaatttatgttgggtcacattcaaacccatcctgggctgcatggagccaggaggttgcaggttggacaagctcgaagtaaagggcagagatgaagaaattactttagctttggatagaaacaggaaagcagagctaaagacaggtagagcgagaggggtaagtggcagtaaaatgggaattctgtagtgtggtggaggtttggagtagccactgtggaaaatgaggcgagaaatgaaagaatgggaaatacggctgtaggttagcacagagaacaaagatttcagaggctgacaaggcacaggatgtgactacacgtatgaactcttcacatgggattgaaggttactgcagtcatagaggtaaggaactgaaaagacctcctccccgtgggttctcagtaaagggcaggagttaagggaaagaggaagtgcaggtatgaggacagcccaccaacctcatttttggtatatggagaagttaaatgcgtgtcaaagtagttcacatacatagctatattcctctcctcactgtctactccagatagtctgttaaagacagtgaacacagcagtctgagtagaatatacagttcttgcttcagaagaaaagagaatccccaattatggctatcctttggccaatccagtggaatcatttcaattttgtacatttgccactgactttatttctgtggatcacagaattcagtaaggggatgcctcaaacagaaagctgtctcatttaagtctgttctgtggctctgtgcaggaagtgaactgagtaatctaactattgtctttgtttgctaagtttaaccaaaaagaagtcctctgggtttaaaaaatcatcatgaaataaagagtttgccttttaacaacttcattttactgagtgatttttataacttcccaggtaaagctattagttttcagagtgtaaatcctgcggcaggttgcctctgggctcttgaaaaacctaaggtgctttggctaagaaaacaaaacacaggagtggctgcatgaaaccgttcatgtagaaacagcacagcatattcttgacaaagtgttcatattattcaataaagtagctagaaatgaaaacatttagattcaacgtttcttctttcattttaggagatacgaaattaatgttagatttgcttctgttgacagcagtcatgttgcttggcaaccttaagtgtttcttgggttgaattgcaaacgactcaagcagctactcattttaaaccaaggaagctgctcaagaagttcaatgtgatgcctatcacataccccatcactcacactgatgcaagagatttatttgtaagatgctaccactattggatgtaaacacctacaccccattggccctacaagctgtcctatagttatcaaagtgacattttagcccacttgatttagttttctatttctttattaacaactaaataattggctgacattggacatttaaaatttattttctaactgtggtaaaattcacataatataattttactatttttaagtgtaaagttcagtggtattaagtacatttacattgttgtgcaacaattacaaccatccatctccagaatttttgcatcttcccaaagtgacactctatacctgttaaacagtaacttcccattcctccttctctttagcccctgacaaccccattttactttccgtctctatgaatctgagtactccaggtacctcctattagtggaatcatgcagtatttatttgtcctttgtgtctggcttatttcactcagcacaatgtactcaaggttcacccatgttgtagcatgtgtcagaatttcttttccttttaaggctgaattgtcttctgctatatggataaatgacattttgtttatccattcatccatcaatggttacttggtctgttaccacctcttgactgttgtgaataatacaactaggaacatggatacataaatatctcttcacaagcctgctttcacatttttggggtatatatccagtagtggaattgctgggtgacacagtaattctacttttaattttttgaggaattgtcatcttgttttctatagtgggtacaccattctagtccaatcggcaatgcatgagggttccaatgtcttcacatcctcaccaacacttgttattttctgggctttttaaaaaaaatagtagccaacttaatggcaaccagattttatgtgttttattttttcatatctctacttctttaagtattatactatattgtaataatttacattcaattaaattacactatattgtaatgatttacattaaattagaatatcagtatcctcctccactaatctatgacctgtaatggaaagaaccaagtcttcttcatcttaaataccctctaattcaaacaggcaacaacatgcctagtcctaaaatagaagtttcctgaatatctgttccattcctcattaccaatggaataatgaggcttcgggtaagaagttcagggtagactgagaaaaatcctgaatgccaagctaatgtgtttaccttattaacaagggagagaattatttgtcatttctgtaaaaggatgacatagtcaaatatttggcaatggtgtgttgacctaagcaactagagtcacagagtccacttacctggctggacaataccccctggaatgagggcagtgggcatctgcagggggatggcagcctagggaatgaggcgggaggcccggggacactaccaccatgttctgagaacacttgggttttaccctttaaggagactcccagtttatccagggctctcaatacatcattcagaaaaatatgtttttcaagtgtgtgtgtgtatgcgtgtgtgtgtgtgtgtttgttttgagacgactctcactctgttgcccagactggagaacaatggcatgatcttggctcctccactcccaggtgtaagcgattctcctgcctcagcctcctgagtagcagggattacagaaatgcaccaccatgcccagctaatttttgtatttttagtagagacaaggtttcaccatgttggccagggtggtctcaaactcctgacctcaagtggtccgctattctcggcctcccaaaatgctaggattacaggagtgagccactgcacccacccaaaggtttgtgttttaaatattaaaatagaaatatcaatgtggtaagtcaacaaatgaagatgaaatgtaaatgaaaattacattctcagagaagaaaaaatttaaatgaaaattataaacacaatgaatcacagagtatttaaactacctatgaaaaatgaaaaaaataaaatcagtagctactataaacagaaaacaataatttaaaaaaagaacagtgaaaggaagcaaaagggatactatttagagaaactaaaacaagtgctgattgtaaatgaataaaaatttcaagtattgagagaatattaatgcaaaacaggaagcttttttaaaatctgaagcatagaaacgtcagggataaagaaaaggaaacatgctagaaatttaaattttgctctttaccatagtttttaaattatttccaattattaaacactttctagcacctggtatagaccaggcatggaactaggcactggggacaatatagatagtggctgatcattagaaattgtccacaaaagctacattttaaaaattccctcctggaatgatctatttttctgacagagtttaaaaggattgaaggagagagccagtgatacggacagggatgtgaatttatttaaataaagtagcaccatttagtctttttttctgtttctgatcaagaaggtagaaatttcaattcctataagaatctctaaaaggtaatcaaacagtcataggtggtgatagaacccacagggtgagggctgatttagacagatagtgacttggtcccagtggaatgctctccccatctgacatgatttggctgtatccccactcaaatctcatcttgaattgtagttcccacaattcccacatgtcatgggagggccccagtgagaggtaactgaatcatggggatggttatcctcatgctgttctcatgatagtgagtgagttctcacgagatctgatggttttgtaaggggcttttccccctttgcttggcacttcttgctgcctccatgtgaaagaggcggtgcttgcttccccttccgctataattgtaagtttcctgaggcctctccagccacgtggaactgtgagtcaattaaacctctttcctttataaatgacccagtcttgggtatttcttcatagcagcatgagaacagactaatacagcatcatttccaccaacccaaagcctcctgtcttttaaggcccaagtgaaacttagccccttctccctcctcaaagcttcaactgcttacctaggatatcagacccctactcaggggactcaatccaggggctgtttttgcatcagtaaagagtacaactttctgctcaagatttagttatacaacaagtatacctacttgtactacacttgataacctttagcctacaaggaacctcaattacatgtttttattctgacaatacagcgagaagtgaggtttttagaagtgaaaaagtgggccgggtgtggtggctcacacctgtactcccagcacgttgggaggccgaggagggcggatcacctcaggttgggaggtcaagaccaacctgaccaacatggagaaaccctgtctctactaaaaaaaaatacaaaattagctgggtgtgctggtacatgcctgtaaccccacctactcggaaggctgaggcaggagaattgcttgaagccgggaggcggaggttgcggtgagccgcgatcatgccattgcgctccagccagggtaacaagagcaaagctctgtatcaaaaaaaaaaaaaaaagtgaaaaagtgaaagtgtgagtgactagcagagcagggatttgaacttaggccttctctctggaagttctgtgctctttcctggcattcaccagaaaaggctttgcatggaactcaatttcattattatatatctttttaaaattccccatatctatctacatgacactgcctgtgctcactcactctatctcttgcatgtgtgtgtgtgtgtgtgtgtgtatttcattacataaaattaatttgatatagggaaataaggagtcttttttcttaagcaatataaagtaagctctttaacgcccagatcttcatcatccatgtttgtttctgccttgttactcaagtgtccagcacagaataaaagcaataaagcaatgggctcttaattaatatttctgtagttattcttagtatgagagcaatcaaagacattttcagggatccatgcctaatgacatctgttgagctcatcctaagatagtttccttagggataagtgagatttatttcttatagctgtcccataaaatgtctatattgttacctctaaaaaagtaataaggacttacggggaattttatgaccactgaaataacactcccttgagaaattcaggaagatggcaaaatttcaaatgctcttacactttgttaggggagtgctgtggcattttgttccatgtactgtcaattttaaaacatgacatgacttataaaagtggcttttatcaaaatcttttctgaacataagcaggttctgctttttcttgctatatcaatgattttatacaaccttctttcatcttttaatttttgtcagaatgttgtagagattgtttcagcctgactttgatctccactgcaagaatgaactgaattcaataatagagggaattgcaatgcacatcggaccccaaggggatcagcccatcctttagtggagggctcctgcctcacttcacactgaaatttaaactccttctctggtccctggtaactacagtgtccacaaggtccagcaacaaaacaaactatatgaaagcaatataaccttaccactatttagattgttaaaattagttttggggaatttattcctcagttaatcaggtccaatgtgtatctatgtactgagattcaggattttatcctgttagcactaccataagagtttagatttccttaaatgagaaaaatgcaatatgtgtatgttttagatatatagctctgcaattatgaatttctatcaataatattatacatagaaaacgtatcttgtatgtcctccaattgtgatcagagaaaaacgtacaagaaatattaggagccttttccttagagtttctgaataaaaacatgagaagaagcaaacttgtgttcgaggggtgctaaaacatcctgcaaatcttcagctctggagtcacaggaccagacaactgggatccatgaaggcatctcaggactcaccgtccactccctcacttcccagggaggacactggtcacccacagggattatgtgatttgtccaaggtgacagcacaagtcagtgtcaagatgcccactctcctatagtcctagtcactgtcctgcccagcttgctgcctctcttgagactttgagaaggagcacaaggccatgccaatttccatgctcagcacaaacactcacaccacccccactgctctccagggatcactcacacagaacctcagccagtacctacacactgctaacagactcccacaaatgtgaggcagctgaactcagcttcccacgagcactcagcagagggaagaccataggaaactgtgagagtctagttggctgccaatttattaatatgttgtaggacttcaacaatagaatctcatcctcagactcaagctacacatggatgcctccctccaataagccatggtgctacattcagtgcctcttaccctgctgtgcatcacgggatgaggacatcagagccaggttccagcccagtgtccatcactaacctcaccctggaagagtaataagaatcatctcacctctcctggcatccatctcctcccctgtggaatgttatgtggtcacctggataatatctagggtgccagtatcactattctaggcttccgtgatggtaaacaagggcttgggaagaaggaagctagtgatgactatgaagacagcccaagagatacacaggactctctcaaggcaacgtacatttcctgggtgagaaaccaggctccaggcagagaacacatcttttccttaattgtaataaaaaccagggagacgtggtctatttttcatgcaccttcaaagccactggtgcacacaaaactaatagcacctgcttcaaacagcagcagctctttgacctccagcctaattagcgcatttctccagtgaaaccatctggacagggtccgccctggctcatttccttcattaacaaatcttccaagtggcaacagaagtctcctgtgttggcgccaaccttacaggcacacctcacggctgacagggcccgaagtgtggtggcatttttcattttctaatcaaaggggtcagcgtaaatgggtgttggcagttgacggctgcagctgtctgatgtgtcaactccttgccacacagagtttctaataaatggtgctggaaaaataattcacccctcagctttctgtcacagcggctatggtgggagatccttgggtggccgctttcctgtcccacttatttgtgcaagaggtggggagtgtgtacatgtagacacagttacatccatgcataaacactcatgcacaggaatgggatggaggagccctgcattactgtggtcgtgtttttagtactcaaccctgaaaaccaaggagagtgggtggggagggacaccagcatctgctaatacttaacgcgagcatggaagccactaaaagatgtggaggagggcagctcttgaagctgctggtggccctctgtcctcatgcacaggtgataagaatgacaggggtccagcacctggtcaggccagggcagggcatgcttaactggaagtccacatgggtcgcagaaggcagggagacacaaaatgctgtggctgcagcatccagagaagcccatccatcttaacctcagatccaagctgaggggctatcaagaaaggaaaggattgtaaaatagctcattctttgctcacagaacctcagcacacaaagagagaaccaagtactcaaactagagaaagtatcatgaacacggtaaagaaatactcccaaagaaggagaagggcctgagttaatctttcagaacttcttggaagaagtaaccctacctagcaatgctgggaagaaacactatacttgcagtcaacttgaaattagtacagtagtccccccttatccatggttttagttacccagggtcaactgtagtccaaaaatattaagtgaaaaattccagaaacaaacaatttataagttttaaattgcataacattctgagtagcaagatgaaatctcatgcttcattgttcagtcccatccaggatgggaatcatcccttggtctgggagattcacactgtaagccctgcctacctaccctgagtcacttaatagccatctcagtgatcagatggactgtggcggcgtcttagtgcctgtgttcaaggaacccttatgttacttaagaatggccccaaagtgcaagaagagtgacgggctggcatattattacaattatctattttattattattgttcttaatctcttgctgtgtctaatttgtaagtcatacttgatcctaggtatgtatgtataggaaaaaacacggtatatgtatcctttggtaccatccaaggtttcagacatccactgggggtcttggaactcatccctaggaatggataaggaagaattgatgtacataatagaaccatagactaagtcccctgatataagaaagtaaaatctcaatgtcttggctatagtgagaaaaagttctcaccagttccttaggaagaactagacaaaacctaccacacataatctaaatttattgcatatatttagggtaaaaataatacatagtaaatacatctaattctatcttatggatttagttattctcaatttatcccttttgtcttcataaagttctgacttgcttgacagatatctgaattgaaccccatatagcccctagcacaatagagaacatggggcctaggggccaggcatggaagcagatttatggaagctgactcatattttacttatgtctcggtatgctccaggttaaaacagcacattattcacagatatctacatgccaacacagtaaagactcagcaacaatcctataatgcctggttggtctagttgatatcatgctctgttatggccccaccacccttaagtagaataaacacacacattctgtaattcagcttaacatgtgtaagacttctttttaaagaatcagttggagggaacactgaatatcactgagttcaaatgcttccttttactgatgaagaacctgaggcccaaacaagtaaattaattagcttgcctacggccacccagccagttagttttaagagggcccagtggtcctggctaccagtccacctctccttccttaggtttcactaccttgtgaagttaaaggaaaccaataaattacattttcgtatgtaattatgaatgacttattagatacaaagatacgttatctttaatgcatacaatctttacaatatttaaatcagttatctttttcttatgatttttgacaagatgaactaagtctaaatgaaaataagaaacaacaatgcctagtctttagtgagtctggttattggttactccagaatatgtggctggctgacatatggcctggtcaaaatcacccttaacaactagccagaaaggaaccttcagatcccaatgccaaattcacacatgcacataggactccttgatattcaaactccagttgggaaagctattttattgacatcgccaaaggagccaaaactgtctcacaaatgtacgacctgcatatattcaaccgcataagaacattcaacagaatacatcagcttagcattgacaacttaccacattcacctagtctgttggcagactagacatattcatggcagttatcgcattaatgggatctagacattcttaatcacaatgtctgtaatatttcattttaatagtacctgccagcagataaaaaaaatctacatttcatttcatttatcctgtacatttctctcacatcttgcattactttctattcaggtggctctggctcaagaatatgcaatgcaggtgcctacagtaatttaatagctctatcatctgcatggcaaattcatgggggtaagatgtgtatgccacagaaataaagttacctttttatctaagcacctacttaaaaaatttttctgtttaaacagtatttcagaagtaatctggcattgcccttaattgaaaatacaaatttccacaccttaagagatcccaagaactgcctcaagctgaggcgttagctctgaccctcattgcatccctgcctggggagggcagggcaagcgagcagctggacaggaggtcttcaagaaaaccaggaagaggataatagtgcaccaatggctccttattcccttctcagttattccctaccatggccatcttactatctgcacctcaagcccctcacttcccttccttacttcctccatctttcctttgatttaatatatttctctccccctcctacttttccttctagttttgatactgtccacctttacctacatagagtgaaactattatatttagacactatgaaggtatcttgaacaaaatgtcaaattacatctgctctgctgctcttacatatgaggatggatatggctctgatcacaatggatgatttattccatcttctatgaactagtcttctgatcaacagtatgaacttgtaaaataaacaagtggggataaagacagcatctatggtcttagaaaagcatccccagtcccaactcctatacaaagctttaaagtgaaaacgtgagatcttcattagctctatgtcaccaactgtattagtctgttctcatattgctataaagaagtacctgggactgggtaatttatttaaaaaaaaaaaggtttaatcagctcatgtttctgcaagctgtacaggaagcatagtggcttctgcttctagggagggcctcaggaagcttccaatcatggcagaaggtgaagggggagcaggtatctcacacagtccgaacaagagcataagagagacagggggaggtgtcacacattttgaaatgaccagacctcgggggaactcacttgctatcacaaggacataccaaaggggatggtgcgaagccatttaagaaaaccgcccccattatctaatcacctcacaccaggccccacctccaacactggggattacatttcaatatgagatttaggtagggacacacatccaaaccgtatcaccaacccaggaccctaaagttccagtctttaggaattcatgtggtgcagctccacatgaaggaagaaataactgccattgtgaatcttgaagatgctgctgtaagaagtattgttatatctttaaaaaaaaaatccaaaccgataatccagtctagaactgtactatccaataagggaactactagccacacatggcaacacaaagtcattaacattaaataagatttagaactcagctcctcagttatgccagccccatttcaatggctcattagctccatgtgactagtggctaccgtatcaagagcaaagatgaacactgcagaaatttcgattgggcacagctgatctaaagagacaggagggccctattacaaaccagcaataagaaaatgcctttcttggcaatttgactatagtagcgaattctgtctctaattcttgaggcaagtgggcatacctgccctaaagccagcaattttcaactgtgctccatggagtcccttagtggctggtgcaggtagaaaggacaggaaagggaaaggcagacagagcaggctcagggctgcatacatccctcttcaaccagcacctctgcttccatagagttgtatgtatcacttgactccaagctcctgagaaacattatatattcactttggagttttaattgctataaattatcatgcatggggaaaaaaattggagagacgtgggatctaccaccacatcactggagacggccctaaaatccatcagattgtttccggtataaaatcatgttttccaacctcacatgggccttctgtgcaactctgcaattcccccatgcacctcttactgactcagtgtattactcaaagaaccattacctgcctctttatgtaatcccatgtccaattccatcatggttactctctgcaaaaactctacttcttaattacctgggacaaatgaggcgacctgatatgacctccttgaagtcttttcttctctgtccaaaatttctcagcactcatcccttatgcctttgtttctgtcttcatggctgtacctccacttgtatattaaatagcattccctcctatttgccccaggaattgctccatctactattctcacttgctttcatcttcaatctctccctggttactggatctttctcctcagagcataagcattcttatgtgcttaaaaaaaagagcaaacacataacaaaccaacttctcctgctacggttctttcccttttcctcaccaaacttctcaacagtagtagacactctccacctttaccttccttacccccttgtaacctgatttctgccttcatacattttgttaaactcacttcaaagctaccagtgacatcttaatgacagtctgcagacccattctcctcaatatcaaaacatctcagccccacagcacagatggcttgaccagccatctctttccaggaacctctctccctcagctttggtgatgctggtcgtgtctgacactcctctgcctcgctgaccaagccttctccggctgtctcctatctcctgcccctgcaacctagacagatactccctacacaatgtgtcagcttccctcttcccatttcattctgcatgcactccctcaatgatgtcagtcacaattccaaacatcacttattttccatggctgttctccttattttcagcccaaatctgctggatgtagttataggaagggaagtatgctgctgtggatgtacttataggaatggatgtatgatgtagttataggatggatgtctgctggatgtagttataggaatgcttctcaacatgaccaaacccaaactcatcaaagcctcacaaataagcttctcttcctgtacacagtgtggaatggcactttcttactttatcattcccactgtaaccccctagtttgggctcccattaactctctcctgctaattgctgcctgttacaggagcccaaaaaaccctctgacataaccatataaattattttatttctccttgcaaaaaaaaaaatatatcaatctcttcgctctgtctactgcctttggaaaaataccacaagggtttttgcgaaccttcccagaagatggcctatgcatgttacaacaatgcaagaaagcacatactgttggcaaagttcccatgagaagcaagattcatctagaagctatgtttgcttgctttttgatattctcactctgccatagtctcaagtgaaattagagttgtgacaaaatgtgacctctgacctagagtttctgctaagataaaagcaacaaaatgtatgaaaatgtttcctcctcctcttcctttccacctccttgcatctcctcatctttgttctggtactggactaataatccaagatgctcggcattagagagagggtaagagcaagaaaataactcccaagcatctcatagctctgcattttacagaaaaaagcaaggcagtaaaacctttgcactgttctctgttattgttctaaaatttttatcttattaagacagagaaaaaataacagaagtaaagtctggcccagagggaaagcatcattaattttggaagaaccaagatgtctcatgcccagtttcccttctccaaactactttattcaccattatcatattaattttccttgaacacaattctactattccttacttaagaccataagtggttccattttttatacagaataaagtcatagaataccagctcttgagagcccaaattggtcaattcatttaatccaatccctctgaactttatgataaaaatcttagtccagcgaggttaactgactttcccaaagatcattccattattgaaaatgctgggtttatgcatattatacatgctaatatgtcatatttcttttctaaaatacgatttccatagctccaggtatcttttcttcattaaacatattgaatgggctagaacatcctagaatatggcacttataaactttataaacctctagagaaacaatatgatttctaagttagatccagatatctgagttaaggtggataaactaggagttactgaagcaatcaagaaaatattttcacttaaaggcaatgctcaaaaacactcagaaaaaaaaatgttctcctttgtaaatgtgtgggaaggaagcaaagaaaagaggaaagagaaagaactgaatgtgtgggaataattgggaagattaacagcaagattcactaaaaatgattccattttttttcttgtaaagaatactttaaatttcataattacagattccagggaactagatacttaaatccattagtgacatttgtttgacttccgcatttccagaggaaatcagaagcttattttagtttttgttctcactcttctctttttcacccacccaaattgggttgagatgtttgacaaagtaagccctagtacaatggaaattaggctctagcaaaatgagaagctgtgcaaagccctttaagtactgtgaaatcaaatgttcccattcttccaacagatattgaaaaggcacagaaataaaatcagatccaactctcactttctattttgagcagagggtttaaatgccatcagcttagattaatgtattagtcacctcgcataagtatgtttcatttacagggaagccaagtgaatatattaactaaaatgataatgtgctgaaggcacgccatagcctttttaaataaagaaatcatgattttccttgtctgtattttgtaaatgtccaaaccaccacaagtttacaactcaaaagaaagagattgccatgaaaatcaaatgatcaacctccactttcatgtctcaaaaacgatatgtttttagcttaacactcactcagaaggttattcaccatatatgtgtgaggttgttataaaaattcaaaactagaatatatgtcgtctgcctgactcagatgtcagcagaagcactttctttactccatcacagatacattaatccatcatggtcatcttttaactgagtttctgaatccttacacacatggccaatggatggaaatgcccacagaaacatcattattattgggcaaatctcctttctaagtactttgcagatattaattccatctgatgctcccatcgaccctattgatggtttaacttattttaatcattattaatattattattattttacaatgaggaaacagagaaaaattaagcaacttgcccaaagtcacaaagctagcaaactgcagaggtgggatgtgagcccaggcaatgtatctccagagtctgtactcttcaccactactgtgtcatctcatcagtatggggaggtattggttaaagggttcaaagtttcaggtattcaggaggagtaagttctggagatctaatatacagcatggggttgattattaataacactatattgtatacttgaaatttgcaaagaagatagatcttaaatgttcttaccacacatacacacacacacatatacacagaagaggtaactatgtgaggtgatggatatgttaattaacttgattgtagtaatcatttcacaatgcatatgtatatcaaaacatcataatgtaaatatacacaatctttatttgtctgttatacttcaaaaaggttagaagaagaacggttgtctaagagctttctagggaccactaaatgtaaaaataaaataaaacaaaaaataaataaaaactaatacagagagaaggtggggttttaaccttctatggaaatgttcaaacatacacaacaagtgaagtagtacaatgaatcttcatggttccatcatccagcttcaaatattttcaaatatttgtcaatcttttttcacctatcttctcccacctctagttgtttttcctcccctttggtggagtattttataagcaaattcagaaggttgtcaattacctaaaaccaatgtggaagaattccatctgaagacataatgcagtagtgctgagccagcctggagaggacctgcagggcatgaggtctttcttcacctcactcaggatgcatggatacttcccccttcctgtgcctcctccctcccctgcccaccaaatgctgtgtggtcttcaatcatagccatgctaacatttccctgcatggctttatgtgcataatcctgtctccccattccctgcaagtgtgagtgaggactcacccttgtccaggtcatggcagccctggcgctgagcttatgcttaccacatagaatatgctgaaagaatgtagaatcgggaaagggtaagcagataatctaatcttcataaaacaagccagccaagaacactgaagcagttcaactagacattatttgtactataaataaaaatgttccccaaaccttcagtttatcttataaccagaaatggtcaacatccttaaaaataaaacaaaacatgcttgcaatctaatcctatctctgggtgcaactcatcattgtctgagtgcttctgaagagaatgaacaaagacatcattaagagtaacatcaaacaggcaatagcttctctgaagtctgacctcacaagccacctttggctgctttttccatgaataaaaaatgactctctcattgccgatgaacatgagatgggttaatggctgtttctgtaagttattaataacatttcttgtcaaccctgatcttatttaaaatgcatgtcagacgtagaaaatcaaatgtgttatgtatgtaaatgtattttatagtattcatcagtgtaaaccctaaagttaacattgcaaaaagctttcatattaaccctcattttcattgattaaccttccaaaaggctagcagttttccacttcagataattatccccagaacccaaatcctattcaataattaaaagaacatttacttattttatatattaaaacaagaaataaaactctagaatttaataagaatatctatacttgatcttagccaaaaggctgagaagtgattaatgagaatatctaacctcctcaaaacgagacatctaagtttggaaactttgaaattctctcacgaatagcctcaaaggtagggttttagcccaattctttaaaaacaattaagtatatccaaggagatatataggttactggatacttgtgagactactaagtcagtctttatgatgtttatctctgaatatatttagagttcaaagggttttctactctttggcttatgtaaattatctctatgtataccacagtcaataaaaataacattttagaggtcctagaagaatgtgagagccataattatgagcttcatcaactatgaaaatccatgcataaagtaaaaatatgttcccaatacaaaatactctcaaagatacctaagttactctcaaaaatctttttccatacccttacataagagaaaaagtttctattgggagataacttcccttaaaattctactattgtaaaggacagtgtcctttagtgtgagagatactaaaattattaagaggcatagcccccaccccctaagagcttatagtctgtaggggagagaggacataaaaacaaataactacaagaactagtaggtaataaaagtgatacaagccaagagccctaggggtttccaggaacaaaaaaatcacattgagggatttttagaggaagtaaaatttgaaatgtacctaaaagtgatagaatctgcagagagagatggcaggtggtgcgggtagggatagaaggccgggggaggtgtattccagagatgaatggtttaaatcaaaaccaaaaggcaggaaagcacaaagccctcatagaaaaatgtgagcaacacatttttgttactcacatttggctagttgggagtatatgtcaggatggtatgcagggaaggtgggagggccaggtcatggaagacctgggaagtctgacaggtgaagcaggcataggggcaccatgcagcaattgaaacggggtcaaagggaaaattaccaaggaccatgtgcttgtggattagaaagcactgccacagttttaacagagatgaggagagagaagaatgaggatgtggtaagtgccagagagaaagaattcaccagaaatgatgagtgaacagaaaagaaggcaaaaagcagccatgacatggccaggcacggtggctcatgcctgtaatcccagcactttgggaggccgaggcaggtggatcacaaggtcaggagttcaagaccagcctggccaagatggtgaaaccccatctactaaaaatacaaaaactagctaggtgtggtagcacatgcctgtatttccaactactcaggaggctgaggcagagaattgcttaagcccaagagacagaggctgcagtgagacgagatcatgccactgcactccaggtaacagagcaagactccgtctccaaaaaatcagcaggcatgacataatgctgattttgaaattcccaacctgggttgccaggtgatcacagatatcattaaaagatagagcaacttccagagaaggttttggtttgtactaaaaaacgaagaatttgttttctgaaaaagtgttcagtttgcagtgagctgggccatcgggttagagatacttgatggctcatttgaaatgcaggtgagtagttctagagggacatcggagctagagatacagatatgagcattgtgtccaaactgttaagggctgaaactgtagatcagatgacaaggtgaagactaggagacctgaacagacacattctgagaacaaatcttggggagctcaaatatgtaggcttagcacccaggagacaaacagcgccacgatgaagtggcaggctgcaccaggaatggcaactcctcagattcaggaagttttctgaatgcaccaacagcaccgctcccctaccaaagatctcctagagttcatctccaccttccaaaaggctgtctggcttacaatcccttctgagaaacaacctgatatcctcatcagaaattaaccctccacttcatgacacttttcaggctccgaaaacatacatcctttgccaggattatttatgcgaacgtcagcctctctgcccacctccccagctgtatccctacttccctatcatctgaatacttctgtgcaccaggaaaaaaagaaaaaaacaggagaaaaacttctaattttttttttacttgttttttaaattctttgccccatgatttctgttcttaggttatcccatggagaaaacatggcagtatttgaaaagagaggaagaagaggagaaactggaaaggaaagctgcaaatatcatattcttcatgtacttctttgatagctattttctgtttcttgggcacccagtaaatgaagtgctattcagaatacataatgacataggatcttccacataaattattctatccttgggcgatatgatctattttcattaatgattaatttatgaaacctaagtcatcctattttccctccgcacatgttcctaaagattttgactttaagtcgcatctgcctacccacttggaaaatcaagtctatacctaattactgattaatgtgataacgaagtacaggttgagtatcccttatccaaaattcttgggaccagaattgttttgaactttggaatttttcagatcttggaatatttttattataccagttgagcaactcaaaccccaaaatccaaaatccaaaatgctccagtgactatttcccatgggcatcgtgtcagtgttcaaaataattttgggttttggagcatttcgaatttcagattttctgatttgggatgcacaacctatacacattaggtaatagtatgtttccgacactaaattctatagtacggtcattatttttatcagtaagtttctatcacctaaagtatatttgggatctttttttcatctctgaacattataaaagaactaaggagccacatcctgggtcagaccgatatgttaagtttacgcttaatttctaagttagaaaattacgttccctctttcaatgtaaatatttttttgaaaagctatgggtcactaatttgaggctctaaatgggccaaccttgtaatcttcatgtgacgaactggtaagggaatgaagggagctgcctagggctatcctggaggcacgatacacatgcaggtgctgtgtgagtccacaggaactgtggctacttgttgaagattacaaggaggcaatctgaactcatagagagcacttcctaaggagagcctcagaggtggcttctgcgtaaagcggaaccctctctagctcttaagagcattcccgcaggggctggctgacaacctgggaagcctgaggggcctctcaagtcagctctgactctaagatttgctttactaatagaaagaaaatatattcaaatcatgcatatatcttccctgtatatggcagctttaagaaggaaatagagtagaaagaacaccagcccaggacccagggcaagtcaacctgatctcagtttgctcagctgtaaaatgggtggtaaactggatggtaagataccttcaagttctgaggacctatgaacataattcatttccctgtgcctgtcttgtttgccacaaccttgtggaaaaggtaaaaagacatagaagagcacctgacttagaaagcctctgctcaatggggttgggctaatggcctgaagcctgagcccagggtggatgcggactctatgtggaacagctgagaccccaaatggtcctgccatctcatgtccagggggatgcatggggctcccgtttccacattcatcatcacttgcccctcaggacccagggaaacagcaaggaagagtctcagtagagccaggctagcctaggaaacactcataaattcataatgagtcacttaaaagtgtcccaatatagcatgccacagtcagtgtggacattgtttagactgttaatatgcacaaacatctaaaaatatgaattatactttgcaaataccatatgcaccacataacgatgcttcagtcaacaacagaacacatataggacagtggtcctgtaagattataaatgagctgaaaagttcctattgcctagtgacgtcttagccaccgtaatgtcatagcacaacacattactcacgtttgtggtgttgctggtgtaaaccaggcctccaggatagccctggtttatcacataaaagtgtacaatgatgtcctagaccttcatattcattcacaactcattctctgactcaccaagagcaccttccactcctgcaagcttcattcgtgcttacgtaccctatacaggaacagcatttttagtttttaaaccatagctttactatacttcttctatgtttagatattgttacatataccaatacgcactattgtgttataattgccgacagtatttagtacagtaaatgctctataggtttgcagcctaggagccaaggctataccatattgcctaggtgtgtagtaggctatgtcatctaggtttgtgcaagtacactctatgatgtttgcgccacgatgacactgcctaacaacatacttctcagaacatatccccgtcattaagcaatgtgtgactatagattcttatcatgctcatgtttcagattttgaaacatctactctgcatgacataatccctaattacagcagtattccttaaatgaatcctatgtgaaaataatgtctgcaaaaagaccagctttccaagaagaagaaaaaaggaccgattctgataccacattggctgtttccatgagctgaaccagcaaagctttgctccagcaaagctttccacacaccatctctgtaaactcaagaaagaacagagaatgaacaagcttggagaagaaagctttgttggaaagatatataccatatgagaagttgatctaaggacttttagctctctcaagagcttcatattttatttattccctgtcatcaaagcatcatctcttcgctaaagaacagaaacaaaatatttattgacattacatctaataacaagtataggtataatgattagtagtacttagacaaatcaaattcatggggggtttttctgtgatttattggtgaagtaaaaattacatatatagtaggtagcagataattaaaaatcaattctaacatatgtttcttaaaatagaaaacaattctggatagacattcatataaaagtgtgacttttagtatgaagtctttaaactgggagttattttctctggcacatacagctcttatcccctgggtgctcaggggtccctctctagtatcctctgaagcagaggtgagaagaaatgtcctaagcgcacctgcaattattctgtccagacctgtcagctctctgtcagcaaaagctgctgtcatgtggacatggctcatcttgccttgaggttaattttttttaagacatcaaaatcttaactcctttgttggaaagatatatatcatatgataagtttttccttcatactactttctctaaaaaagaaacacgtcatcaggaattttattaataaaaatgatgataaatagttgctcctgtattttcaaatcatcagactgctaatatgcacatgcatatctcaaaacatgaattacacatttgcaaacagttctttattacattcatgtttcagattttgagacccctactgtgtaatgatgtaatcactaattacagtgatattccttaaatgtatcctgtgtgaaagcaggcctcagctacggcaccttcaggaaaccaacagagcaaataaaacacccttagaaactgcttacaaacacatcaagacaaagggaaatgtaatgtattacttttataaataactaggtagaccaaaatttagaactacgcaaatgttccacacatcatctctgtaaacacaagaaagaacagagaataaacaagcttggacaagaaattgacaaaataacaaatcaatcgatctctctctctctctttcgaattattccagcttgattcaacttctataaccccttcaaaacagctctctacgtggaaacctctaagactttcctgggcccctggcaaggtcttgaaaacaacatctgagatgtcatggtttcccatccaataacattgactttgaagtggtgactgagatggggtttggtcatcaaaggcacagctgaatgggcaacctccagatcttcctcagggacagcagctgttgtaacatgctctgcaggttattcattcatactttaaaatgcagtctacaataccagtctcaggaaatgggcctgcaacagcaccatctcagctaatggagatcttcctgggcatggacttgaagaagcttggcagtgctttgctacttttaacatcatttatttaactttcagaaatccagtcaagtgctctggcagtgtgaaggcattactggtaatcacaggcgactaaatgattctttcagctaatattaaatatctagtatgtttcatgacagcacaatgtaggtaacacctttcttggatctttctttgacttcttacctagaatctgcaaagcaaagggctgctggaatctgtctctggataagtcattttctacatcctaagaggtggttacaatctttttttcctggcacactaactccccataactgatggtgtcaaatgggctatttttcttcagtagatgaataacacaacaatgggaagctaagggaggtgatgcaaattcttaaataatcatgcaaagaaaatgacacacagttacacaggcgcgccggttttaattcagtgaaggcaccccaccctgccccaccccacttacgggtggctggccggccctgctctggctgtgcactgtccccggactgggtgctggagactgaggagacgctggagctccggacaaagccaaatgccgccagtttggctgccgggagacgtgagtatccgggaggacggagaccagatttcgggagattggattttgcagcatttgaactggaagctttctttaaatctgctaaaacgaacccaaataaaattaaaaaattattctcagttcataatgagataatgaattctacagattatgaattcgaacccagttctatcataaacagactaaaattaatcttgcaaggtttgattcaacacatctaaaatggaccttggaagagaaaggccccttatattgtgggtcaggtgcctcagagaactcagagaggaggtggtgcagccccagcctggacaaatttaccgtctacttaggcagatgaattgaggaagacaaataactctattttaaggctataagaaaaggtatcaagtgcttaagacaatgagtgaaagcgaatagttattgttgcatgttaccccagattcgtgaaattgagatacaccttaaattttgacatacaatgggcaaagaaccattggggtgaacattcactagtaattttaagcagtttgtaataagtcttatgaaaaatatgtacaaagaatcatctaaccttctgttgggtgcaggaatgaggaggagatagtgcagactgtggaactagccaggctggaatatcagctctcccaatgacgagctgtgtaacctcaagcccttgtcctaacacttaaagccacagtttcctttcatgtgaagactgggaatgataacactgactttgcaaatctagtataaatattactgcttataccacaagaacttgatatgtgctcaaactgatgttagatttcttttctcctttttacactatctgttatgttagtccaaacttcagaattagttcccagatatgtgcaaagtcagcttgttttgaaataataaaacatcaagttataaatctagcatctcagcatccccatactctaagtctgagccaggctccagcaatagcaactgcaatgattatcacaacactatgagaaggcgctcagcaccagagagaatcacaatattgtcaatatacaaatgctctttaataggaaatctaaaaggcccaagcttcctcacgtgctgtagtgctgtataactgtcctcattgattcctttaacaacgttcaccagcaggcatatttaccatgagtgcctatatactgcccattcagtggcattcttatgctagtcaagtcttcattatccagtaaaatattaaccaggtttcagagtaaacgaggatttagattaaatgacccatttgaaaaaaaaattccacgtctataaatccatgaagaaaccacatattagaaagcatctatgtgtgggaataagagagcagcaataaatgatacactgggtctaaatggtacatagaaaagtacctcttcctctgccagcagctcccccgaaagtgaggctatggagagccgtgtgtccagtaaaggcagaagctgcacagctgtgggttcctgatgcctgagtcaggactaggatggggaggaaccgagtaagtgcaaaaggaaaaagaagcaaagagctggggctgcaaatattcccaactcaagcctgtcctagtgcttgggaaaagcacaaaaaacaaaaaacaaaacctcaactatgaaaaagaagaaacaatacactaacaagtggtaatggcccgtttgtatcagcaatttatgccacgtttaatgacttcacattgttgttctcacattattttgaatacttttagttcatatccccagaacagtgaaaatatccctatatatcagatatcatgttcacagtgaatttacgacaaattgattgtggacgatgtctgtagaacaggaaaagagttgctaaacatcagatgtaatttcaacaataagtatactctaaatccattacactttgatactattttaagttatctatcacctcctttctaacctagttaatcaataattatgcaaaatcgagtgaggagaatatgaacaaaataatttttctgaaaaacaaactatattttggaagaaaagttaaactcagaatttttaacagagtacctaggcatgcagtaagcatttactacttagtcaagaatgaaaactaagtttgttaaatcattatataagacaagccactgaacatgttcaaaaagaaatttatcttattctgcacttacttatattccattattgttgatttcatcagtagaaaagtagcactggaacatgtagagacggggaggacaagcagcacaagatcccaagcacacaggaagccagtctctaaattgttttctaggtttccctttcccatagtccagatctttattttaataaagacacacatgggctgtgtgtttgtgtgtgtgtgcatgcacgcacatgtgtgtgtgtgtgtgtgtgtttagatgacttgcaaaagtataccttgccccaactctctgcgcatacaatttttgtaaatctaatggtacctatatcatacactaagttactatataatggtctttccttctagcagattaagctcatgaatatcatacacgccttcagggtttgcagaagcaagtcttattccttttataccaccagctcctagcacaatggtttccacaatgtatttgataaatatttagttgaagtttacattagccaagcttgtaccacacaaatttagcccacagtataagtcaaatatctcaactagtctctgcatgagagttggtctggagtagagctcaagagtctgctttttaaacaatcacgtcagtgattctgattcaggtggtccctggatctttgaaaacttcaacagaatacgccaactcaccctgtgaaataactgcattcagctcttctgactgaatgtatcttaatttaatcttagtgtctcataagaaagacatatttataaaaatatatagtacttactatttctcaaacaagtccagtgttatggatggactgaatgtctgtctcccccaaccccaaaatcacaggtttaaatcctaacttccaatgtgatgatattcagaggtgggacctttaggaggtaattaggttataagaatggagcccttgtgaatgggattagtgcctaagtgcccatatgaaaagaagctggaaacagagctccctctgtttccaccatgtgaagatataatgagaagatggtggtctgcaaccctgatctcagaccttcagccacaagaactgtgagaaatacatttctgtttttatacgctacactgtctatggtactttgttatacggctggaactaagacatttagcatgttagaggaatatatgtttccaagtacttagtgttcttggactattcaagaatatagactttgacagaaatacaaatgttacaagtgcataataagccttcaataaacaaatgatagctataaatattacaggaaagctgaggtggcacataaaaaagacaacttccaaaatggtgacatgaggctttccatggacactcttcccagtgaaacaaacataactggtaaaataacatttaaaataacaaccaccatttaaagtttccagaaattgttctatgaacatgtagcacttaaagaaacatttatataagaaactctactaaatccagtaagaacagtgaaagtcagtggcacttgaaccacaatccactctcttcctcccctactatcatcacaatatatgaaagctctactctggatgtgtgtggccaaaaggatgggtttcctctcctagagtcaaggactatagtatcttcctgggatgggcaggccaccaccaattctcactccaaccccacccccagttccatgttgtagaggctgaattacatgagagagtggtcaaaaggtcagggaaccttccttcacttggcccaaacatataagacagaggtactaccccaggcacagcaagccaaacaatactggggccccaatcaccatttcccaatcacctatggctcaccataggctagaagttcaacacttgagagaaaaagggagaagactagaagctactgtccctacctcgcacctcgcttataaaccaggagtgtcaatccaagagaagcagtccactgtccccaaccccagcttcagaatggtgactgagagattttgcccaatcatagaggcaggccataagaacagagatctccagagtcctctacaaaggaattaactttgtttggaacaaactgtgagggaagtttgggcctaacggcaatctcaaaaacaataaagattttgatggtaagcaattaggaggaggctggtagctccatgaagcaaaataataaaccatagacaaggtagtttattagagagagccaaggaaataactgaaaagagctatccaggggtcagaactaacctcaaagagtggctttaaaaactacccttgaaaaggagcttgaatttaactggatcagactgtggaataatgtatgccccaggacactgtagaaaattatagagcaatcagtcagtaattagtggaacctgacagctgaatgtgataccaaagggaggaagacaatgtaacacagatccgggagagacagccctgctaaaacattcttagtgtgattgtgtacatgcccaaggctatgtcttctgtggagcaacattagtgaattcacagtgcaagggaaataggcttcattaaagtagatcaaccaagttgttaaacaaataaataagcaaacaacaagccccagagaggaagagagataattagtagtcaaggatgctacataattatctaaaagtttcattacaacaaaaataaaatgagacacacaaaagaaaaaaatacagaaaagggtgattcagatactagaaaaaagcaggcaacagaaactgcctatgaaaagacccagcagtcaaaaacttcaaaagagctattataaatataataaaataactaaggaaactatgcttaaagaagtaaaggagctatgacgacaatatttcatcaaatagaaaataacaataaagagagaaattataaaaaccaaatggaaagtttagtgttaaaaaagcaaaataactaaaatgaaatattaactaaaggggctctacaacagatttgcagtggcaggaaaaaaaaagtgaacttgaagatagatcaatacatactacacaatccaaggaacacagcacaaagaaatgaagaaaaataagtggagcctcagagagatgtggaccatcattaagtgcaacatcatacagagaatggatgtttcagaagcagaaaaaaaatttacatagtccaaatctttgaaaatttatttaaattattaatgtatacatcagaagatcaaggaaaaccaaataaggtaaatgtaaagagatccacacctagatacaccatagtaagaagtgtagaaaggtaaagagaaaaacaactgtcaacccagaatgaagagggatagttcacaatgataaaaaggtcaatgcattaggaagatacaataattataaacgtatatacacctaacaacagatacccaaattacatcaagcaaaaatgaacagaattgacaggagaaataaacaattcaaaataatagttcgagacttcaatacctcactttcaataatagaacaatgaggcagaagataaacaagaaaatagaagatctgaacactaactaaacctaacagacctctataaaacattccacccaagagaagcagaatacatatttttctcaagtgcacatagaatattctccaggataaactatatcttaggccataaaacaagcattaataaattaaaaaggattgaaatgatataaagtatgttctgtggtcataacagaatgaaattaaaaatcaataacaaggaaatttgggtaattctcaaatatatgaacacacataaataaccactgggtcaaagataaaattgaaaggggaattagaaaatactaagatgaataaaaatgaatgacataccaaagcttacgggaagcagctaaagcaatgcttaaaaggaaaattataactgtaaatgcctacattaaaaaagaagatagatgtcaattcaataaagtaatttttgactttaaaacactgaagaaagaagagcaaactaaacttaaaccaaaagaagaaaagaaataataaagattacagtgaaaataaataaaacagagaatagaaaaacaggagagaaagccaatgaaaacaaaatcctagttctttgaattatcaataaatttgacaaacctttagctgagccagccaagaaaaacagaaggctcaaattactaaaattaggaatgaaagagggaacatcaccacttattttgcaggatcatatgggaatattgtactatgaacaactgcatctcaacaaattagacaacctagtgaaatggacaaattccacagaaatacaaactataaaagctgaatcaagaagaaatagaaactctgaaaatctaaaagagagattgaattagaaataaaaaaaaaaattcccacaaagaaaaatccaggcacagatgtcattagtgaattctatcaaacatttaaagaagaattaatatgaattattcacaaattacaccccccacccaaaaaaagaagagggaatacttctaaactcattctataagtccagtataatcttgatgctaaaaccagataaagacatctcaagaaaactataaatcaataactcttatagattcaaaatcctcaccaagatactgcgcactgaagctggcaacatatacaaaatattatataccatgatcaagtgatatttatgctaggaatgcaagatcggttttacatacataattaatccatgtactataccatattaataaagaaaaaccatatgatcttcttaattgattcagataaaccacatgataaaaacatttaaactggtaattaaagaaaatatattcaatcttataagggcttattggaaaaacctacagctaatacagtaaaagactgaatccttcccctctaagattaaaaacaagaaaaggttgtctgctctcacaatttctgtttaacattgtatggaaggtgctagccagagaaattaggcaagaaaataaaataagaaatgtacagattggaaacaaaaaggaaaactttctctttgcagatgacatgatcttatatatagaaaatcccaagaaatccactaaaaaactattataactaataaatgagtttagcaagtttacagaatacaattcaacatacagaaatcaactgtatttctacacattcacaataaatcatcaaaaaataaaattaagataacaatttgtatttacagtagaccaaaaggaataaaatacttaggaattatcataaacgatcagactccatagttttttgttttctgtttttttgagatggagtgttgctctgtcgccaggctggagagcagtggcatgatctcggctcactgcaacttccacctcctaggttcaagtgattctcctacctcagcctctcgaatagctgggattacaggcatgcaccaccacgcccagctaatttttgtatttttagtagagatggggtttcaccatgttggccaggatggtctcaatctcttgacctcgtgatctgcccgtcttagtctcccaaagtgctggaattacaggcatgagctacagcacccagccaatactccatagttttttgtttgtttgtttgttttcactttgactgctaacagcttttagcctcaatccccactcctttggccccatatcggggaaagctgttaagaaagcccaatgcaccctcttttgatgctaggaagtgggacaggagtgagggtggtaatttagatcaaaacctcacaaactccgtcccacttccatgagaacacttacacttgccccactccataatgataataaaaatcctgagccagcattctttccttgtgctctcaagccatttcaaatgtatgagaggccagtcctctcttcccagagacttcaattatgtaagtcataaaacttttcaaaccctcttgctttgtgtgtggaataattgatacatgatttttctgtcactttgccagccagagacctccatggccaatgacgtctctgcccagggcctcacttggccctgggcctgttgcagaaggtgccccatccactcgtctggcggggccatgcctggcttgtgcaccagcctggatcccatgctcagcctacaactgggccaggtgtgcccctggcccagctcgtacccgcattcagaggttccgaagttcttgtcccacatccaagatgaataaggttactctgacaatcgaagggtgaggtgggtgaagaagaattttattgagtgaaagaatagctctcagcagagaggggatgcgagggtggtccctacccaaagtcaagtggtcacccacccagcgtggctgggtctgggacttgtatgggcttagaatgggtgagtacatgctgattggtttgttagtatgcaaaaaaaaggctaaaacaaaggcaccatgtaaaggtgggcatgacagtgtaaaaaaacaattagggaagagtaggaatatgtaaaatgggtgaagggttagaatcaatcagaggaacgcacaccaaacagaaagagaggttctcagtccattccatgggtttgacttgtagcttggctttcaggctttaaattggctttggcttgaaggtgtggtttcactgggaacccaaccctatctgcctaggcatttgactgcctcctgctgctatcataatcactcttgacatctaaaccaaatttttggctgaggttcatcttacctcttcagggtggctacaacaacaggtgccggatcaggatgctgagacaatgaccacctccaccggggtctttcctcaggctttggcttgttaacaggctctgctgccttctagcaagcatgtactctgcactgttccttcttggcttcttgtgctttgagctgtgctgctctgtgctgcactgttgagtcctacagagcttctgttacagataatgctgaactaaattggaagattcaatgattaattgattttggaataagattatgagattggggtagggctttcttaagctggccctaggcatgtgtctcagtctggacctatctgtatttctaagaatgaagttgtgacttatgctaggctcaaggaaagattaccctgtgacaactggttatgtgtctcaactaggtattggctccagatctatagagcactaaggggaagactggatcatgtgaagatataagcctactgggcaaaagctcatgaaagagtggtcattaatggaaaaaaaggaaaaagaaacaaaggccataatgtggagtactgagatcggcattccttagaagcagacaactccacaggaccttaaatatcttagttgctgttgcctagacctctgtagccacaaaaatcctgaccctcaagcttatagagaaaaacacccatggcacccttgtggcacactgaagaggttaattcagactctacttgtattagtctgattgtgtcactataaataaatacctgagtgtgggtaatttacaaacaaaagagaaaggggcaggatggctgactagatgcagctgggggagcttctcccacctagagagacagaacctattgagtagactgccatattccaagcagatcttcagaaagaaggcatccagaatcaatagaggaaggatacagaccctggggctgatgaggaggaggttggaaccctgcacaaagttgctgagtaccagaagtcactgtgggtcccaagtggcaaccagagaaggggtgagtgagctaagaatagagtggactactctctccacagacctccaggatcctagctgcaggatactccacgaaacccacagatatatttgaattcatggggagaactgcctggagaggtgacagagacagaactccagtctgcatgggtcccaaagggtttggcatgggaatggctgcagtggagcacagccataggtgcccatccccaaagacttgttagaatcctctaagtggctttagccttcattagctaccagacctaaagagagcagggctctcctgcacagaacatgaccagttttgtatgggcatcccctgtctgctggcctctcctgcagtccctgcctacccatgcccacatgcagtacagccttaaatgccctgctgaaatgcttgctggcagccactgccatagttctttcaccaggagcccctgccttcccattggaacatttttgccaccagtgtgcaaccagctacagccttccttcactggcatgtgcttgcttgcagcctcccccagtcactccactggtgtgggctcgcctgcagccccctgactacagtgtactctcctgcagcccccacgaccccagcacagtgaactctcccacaggcactccactaccctaccagagcacttttgctggcagcccccatcagagtgttgttttccagagaactaggaacatctcggctcttccagcacaggagatgcctgacctcaaggggccagagaacaaaaccaaaagcctggtctcaggtccccagggttagagcatgcagcccaggagtactgactgagcctttgcccactgaaagcatccagaaacaaagtcagccaaacccaacttataccacagtcaaacctcaagggcatcaaagaacataaaagcaaaaagtttcacccaaaaaacagcaactttaaagattaaagtaatatcagcccatagagatgagaaagaaccagggcaagatttctggcaaccataaaagccagagtgtcttaagacatccaaatgaccacattagctccccagcaatgtttcttaaccagtttgaaatggctgaaattaacaacatagaatcaaaatatggatgtcaaggaagctcagtgagatacaggagaaggctgaaacctaattcaaagaaccagtaaaacaatctaacagttgaaagatgacatatccattttaagaaagaaccaaactgaacttccagaaatgaaaaattcactacaggaatttcataatgcaataggaaccactaataacagaatagaccaagctgaggaaagaatgtcagagcttgaacaccgctcctttgaatccatgcagacaaaaaaaagaatttaaaaatgaacaaaaccagcaagaaatataagattatctaaagagaccaaacctatgactcactggcattcctcagagagatgaagagaaagcaagcaacttggaaaacatatttgaggatatggtccacaaaaaattccctgaccttgctagagaggttgacatataaatccaaaacttcagaggacccctgtgaaatactagacaatatgacctttctcaaagcacatagtcatcagattctccaaggtcaatatgaaagaaaagaccttaaagttagctagaaataaggggcaggtcacatacaaaggaaactccatcagcttaacagtggacctttcagcagaaaccctacaagccaaaagagatcggggccctatatttagcatccttaaagaaaagaagttccaacaaagaatttcatacccagccaaactatgcttcataagcgaaggagaaataaaatccttttcagacaagcaaattctagggaaaattgttaccaccagatctgccttagaagaggccataaagggagggctaaatatggaaataaaaacctgatacctgctattgcaaaaacatacttaagtacatagcccactggcaatataaagtaactatgcaatcaagtctacataacaaccagctaacaacatgatgacaggaacaaaccacatatcaatattgaccttaaatgtaaatggattaaacatctcatctaaaagacagagtggcaaattggatagataagcaagacccaactgtgtgctgtcttcaagagatccatctcacatgcaatgacacccataaagtaaggagatggagaaaaatgtatgaaacaaacagaaaacaaaaagaacaggggttgctatttttatcttagaaaaaaatagactatgatttaataagcccactattatgagaaaggataaagaagggtattacataatcataaagggttcaatacaataagatgatttaactatgctgaatgtatatgaacccaatattgcagcaccaagattcattaaagacctataaagaaacttagataaccacacaataatagtgggagacttcaacacctaactgacattagaaatcaaggcagaacattaacgaagatatttgggacctatactcaacacttgaacaaatggacctaacaggcatctacagagcactccacacaacaatgtaagaatgtaccttattctcatctgcacatggcacatactctaagatcaaccacacactcaggcataaagcaattctcaacaaattcaaaaataccaaaatcctaccaaccaaccacactctgagatcacacaataaaattagaaatcaataccaagaagatcactctaaaccatataattacatgaaaattaaacaacttgctcttgaatgacttgggtaaaaaataaaaattaaagcacaaataaaaaagtctttgaaactaatgaaaacaaacatacaacataccagaatctctgggacacagctaaagcagcattaaggggaaagtttataggactaaacacctacaccagaaagttagaaaattcttttttttttttttttttttttttgagacggagtcttgctctgtcacccaggctggagtgcagtggcatgatctcagcccactgcaagctccgcctcccaggttcatgccattctcctgtctcagcctcccaagtagctgggactacaggcacccaccaccacgcctggctaatttttttgtgtttttagaaaagacagggtttcaccatgttagccaggatggtctcaatctcctgaccttgtgatccgcctgcctcagcctaccagagtgccgggattacaggcgtgagccactgcacctggccagaaaatgcttaaactaaccacctaacattatacccagaggaactggagaaatgagagcaaaacaaccccaaaaatcatggaaggactccttcctaactcatttcatgaggccagcatcaacagctaatgactatcaatgccatttttcacagaattagaaaaacgtattctaaaattccaaataccaaaacctgacagagacacatgaaaaaagaaaacttcaggccaatatccctgatgaacatagatgcaaaaatcttcaacaaaatactaggaaactgaatttagcagcacatcaaaaagctaatccaccacaatcaagtaggctttattcttgggatgtaaggttggttcaacatatgcaaaacagtaattgtgatcgaccacataaacagaactaacactacaaaccacataataatctcatagacacagcaaaagctttcaataaaattcaacatcctttcatgttaaaaacctctaacaaacaaggcatttaaggaacatatctcaaactaataagaaccatctatgacaaacccacagccaacatcatactgaatgggcaaaagctgaaagcattctcattaagaactggaacaagataaggatgtccactctcaccattcctattcaacatagtgctggaagtcctagccagagtaatcaggcaagagaaataaataaaggcatccaaataggaagagaggaagtcaaattatcccacttcactgatgatatgattctatacctagaaaaccctaaagactccttcagaaggctcctagaaatgataaacgtcctcagtaaattttcagaatacaaaattaatatataaaacccagtaccatatacaccaataacatttgagctaagaaccaaatcaagaacatgatagccacaaaaagaataaaatacctaggaatacagctaaccagggaggtgaaaaatctctacaaaaactgcaaaacattgctgaaagaaataatagatgacacaaagaaatggaaaaaattccatgctcttggatagaaacaatcaacattgttaaaatggccatagtgcccaaagcaattacagattcaatgttattcctatcaaactatcaatgccatttttcacagaactagaaaaacgtattctcaaattcatatggaaccaaaaaagagccccaatagccaaagcaatcctaagcaaaaagaacaaagctggaggcataacactattcaacttcaaactatactacaagaatatagtaaccaaaacatcatggtactggtacaaaaacaaacacacagaccagtggaacaggttaaagaagccagaaataaaaaccacacacctacaatcttgaagacttaaatgtaatacctataaaaaccctagaagaaatcctaggaaataccattctggacataggccttggcaaagatttcatgataaagtctccaaaagcaattgtaacaaaaagaagaaataaataagtaagatctaattaaagatcttctgcacagcaaaacaacctatcaatagcataaacagaaaacctacagaatgggagaaaatgttagcaaattatgtatgcaacaaagacctaatatccagaatctataaggaacttaaacaaatcaacaagcaagaaacaaacctcatttcaaaatgggcaaagaacatgaatagacacttctcaaaagaagacatacatgcggccaacaagcatatgaaaaaatgctcaacatcactaatcatcagagaaatgcaaatcaaaacctcaatgacataccatctcacaccagtcagaatggctcttttttaaaaatcagtaaataacagattttggcaaggctgaagatgaaagggaatgcttatactctgcaggtgggaatgtaaattagtttggctactatagaaagcagtttagcgaattctcaaagaacttagaactgattttgacctagcaatcccactgctgggtatacagccaaaggaaaaaaagtcattctaccaaaaagatacatgcatgcctatgttcatcatagcactattcacaatagtaaagacatgaaatcaacctaggtgcccaatgaatggtggactggataaagaaaatgtggtacatatacaccatggaatactacacagccacaaaaaaagaacaagatcatgtcctttgcaggaacatgggtggagctggaggccattaccctaagcaaattaacacagggacagaaagccaaattccacatgttctcatctgtaaatgggaactaaactttgagtacatatggacacaaaggtgggaacaatagacagtggggtctacttaagcagggagggtgacaaatgaatgagggtctaaaaactacctattgggtactatgcttactagctgggtgacaaaattatttgtacatcaaacttcagtgacatacaatttactcatgtaacaaacctcacatgtaccccctgaacttaaaataaaagttgaaaagtaaaataaataacagttactaaataaaagaaaaagaaaagaggtttacttttgctcatggttcttctagctgtatgagaaacatggtatcaccctctgcttctagtgagatgtcaggaagcttccactcatggtggaaggtaaagggaagcctgcatgtcacatggcaagaaagggagaaagagagaaagaagggagaggtcccagattcttttaaacaactgcatctccttgcatgaacgaactgagcaagaattcactcatcaccaaggggatggcactaagccatacatgagggatccacccacatgatccaacaccattagccccacctccaacattagggatcacattaacatgagatctggagggacacacatccaaaccatatcactagttaaacccagtgttcttaaaccctataaagtaacctctgaggtcaggcacagtagctcatgcctgtaatcccagcactttggaaggccaacggtgaggggggggggtggatcacctgaggtcaggagttcaagaccagcctggccaacatggtgaaaccccacctctactaaaaatacaaaaattacctgggtgtggtgtcatgcacctacagtcccagctcctagggaggctgaaacaggagaatcgcttgaacccaggaggcagaagttgcagtgagctgagattgcatcactgcactccagcctgggcgacagagcaaggttccatcaaaaaaggaaagaagaaaagaagggggggagaggggaggggaggggaaaggaaaaagagaaagagaccattgcatggaggagcccctaaccctgacaatactgatttgaacttctctggaggatggaacttataaatctaagcaaagtagagagaatgctcagtaacaacaacagttgttttgtttttttttttaaggagggtggagggaagaagaaagagatggagaaagcaaccagatatgagacaggaaacaaaaaagtgaaacagaggcccacagttggacccaatttgaaatccaaaatttactaaaagaatttatacaacgtaagatttaaaagggcactaactggcttttgtacttctgcaacataggttctgaattaactttaacacaatttgaatgcaccaacaggcaaatcttcatggccttaacactgaggctcaaactacatttattcctgggatctcattaaatttaaacaaattaccccctataattataatctataatatagatctaatttataagtctttcatttacagattaacatgctataatcttaggggagttactgaacaaaaaatagagggcacataagtatgtttcaccttaactgcaggaattattgtctaaattttccagtatcatagcattcattgtcctaaaatatcccatagtgagcatggacactctggcctaatgatcaatacatttaaatataattaagaatttgacatatacaaaattggcttggcaaaatgagaccccatggaccatacccctagtaaaaccagttagtatggctcaatgtaaatttaaacagaaacttacaagtactgaaatccatcacatgcctccattgttccttcatataagaactcaatttggcctgttcttaaatttggaatgaatgacactacacagtggattatgtaaccttaatgccatagtgctacccagtaaggcccccagacattatattattgaattgactgactccatctaatc

SEQ ID NO: 2571 - DNA, 337 bp, Homo sapiens
actgtatttctggaaatcacaatttaaagtggatcataacaggcaaaatcctaactgctacaaacaaagaaaaaaaaaatccaggaaaaaaaaaaggtcttggtgaggtgccgccatttcatccgtcctcggtttctgtgcctttcgcagagcttccagcagcgctacgttgggccagagcatccggaggttcacaacctctgtggtccgtaggagccactgtgaggagggccctgggaagaatttgccattttcagtggaaaacaagtggtcgttactagctaagatgtgtttgtactttggatctgcatttgctacaccctttcttgtaatatga

SEQ ID NO: 2572 - DNA, 1001 bp, Homo sapiens
tgaagtgaagcccgttccccaggcattccgattgggggagggaaggagggcactgaggggaaggctgggtgggtcccagccccctgagacgtgagcagcctccattctaaatgatgtggaagagccggcaacccagacacagctgctctgcaagcccatctgcccagctcagggctcaacctcaggacacgcccactcctcctggtccaaacgaggatggagcccctcgagcctgtgctcatgggcactgtctcactccatccgagcactgcttaaaacacactggataaatgcggatggctgtcagacgcttttaatgaggaaatattagaggaatattagaggaataatgaggaaatgatagaaaaatcagagactgtgtttttttaatctacagaatctattggcctagatttgccagacattcatttagaaacaataaaaataactgtaagggtgtctacatgacctgcagagcctaaaacatttcgtatctggtcttttacagaaaaatgttgccaaccctcgccctcccagccgccagaatttggattaaaagagactaaaacgatgtgacaatgaaatgcaatgtgtgagcctgtctcgaattggatcctagaccagaaaaaggacatttgaagggaaactggtgcaatttgaaagggacctgcagattagacaatagagtgcctcaagagggaaagtttcttatggtcatctcacaacaatcgttgtccctccaatagggaattccgccaaagtctgctccgcaaagcacgagcaaatgttcagggtctggagacagtagattgctccaggagaaatatgaaggagccaccgtgattccatatctgcctgggaactcttttaagctgctgaggtcagaagagatttgcaaagccctccaagagactttaccgaaagacatcgtgtgctgggggttaatgtttttcttcattagttgtgtttgtagcttcttgaaattattgtatatggactgg

SEQ ID NO: 2573 - DNA, 1924 bp, Homo sapiens
aactttttatttttatgtgagtattgtcaagtcctttaaaatacttaaacttttgggttatatcgtaatgtattaagtagtggctccccaaaagatccatatccaaatccttaaaacctgtggatgtggcgtgagccaccacacccagccgcttgttgcagtttttaaccaccaagtctgtggccatttgttacagcagccacaagaaactttaatgcagccagccttccatatccgtggatttcacagattgacaatatttgaaaaaaaaaaattaaaagataacacaaaatttaaaaagcaatacagtataacaactatttgcatagcatttacattgtattaggtattataagtaatctagagattatgtaaagtgtatgggaggatgtgtgtagattacatgcaaatactgccccattttatatcagggatttgaatatctgaggattttgatatccccagggggtcctggaagcaatactctgagcgcactgaggtatgactgtacatgtaagcttcagaaagttttgttgagtaacaattatgtgttaatgatgcaaatcattgaggagattgcttctgctttcaagaagcataggcaagcgtagagagtcagatacggggatggatcgttatagtacagtgtgaaaaaggtttgttaaggacggtatgtagagagagagagataacaaatgggaacatggaaagaatgccagcctttttctgaacaatgccagtattaagctgcagctaatatttgatctatcaattgaaagcatttatgtaaaataatctatttttaatacacctattaatatataaaaagaatgtaattaataacctaaagccttgaatttggtgaatttttaagctggagtatactacatgaaccagatatttcagtctgctctacaaataccaagagaactaaattataacatctaacctgctgtcagtctgcccgggcattttagtacctcttttcaaccctggctgtcagacttttctcttatgaaaatacatctctaatcttacaagggaatacactgaatagagacttgtcatactaatatttatcactagtatataaaaaatgatactagtagagtgctttatttttaagccttattgaggtataatttaaatactgtgaaattcacccatttttagtgcacagcattttagtttttaaaataaatttatagaagctaaaattgatctcacagaagtagacagtagaatagtagttattaatattagaggctgggaacgggtggggaacgaaggggatagagaaaggttggttacaaattttggatacaaaattacagttaggaggaataaattccaatattctatagaactatagactgactatagttaatagtaatttattatatattttcaaatagctagaagagaggattttcaatctacccaacacaaagaaaagataaatgtttgagatgatggatatgctaattatcctgatttgatcagcacacattgtatgtatttaaatatccctctgtacctcataaatatgtataattattatgtgtcaattttaaaaaacaagaactttgaacattttcaaaacttttacagctgatttgatcagtacacatcgtatgtatttaaatatccctctgtacctcataaatatttataattattatgtgtcaattaaagaaaacactttaaacattttcaaaacttttagagctgtgcaaaccttactacggttcactcttataatattctcacccctctaaaaagacccctgatgggcatttgcagtcagttttcactcctaatcccagccccaggcaatcactcatctgctttctgtttttgtagattcgccttttctagacattacatataaatataataataaaacgtgttattttgtgtcagg

SEQ ID NO: 2574 - DNA, 9529 bp, Homo sapiens
ttttttttaatctgctgtggaacaagttaaatgttgttggtgtttcttgtgccttaaaggtttggtggtagatttcacctgtgaaactgaacagtgctctagcttttgggggaatagttcttttttttttttttttgagatggggtctcgcactgtcgcccgggctggagtgcagtggcgcgatctcagctcactgcaacctccgcttcccaggttcatgtgattctcctgctgcagcctcccaagtagctgggattacaggcgcacaccaccacacctggctaattttttgtatttttagtaaaggcagggtttcactatgttggccagactgttctcaaactcctcacctagtgatccgcccgcctaggcctcccaaagtgctattacaggcaggcaccgtgcccggccaggggaatagttcttagtgatttattctattacttctaatgtaatcagtttcttttggaaccaggtttggtaacttatgtttcccatggaatttttctaatgtatttatatatgtagatgaacatagtacccttatatttaatttaatgttctctgtatcttattttgtgttcttcacattgatttctttgttctttcctacaggaacaggaaatatagtggtcattatgattagctatccaaaaggaagagaaattttggagctggtgcaaaaaggaattccagtaacgatgaccataggggttggcacccggcatgtacaggagttcatcagcggtcagtctgtggtgtttgtggccattgccttcatcaccatgatgattatctcgttagcctggctaatattttactatatacagcgtttcctatatactggctctcagattggaagtcagtgacagcaaagagaagggccgtcagagagccagtggcttcccaaggcaggccttttgagcgtccacttatttctgtcattgtggaaagttgactgttctgtcttgaggactaggaagaggcctttaccttttaggtacttgaatagatgagcatgtggtacccctatcctcagcttcttactttcttgacaatatttaagcataagaagtggttgcttcttcagacaaattaaaatcagtactcttggtgaaacacctcttaaagttacatatggctgttctgcatattaagatttgaatggcttttgttgttagggggcttttttatgaagttggtgcaaaagtaatcgcagttttgccattaaaagttattttcagtatagtcatttgactttgcctttcaaatgaaatgttttctgtatgcttatgtgtattatatttgtgacttttaagaaaaatagtgatttaatttaaatttttcaataactgtattaatattttcctacccaagagccatagaaaagaaactaagaaagttattggccagcttctacttcatactgtaaagcatggagaaaagggaattgatgttgatgctgaaaattgtgcagtgtgtattgaaaatttcaaagtaaaggatattattagaattctgccatgcaagtatgttctttttacatattgagatgttaaaaattacttgacaagttttaggtgtctgacaaaatagttatttgttttttatgataatgaagatcttgtaatttgtgatcatctcttctttttagaaaagcagcttggattttaaatataatatcttccctgccctttaagattgctttgcctaggagattcttaggtgacactaagactcgttaagtatctttgtcgtagattgacttttagtcttctaagcaaggctttatcagaatcctaggaattccattatacatttagcagtgcaaaaagtaagctgtgttgggagcaaggaaaatgagggaccagggagaagggcctgaaacagcctaagggaaataggttgaggagggcagtagtctgctgttatttgcaccctgggcttgcgttccttctgaggttgtttaaaatcaatattcctggctgggcactgtggctcacacctgtaatcccagcactttgggaggctgatgcaggtgttcaagactagcctggtcaacatggtgaaaccccgtctctactgaaaatacaaaaattagccgggtgtggtagcgtacacctgtaatcccagctactcaggtagctggggcaggagaattacttgaacccgggaggcacaggttacagtgagccgagattgcaccacctgcactccagcctaggtgacagagtgagactccgtctcaaaaaaaaaaaaaaaaaaaaaaaagtttttctttcctttattctggttatactaagggttttgttttagtagcaggaagttgcttgaaggaaggcagggcatggtggctcatgactgtaatcccagctactcaggaggctgaggcatgagaattgcttgaacctgggaggtagaggttgcagtgagctgagatcacgccactgcactccagcctgggtgacatggcaagactctgtctccaaaaaaagtaatgggatactttagttgataacttttttaaaagaattgctttgctaaaagggttcattttatgtacagaaattgtatgttttaagtctgatgaattttaattatacttcacacctactagaagcaagtcacaagtcagtatataattatattttgctttgtttgcagagtacgttagtatatatccaagtactttatagtagattgataattctgtgaaggaaatgaaggcgtgagtatcagggtaaccaaatgaaagtttcctgactaaaggtagctggtttaaacctacaaacatttacatgtgattggtatgatgggtactgaatgaattgggttggatcagtataagttgatcatgtcatgtagaaagttattaaagtagagaaaagagtttttactccagactggtttagggcaggtctttctgatttaaaaacagtgtccaggaagctgcacagatgagcagtactaggtcatgctggtggctgagctggagtttggacctgaccctcaaacacaggtgcatgtgcacatttcgtggtctccttactgggcttttgacttttcccttattttctcctgtgctttatttctgtaacaaatttcccaataaaaccaacatgttccttttatgtttttgtaaaaattatttcttaagtactgttttttttatttttttgagacagagtttcgttcttgttgcccagactggagtacaaggggtgtgatcttggctcactacaacctccatcttccgggttcaagcgattctcctgcctcagcctcctgagtagctgggattacaggtgtccaccaacacacccagctaatttttgtatttttagtgtagagcgggtttcaccatgttggctaggctggtctcgaactcctgacctcaggtgatccacccacctcggcctcccaaaatgttgggattacaggcgtgagccaccatgcccggccgcgagtactgttacttttaactccactagcagatttctgtttgtaaaaaagtcttcaaacaacagtaataataccaaacaattaccaagtatgctctgtgcctggcacagttgtatgcacattgcatgtgcccctctaaccctggtgtggggcagagtgtaggaacctagttcagagtcccagccattgagtcgcagagctcgtatctgagtccagcctgtctggctctgaaacccatactatactggtaactccttttcttcatcacttgcagaaaatagatctatcacacaggaggaaaagttagccaactgagacaaatcagcaaaagaagaaaatatgtctgcctttttttttattctgaaagtgataggtgttcattatagaaaaatggagtgtatacaaaactgtgtaagagagtaaataagtgttgcataagcctaccaccgcaagatgatctgttaatatttttgttgttatttccatttgagtcattttatggacttatgtaaggtacttccagtttagtattagtttacttattactactagttgatttatgccacattttttcccaaaaagctttcaaataacttacagaggcacataaaaatgtacaacctagcgtgagagcataaataagccatggtttttgtagagtgaagggaaaatttccctagaagtgccagattctgtttcatatggaagagagaataatgacatgataagtaagtagactagaatgtttatttgacatcagctaacttgtaatgagaggatgagttggtacaatgtcttatttcctttataagttatataaacattgattttaaaaacattaacacatacttaatctttttaggcatatttttcatagaatatgcattgacccatggcttttggatcaccgaacatgtccaatgtgtaaacttgatgtcatcaaagccctaggatattggggagagcctggggatgtacaggagatgcctgctccagaatctcctcctggaagggatccagctgcaaatttgagtctagctttaccagatgatgacggaagtgatgacagcagtccaccatcagcctcccctgctgaatctgagccacagtgtgatcccagctttaaaggagatgcaggagaaaatacggcattgctagaagccggcaggagtgactctcggcatggaggacccatctcctagcacacgtgcccactgaagtggcaccaacagaagtttggcttgaactaaaggacattttattttttttactttagcacataatttgtatatttgaaaataatgtatattattttacctattagattctgatttgatatacaaaggactaagatattttcttcttgaagagacttttcgattagtcctcatatatttatctactaaaatagagtgtttaccatgaacagtgtgttgcttcagactattacaaagacaactggggcaggtactctaatataaaggacaggtggtgtttctaaataattggctgctatggttctgtaaaaaccagttaattctatttttcaaggtttttggcaaagcacatcaatgttagactagttgaagtggaattgtataattcaattcgataattgatctcatgggctttccctggaggaaaggttttttttgttgttttttttttaagaacttgaaacttgtaaactgagatgtctgtagcttttttgcccatctgtagtgtatgtgaagatttcaaaacctgagagcactttttctttgtttagaattatgagaaaggcactagatgactttaggatttgcatttttccctttattgcctcatttcttgtgacgccttgttggggagggaaatctgtttattttttcctacaaataaaaagctaagattctatatcgcacatgagcattaagttcttcattgccttgttaaggaaaatgagtaggcagactcagaatctgttatattgatttcagttacaatttaatctttacaattaaaagggcgaaagatgtagaattttagtttttgttgttgactcgaaataaccagttttcttgattagagtttaagcagatttaataccatgaccttgcttaaccgtttcttcttttttacttgcttgctgttcttttgggtcaaaggagcaggctaatgcaaagcttttggagactgctaagtgttaaaaagtgattaaacacacactctgctattttttcacttcttggaggtagaagtcgagtatgaggcagttattttttagagtgtggaattatagtctttccttgctcctagttattctgtatatctttactttgtaggtaaaaataaatgtttatttaaaacaatttttaaaattataaatttatttttatagccatatgtaggatataaagatttatatagattattttctcaagctacttaatgctttaattctagctactcatcatgaaatagtaaacagttttactgaaataaactctacagacagatgcagtatgaggagctattgaagtagaaaatgtatttcgctttgcacactgagttggttttagcagacaacctcaagtaggtttccataacagccattacctttgaaatctaccttctgtagtttattataaataggaaaatacatcctgattctgtagcaagtagattgtttgctctttgtctttaagaaatactaggagggccgggcgcggtggctcacgcctgtaatcccagcactttgggaggccgaggcgggcggatcacgaggtcaggagatcgagaccatcccggctaaaacggtgaaaccccgtctctactaaaaatacaaaaaattagccgggcgtagtggcgggcgcctgtagtcccagctacttgggaggctgaggcaggagaatggcgtgaacccggaaggcagagcttgcagtgagccgagatcccgccactgcactccagcctgggcgacagagcgagactccgtctcaaaaaaaaaaaaaaaaaaaaaaaaaaaagaaatactaggggagggccgggcgcggtggctcacgcctgtaatcccagcactttgggaggccaaggcaggcagatcacaagatcaggagatcgagaccatcctggctaacacggtgaaaccctgtctccattaaaaatacaaaaaattagccggacgtggtggcatgtgcctgtagtcccagctactcaggaggctgaggcaggagaatcgcttgaacctgggaggcagaggttgcagtgagccaagattgcgctactgcactccagcctgggcgacagagcaagactccgcctcaaaaaaaaaaaaaaaaaaaaaaaacagaaatactagggaagggccaggcgtggtggctcacgcctctaaacccagcactttgagaggccaaggtgggaggatcacctgaggtcaagagttcaagaccagcctgaccaacatggagaaaccccatctctacttaaaaaaaaaaaaatacaaaattagccaggcatggtggtgggcacctgtaatcccagctactcgggagactgaggcaggagattctcttgaacctgggaggcagaggttgcggtgagccgagatcgtgccattgcactccagcctgggcaacaagagcaaaactccatctcaaaaagaaaaaagaaagaaagaaatgctaggggaaaatgttttaactagtcattcttcccagtagctaatgaagctgacttttaaaaagaaggctgtgagctttgcagatgctgctgccgcccagggccccctgcttccagccatggtcaaccccaccatgtttttccacattgctgtcgatggcgagcccttgggctgtgtctccttcgaggtaaggggcctggaaagcaagaagtgactgctcatctaatccataaaactatgttaacagattggagctgtttgcagacaaggttccaaagacagcagaaaatttccatgctctgagcactggagaaaaaggatttggttataagggttcctgctttcacagaattattccagggtttacgtgtcagagtggtgacttcacacgccatacagcattggtggcaagtccatctgcagggagaaatttgatgacaagaacttcatcctgaagcatacgggtcctggcatcttgtccatggcaaatgctggacccagcgtgaacgtttcccagttttttatctgccctgccaagatgccaagacagagtggttggattgcaagcatgtggtctttggcaaggtgaaagatggcatgaatattgtggaggtcatggagcacttggggtccaagaatggcaagatcagcaatcagcaagaagatcaccattgctgactggacaactgcaataaatttgacgggtgtttctcttaaaaaaaaaaaaaaaatactgtgacagaccaaggagccatgtgttcacatgtcatgtggaccagtatttaactgtggaaaccgcgggtggcatggagaaggaggcagtgtccgtgactgtgctgctctccgcagccccctgcctgctgtcctgtttcctcggctcctcggtgtctggactggcgttctgggtttcccagcagaaaactaaagggccagagaggtgtaaaaacacacaccacttggcaggtaataatttccccgcatgctatctttttagggatcctgaacacacagcctttcccagaagactgctccctccagctactgaggaatgatgacaagaaaaggccgaattgcagtgtctccatcagcagtttgctctccatgggcacacgatgacaaaatatcctgaagcgaaccactagtctgacctcagtagcaggattggaagcttcatgccatgggagctgtcaagaaaggcatcccaaagagaactgaaatttaaaaataataatagaccttcaggaataggtgatttgaagatattaaagctagaaattggaactagaaaatcaaaagaattcaaggcatcttaacgtgacagttgaactcatttgattatacttaaaaaagtttattgcagttattgactctcaattttttttttttttttttgagtgcagtggtgccattgttgctcactgcagcctcaatcttccaggctcaagaaatcctcccacctcagcttccagagtagctgggactacaggtgcatgccacaccctgataatttttttttccccaatataaacgaggtcttgctatgtcctccagtctggtcttgaactcaagtgatccacccaccttggcctcccaaagtgctgggattacaggcgtgagccaccaaacccagccaccaattttactttaggtaaacttttattttcaagcttttgttggtgttgcaagtgtaaatctgttttataaaatgttctataaatataaccactattccttgtaagctatttaaaataaattttaaagtctttcaagtaaacaccaatattgtgattttgatcctcacttacgaagtccctatttgagaacctccctactaaaatgtatttgttactccaaaatcatcccatgcggtcactttcagacatgcacagagcagcgaatgagccaagctgcctgacccgcacgttcctgacggaggctggacgggatgccctgccgtttcctctcctactacaagcaagtgtcctttcatagtctcttcacagtaccatgttttttgcatttctgcaatttttgttggcaatttcactatttaaaatggtcctcaggtgtggcaaaatattgcctgctgctctaagggcaaggctgtgatgtgcctcatggactaagtgtctgttagatcagcttcactcaggcatgagtgatggtgttggctctgagttcagtgttttattatgccagagaatcagtaggtcctgtaggtcctagaacctaaagctgggttgttgaaactgccactcctaaagtacttcagtaataagctgtccttttcccaatgctaacgtgcaaaacggggatgctcgcttttaggtgtaaaaagaaatctctgttgccatcattttaattgtctgaaggcattcctctgatagatgggcttagttcattatt

SEQ ID NO: 2575 - DNA, 14482 bp, Homo sapiens
atgcatgtactgaaacatttatgaaaatgacatgcttttcaaaaattgcttagataaaatattaattttcatcagagtctcagtcttttgccctcacccaggcaggagtgcagtggtgcaatcttggctctctgcagcctccacctcctgggctcaagcgatcctccaatctccacctcccgagtagccgggactacaggtatgcgccaccaggcccagctaattttcttgtgtgtgtgcatgtgtgtgtgtatatgtgtgtatgtgtgtgtaagtgggatttcgccatgttgcccaggctggtcttgaagtcatgggctcacgtgatccactgtctcagcctcctaatatactgggattacaggcatgagccatcgcaccgggttggaaaatttaaatttccatagcgtttacagaaacttaggaaacaagagaactctaattttctaaaatcgagagctaacttgaaagcaaagaggaaacaatttattgtttgccaaagttgtaataatgtttgactgtggtatgattaacagaattgagtaatgaattagtttatgttagatgatttgacgtaattatttaacctgctgttttattggtttgttttattttacataatatgacgattaaaactgtgatttgacagtatcttttaaaatttatgtatttggttaaccactagtttgtatcttaatctaaaaaaccctgtattgatgttttctttggtcataaattcttcttaatttattatattactaaatttgaaatattgacattaaatttcgtcagctgaaacattaaggagataatttttttctctctctcggtagcttttgaaggtggggaaattgtatgaaaccagtctctgtgatagatttattatcaacctttacttctcttgtttggatatataatagatattttcttaaaataatatgcatgtaaaatacagcacatttttaatagaaacacgtcttctaatatttacattgtgttacaaattatgttaagctgtaacatctctcttatttcttttttctttttctcttcttttttctttaggcttgctctccttttttaaattgtacatgtaatattaactgtagggggttttgaaaaagtcaggtgatattgaacaatttcactattaaaaacaagaaagaaaccctggatgcttctcagtctttggtaacagaaaaacttgcagcatttttattttttaggggaagagtcataaactctgttttgtaggtaacctggaaaagggtgtttttatcagataaatggtcaagacagggatatgaagtcactgacatcaatgcctatttgcattatttttatgaaaaaaatgttgttgataccaaaattggcacataatccaaaaaaaacaagcaattcaatattttgatgtgtgctacaaaagtgatgaataatttgggtttgtccacattaccaaaataataataaatccttcaaaaatattagtgtattagatatctttctgggttttgagattttgtttccttttagtgcactagcaatcatgtagatttattcatttacatttgtgtttacctataagacttctatatagtattgtttgtagtaaagtatatttagcccctttttttcttacaaatattgagcaacagcaaattcttttaagtgtgtgcattttttaggtataaagccatgattaatgtctttctctaacttgtctgaattttgtgcaaaatccaaatatatatctggatttcacaatagcactgcttttacctcattctgtcaggtcaaaccttgtacaaactgactcctttccttagcttcaaaatattaaaactcaaatgactctggatagtactataggtcatttactaattatatatacaaacatagtgattattttttaaagcagaacttctatgagcttctgtttctggttgagaattaaatctgtttatcatttgatattgcaaagtcagaaatgatgttatatcatttttaatttagcctatctcattagatgtaaaaatgtctttaacatttgttaatctaattatctgctttgtcaaaatatgtagtggtcagtaaacttttttgtgtagtttttggtgatgttacttcctacctccctcattgtgtttacaataaatatatggtttgtgtacagcaaaagaccatcaatatcttcctactcaacaaagtttagtctagaattgcttgctgtaaacaaagatgagaaaaggacactttgtttactcaggaatgtggtctaatgtctgaagttttgcttttatgagcttagcatgttttgttttttttttcaaatgaatttacgttttgtaaagaagctttagatattctttgtgatagctcagtgttaaggcataaatttaattttgaattcttataaatattctacatcataagtgatgtagaaaatctatctgaactacacagtagtgactgtggtagtagtggtgatagtagtgatggtaataataatttcacttatacccatacctagttttaaaagcaattttgctgtgtgagatagaatagtaagacatggcatacctactttcaggtgaaaaaacaccttcatatagcaaataatgtacaagcccaaagtgaatggtaaagggagtgccaagtaaatatcatagacatatgaggaacatagaaatttaaagaacaaggatcttgagtcaaaagcacctttgtgccagtggtgtgagttgtgttggcagcattttatatgaagtgagcaataatggaaaatcccagatacatgaatggattcagaatggtaagactctaggatttgagagacattttgtgggactgcaagaaagtgaatacagggaaaatagattaaacaagcattctgaatagtttgaactttgttctcaagcaatgggaagacaaactaccatttactggaaattagctatttttcaagttttgtgctatgcactttgtgtgtattatctctctctcttttttttttttaacaacaatccatttaggtagatagaaagatgacatgaagagaaatagaatagctttactttcacaaatttattcattgtgttagagaaataaaatggaaagcatatattctgagtgtgtatgagggttagttaaattaagttattttcatttctactttcccacattttagtcatgtatttacattgtggtgaatagactccatgttctagatactgagctgcaacttacagtggtaagtagttgaattggttgtcaaatgaagttatttgtgttccagtctctgtgccacagagcttctcagaggcagtaggtctgtcatcaaaaaaatggcactgtgaaagccctcttatgtcaccatctaagattttgtccaagagaatagaaactaagaaactgagatgctgactttgccagagtcatagagccaggaaatgatggatacttaacagctcccttccccaaaacaaccttgaatggtccaccagatggctggcatcaaggttcaagtatgtttgacattgggctgcctttctgatgctactgtgcagttctcatttttctggccttactttgttacttgatatagagacacaaactaaagcttgaaaaatccagtaaagtaaataaaaaagcattactgtttctatttccaacttcccttatatatcaaaaatattcagcttaacttctaaagccagagtagagttcattcatgtaaagccatttctcctagaggctaagatagaagagatttgcagaatggttggacaattaaagatggagttaatcattctcttttcattaggaagcacattgctacatgtccaagaaaaacaacaattttaaaagccctattttgtcaattagcataaaatatggtatttctctggtttactaagtcataagaaactcaatttttattactcttttctttgatattttttccataactatatattttttatttttgccatcattaggaatgcatatttgaaagaaatatgtacccacattaaataatcttatctgtgaaaggcaatagtaagtagcaaaattgactcagtaggcagctattatgaatgcctgcatagtacctcaggaaatatttaataattggaggctttaatattctaacacttcttttaaggtctcaagctaagaaggatcgctaaatttctgtgtcttgagcaagtgaatatgaagtagagatgatttatgaggtgaacaggtagtaaacaaagtcattttagggctcaagcaacttattgcttgtattacctggagaaagtcctagttttctcatttgttaaaaacaaatggtataaaaatatgtgttctgattcattggtttggtataggatttcattacatgttaggaaaagcaaaaggttttcgaaaactctagaacttatttcaaataaacactgttttaaaaatgtatcactcctagttattatcaatgttacttcttacccttttggtccccaacttttactgtcgtttttcagaatataacatttcaaatctgtggctcctttgtgaaaatgtggaatggggctctgaaacactgagcacatgctagcgttcagtgctcagtactctcagtgaggctgcccatcatctctcaggggaagccagagtgacagcatctcagatccacactgtccttgagcagggaagttggggcccagtcacagctcctgtacttctcagtgtgctcatcacctctctagggtttcacttccttccatggcaaaaaagaggaaggttgaaatagctgatcaataaacttctttcaattgttaaaccccatgttactatgaactacagctagagatgatgatcttgggatgctgagtaaagtattttaaaacataaatttagagaagttaaaagtagaagttttgaacaaataactaagccaagacttcattactttttgctgtagattttccattttcatactttgtattaaattagttaaagtgaaggaaacatcaacacaagtaggtgtgtagaaggccatctgaggggagattaaagtttatttatttatgtgtttattattttttgagataggaccatggtctgtcacccaggctgaaatgcagtggtgcagtcatggctcactctagcctcaacctcccatgctcaagccatcctcccacctcaaactcctgagtagctgggactacaggtgcacaccaccacacctggctagtttttgtatttttttgtagagacagggtttcaccatgtagcccaggctgatcttaaaatactggactcaagcaatctgcctgcctcggcctcccaaagtgctggccgcactacagactgtacctggccaagcctaaatttttagaaaatgtaagttaaaataccttattttaaaagactgcatatattttacaagtttctcagaacatttaatcaacatacttttttatactgatatttaagaaaataaaaaacggtgattgagagcttgaaatttggaatcagagacctgagttaaatattggctccatccagttttatcacttacagccatatggatttggccagtttttccaacttatttcagccatagtttctcatcagtaaaatgagaataatttagcacctgactcatagggtagttatgaagattaaatgagaatatgtgtaaagaacaaagtggagtagcagtgaatatgtgaatgtgctataactattcatatgactaaggataatttgactgatatattaacagtatttaaagttataaaatttagaactaacattccaaggttaaatagcttattgatgaaaaatatgataacttcctttttatgtactctattccagtcttttggattgctataccaacttgcattgatcactcttcaaaagtctctccatagcttacagaatttttattggaacttaagaccagagaatgtaccaatgtggaaagtaaagagctgttctggattagaaggaaaaaaaaagaaatttaatgtgcttttccttagttctactactgtttttgcttgctttaatgggtggaatggaactgtgactataattaagtaaaatgaatattgaaataaatattaacttcagaatataaatgggagaaaaggcactaaatacaaatttgcatctgcaagaagtgagaggttataaatatgttgttagatcacctataatgtctgctttaggcacctagttcttgcagttttacattgaaacacagagacaaatacaatataaataagtcattacaaagctcttaatccaaagagagagatacacacagaaataattaaaggatttcctaaataaaggactagataatgtgctgttggactaaagtgatggaacttctgaattctttttcagaagatggagaaaggaggcttcccaggtgttaacattaaattctagagcaaagaaaaaaaatgtgtagaattgtgtagttccttgtgtgggtacagaattttggggaaagcagctgttcaataataagtcctgatattttctatatatgttcagaaattaacatgcacttacattgttgattaatcctcacacatatttatgaattattattattattttaaataaatgatgtaactcagtgacatggcttgactctgtgtccccacccaaatctcatgtccagttgtaattcccagtgttgaaggaggggcctggtgggaggtgattgaatcgtggtggtggacttcccctttgttgttttcatgatagaattctcatgagatctggttgtttgaaagtgtgtagcaccttccttatccctttactctctcctgctagccatgcgaagatgtacctgcttctgcttcatcttctgccctgattgtaagtttcctgaggcctctccagaagcagaaatctggaaagtctgcagaactgtgagcagattaaaccatttttctttataaattacccagtctcaggtatgtctttatagcaatgtgagaactaatacactcagactgagaaaagttagtgacttatctaacaatatataatacctctcaattcagttttcttattattctgaggaaatgttttaaacacatgtgagtttgaaagtaaagtaaattatagtaaatttaggcacattattataataagaaaaagtactcaaaaggtaattgcaatagtttatgaatattaacatagtctaaaatgtgtaccacacattcactttctctaaacctattaaatggaatcaagattctgaaaaaaactgcaagaaaacaattatttatgtccagtgttgtcttaaaatgtcattgtaaattgcaagattatttattcctttttttgttttttatttcgtgtttagttgaccagatgttatccacagataacttcccataagaattaaatatagagccaaaagtattgcattaaaaatattgtcagtgagatagaaatccaggaactgtatgtgagaaaccttaatccttctctttatttcacaagttgggaacaagttccagtagtaagtaggcaggtggtgtaatgaatattttactatataagaaaatccagaagttactttcagctctaggtctgccatgtaaaagctttgggactatgaataaattatttaatttttaaatcacactgtcctcatctgcaaaataaaatatactagcctaaaataaaaataatctagtctaaatgcactttaagatcctttttagctttaactttacttttgtagaaagcttcagagggattttgacatgcattaagggataatgggataatttcactaaatgtgttagaatgaggaaaataaaattcgttattagtgcatcaggaacataaagaaatgttgaatggattttccatgggagacaacaatggctccatccaaggttataggaaaaaaaataaagtgatagaatatatcttcgaaagtagcttttaacatatgtgcagagaattgacacggcactaagatatttatattttaatctattattctggtaatattgcacaatatggggcttgaatcacatgacattcaaaaataggtttggtaaatcattttgaacttcattttgaacatgtctgcatggacataggaaatggaatgttgagtctgtttaagaggtttaagagagaagaagaaacaagttagggagagattctagggaaaggggacgcaggcaagaggggtatgtattcacaacattgtattactcccttataacagggactcttgcagactgagattacattttggaagagagagagttgaaattaatgttgacttctggaaatcaagccttatattaggtcacaaatgtaccaaagaggtacaaatgaagaaataataaatgaaataatttataagacaggttatatgtgtggagggaaactctctgcatgctgcataagtaggagttctggaaaatgccaactcttttctcatgtgttactttagacatcattcctccattaagccattctgaacctatctaagtctggattttgtgccctctgatagaccgggacaaatgtagcccataagaacttgtatcagtcacgattgtctttatgcttgccttttcccccactcagaaggtgcacaggcaggttttatcttaagcattgttgggcattgcacttagctccatttttgccatgtagtaggctgacacaatgaactaatggtctgtggtggcagaaattaagcttgtttgcaaagaaacacaatataacaataacaataaatacatcaaaaaatagatgtgaaaacagaagtgaagtggttaaaagctagggttctgatgaggaggagtgtttcttatataagatgaacctattactgtgtcatcaagaatcagtatcttcatgattttcagccttagtttccaaatttgtaaaacggagacaacaacaatgtctatctcataggggattttagaagttgaaatgaaataatacatgctcatgtataacctatgtatatgtaatacaagactaagtgctcaaaaatgtttaccatttttattaaccataacttctcctataaatgtcattagaatacagaaaaacaaggaaggattttctcacaacaattaagtgtgttaaaagtaatatagattattttgtatcaggaagaaatttcatccagcgtaaacacttttcatttcaaaaagtatgagattagaaattgtattctttcaaaactgtagtcagactgtatatttccagtgcctggcacatatctgtcaaatatgcaaagccatttcgtttcattttttttttattattatgctttaacttctgggatacatgtacagaatgtgcaggtttgttacataggtatacatgtgctgtggtggtttgctgcacccatcaacccgtcatctacattaggtatttctcctaatgctatccctccccctagcctccaacccctgacaggccctggtgtgtgatgttctgctccccgtatccatgtgttctcattgttcatctcccacttatgagtgaaaacatagtgtttggttttctgtttctgtgttagtttgctgagaataatggtttccagcttcatccatgtccctgcaaaggacatgaacttatccttttttatggcttcatagtattccatggtgtatatgtgccacattttctttatccagtctatcattgatgggcatttgttcccatcaatgggaacaagtctttgctattgtaagtagtgctgcagtaaacatatgtgtgcatgtgtctttatagtagaatgatttataatcctttgggtatatacccagtaatggaattgctgggtcaaatggtatttctggttctagatacttgaggaatcaccacactgtcttccacaatggttgaactaatttaccctcccaccaacagtataaaagcattcctatttctccacatcctctccagcatctgttgtttcctgactttttaatgattgccattctaactggcgtgagttggcatctcattgtggttttgatttgcatttctctaatgaccagtgatgatgagttttttttttcatatgtttgttggctgcctaaatgtcttcttttgagaagtgtctgttcatgtccttcacccacttttcgatgggattgtttttttcttgtaaatttgtttaagttccttgtagattctggatattagccctttgtcagatggatagattgcaaaaattttctcccattctgtacttcatttctatataacaacttggaatatcacagttctatgcactagaaaggagatttccatttttttcttaaccaatgaaacttcatatcctctttgggaagtaggtcatttaatgagtcattggtggaaagaaaatctactttaaaaacacaatactttctcttttgtttcacagatacaagtttctacaagatgcatttccctttacagttatgatagttctctttagaatctaaaggttaactctagcttgtgtgtgtatggtgcatgtgctgtgaatgttgtaagaaagccaattcaaagagattatgtaatttagaagatagatgctttgatttttttttcttttctaagaaccagcgtgctgccttttctaatacaaggttgggaaatagttctgtagctagatggggatatattaatatatactcacagggcacataatgacagtgcaaaaatatgctttcatcaagaacataaaagatggaacagaagtaatatttaacaacaggtagagattggttaccatggcatctattacagtgaaagtgtctaaaaagcacaatctgttgctctatttaatatagtaagtatatatttttgcgtttgtaaagttttgagatctagtctaatgcttttaatatatgtgatgcttctatatgccttaggaatgactactatttcaaaaagaaaaggttccatctagaacaataactcaaatataatgaataagttaatgcgtatatagtatggaaaaccattccaaatgattctgattgccactcccaggggattatgacttcctctcactccctttaaaattcaatatgttttttggcaatatttctagttgttcatacagcaacgagcctcccgcttttcttccatatgtgaattccatctaaagtattacattttaaaaaaatcttttatagttacacatggccatataatacatatatttagtgaatgacatttatcaaagtctggtaggtatttttgagaaagttttgctttcttgaatttggtcccatacttctttcttcttctcttgtctggaattcaatatgaggctgaaatgggaattatcatcttataaccattgagacaaaagtcacatggtaagagtaacttctgtgaggccaggagtctggttcttcagatttcctcaagtgcccagatctgtgtgggaatgccctacctggtgatttcttattactcaaaagacataaattggtttctgaccacagtagaggatttcaaattcatatagatgaacatcaacttaaccattacataattaactgctgtgtatggatagttatggagacttagtcctgaagtgttttttattaggattatatgatctatatactaatgactcctgtatttatatctccatcttgaaacttctgcctatttgtcttggtcatgtaattgtctggagtactacaaaattaacaagcccaacacagaacctcaaagtaccacttactcaccagcagaagctgctcatctagcagaattcctcatttctagctacagactcttctgttcaggttgtttcccaggcccaaaaccttgggatcatcctcatttactcaaaactcatatgtatcaactcaaaagcaactgattttgtttctaaaatgtattatggtataaccatttttcactagttttattgctattaaattaattcaaaccactgttgcatgtttcatgagttctcctaactggtcttcctactttcaatctgtctctccttccatgtattgcaacagaacatcaaaaggaatcctattaaagagtgagtcaagtagtgtcatttgtctgctcaaaaccatctcattcacaaagtcaaaaatatatgctcacaaagcgtgcacaatttgtcctccagtcatctctcctaatactctccacctctctcactctattacagagattttttggtgtgtacttttaaatgattaaagaattctgtcactcatactctcttgaattttcaagtgtatcctcatttcaattatctcagtctttctcagtcaaggtagtaattttgtaggccctaaaattaactaatattatactatgacaaacgttttgataatcagatttccttttgttttcatcaatctcagcttcatactatgaggcttaggagaccttttcagcatgtttattgacttcttatctgtgcccttagggacatccattctcaacttcaggttattcaccactgcctgctacaagttgctaccttatcttgtggtcctttgattccaaatattcaatttttcactattgtgctttgtcctattaattttcattctagaaaataaatgaaacaatgaaacattctttcacttgcactagaacagataattgcaaatatggcacatttttctcagtctgttgcctatatcccattattttacactcatttctgattcatttaaggttatttggttgcatttttaagctgactttggctaacattttgggaaaaaaagggaagatatttgaattctatttgaattctaaaaaaattaatcaataaccataaaaccagaggcaagaacaaaaactaagtggagagaacaatagaaaattcaaaaaatcctgtgatacaaacccacagccaatattatattaaatgggcaaaagttggaagcattcccgttgaaaccctacaaaaggcaaggatgccctctctcaccattcctattcaacatagtattgcaagtcctagccagagcaaacaggcaagagaaagaaataaagggcaaataggaagagaggaagtcaaaatatctttgtttgcagaaaagaagattctatatatattaatagaaaaccacatagtcttggcccttcagctccatcagctgataaacaacctcagcaaggtttcaggatacaatatcaatgtacaaaaatcactagcattcctatacaccagcaacagccaagccaagagccaaatcagaaaggcaatcccattcacaattgccacacacaaaaaaataaaatacctaggaatattgctaaccagggagatgaaagatgtctacaatgaaaattacaaaacactgctcaaagaaatcatggaagaaacaaacaaatcgaaaaacattccatgctcatggataggaagaatcaaaatcattaaaatggacatactgcccaaagcattttacagatttagtgctactactatcaaactgctaatgacattgttcacagaactagaaaaaatactattttaagatgcatatggaaccaaaaaagagcctgaatagcccaggcaatcctaagcaaaaagaacaaagctagaggctttgttacctgtagaaggaaacaacagacactggggcatacttgagggtggagggtggtaggagggaggagcaaaaaagataactattgggtactgggcttaattcctgggtgatgaaataatctgtacaacaaatccccatgacgcaagtttaccttcacatttaccctcaaccttaaaataaaagttaaaaacaaacaaacaaacaaaaaccagcaaaattttgtcatagtagaaacaagcttgttagggctccaaccttatgaaaagaaatctaaacattagttagtatgtgaattgcttaatattcaaagacctgagagagcatttaattggctgacactagctatctgattgacttctggctctgttctaagtgaaagaaaagatctatctggttctttggcatctatagtggaaaaatttaccatcccatacaaatggaggtgaggattacaccaaaggaaatccacctgctctttagatggggtagaatgaaaaatgagcgaccaagaaatatcaaagatctaacacagagatcctatccaatatttgtttcccaaatggcagatgtctactatgaaaaattattattttaatcttgctggttgagagtttccttgtcaatgttttttttaaattatactttaagttttagggtacatgtgcacattgtgcaggttagttacatatgtatacatgtgccatgctggtgcactgcacccactaactcgtcgtctagcattaggtatatctcccgatgctatccctcccccctccccccaccccacaacagtccccagagtgtgatattccccttcctgtgtccatgtgttctcattgttcaattcccacctatgagtgagaatatgcggt

SEQ ID NO: 2576 - DNA, 861 bp, Homo sapiens
gttcttttctgtcaccaccatgaaaatatcattctactggctttttgctaagaagtctgctgttaatctcagagactttttcaaaaatgcattttttccatgacttgcttttgagatctttgtttttcttcagtggtctacagctttactacaatatttgaagctttttgctgtgtgaatgccctaatgccaatgaaggtctgtgaagcctttaaccttttggacatcacaacttcttctaagcaaaaagaaaacaaaagcaagtagaaaacatgcgttttaaaaaattgttgttgttagtgtacattaacttgtgaatggaatgtttaaaataaaacgtaaattttgaaaattgctttctctattataaaagcctatgtagtatttgggagcacagttaataaatggatgcaataacttaaatccctaaaacaaagtaatgtagactaacagatgaaataaagagaagggggtagaaacatcatctccctctcttcactaacacattgtagaaacctggaaaagtcaattaatttttcaggggcccagatttattttgataaaatgagctaaagggtggatttcatagtaagttaacagtactaactaaatcttaagatcgctggaataagattaagaagtagctccatgctttataagattaatctcccaaatcatggcatttttcttaggggaatatagtcagaataggaaaaattatatttgtgaaatgtaatatgaaaatatgaattatattgcaaattgctccattactttaaggaagtaaatgaagcttgatatctgtaaaaaatgcaactaggtaattaatgccacatgctataactacaaattcaaaacatg

SEQ ID NO: 2577 - DNA, 5577 bp, Homo sapiens
aaagtggtgaaagtggcaatgtgttttgtgatctgacctcagaaatgacgtattgtcatcttctatttggtagaggagagctgttatgtctagctcacgctcaaggaaatgacttactgcaaagaaccactcttccccacgagacttcgagaagacccgctgtcacggactgagttgtgtcctcttaaaattcagatgttggagtccaaacccccagtaactcagagtgtgaacgtatttgaagaggtctttaaagaggtgatgaagggagagagaccccatgagctcgtcaagctccttctgtgactgatcagagatcccaccgtgagtccagctcctggtcccatgctctggatatatcggtccctggcagcgtggctccatctccgtagcctgcttttgacaaaagtggatacataaatctaggggccacctagctagttctaataagactttggaagtcaaaagctaaagaagaccaggggaccaagctggaaatcaggctctgcaatcagattccagagggaatgccattccacccaatcacctagccacaacggttcccttccttcaagatgctgcatgcctcttcaggcgaatggattaccttgtaagagtgacctgaaaaagcgttagcccagccacaccgaggcttaactgagccatttgattctcactgcctctctctgttgcttcctcttgctttcaactacagggtctttctgtttaggtggtgaaaaaaatgatcgttaaaaacaataaacctggggacctctgataccatgagcccagccagagatctgtgtcaagcaaatccttgcagacagttctgccagcctgcagatggctgtttgcctctcgtggatttgataagtgctcatttatgcccagaggcctctgggagatagtgctcatgctgagcttacaaactgaaaaccattatctgttccttacctgagaccctggggagcagtcagctcactccctgccgatggcctaagataggtactgatgttacagttgaggaatatctaggagtaacaaacttaagtagctggaatatgccaattttgacaatttgacaacatcattataaacattctgaagtacttacaagtcttttttttttttttttttttttttgggagacagagtcttacttactctgtcacagactaaagtgcagtggcgtgatctcggctcactacaacctttgccttctagattcaagcgattttcctgcctcagcctcccgagtagctgagattacagtcacacactaaggtgcccggctaatttttgtattttcagtggagaaggggtttcaccacgttggtcaggctggtctggaactcctgacctcaggtgatctgcctgcctcagcctcccaaagtgttgggattacaggcatgagccaccgtgcctggccatgcaatacttagagtcacagaagtttatggttagataattctcacagaggtgacctggttcagctctaccatcaaggtcattgagacactggcaccttgcccaaggtcatgccaacctgggattaggcgtttcctgcccgatgccctttccccactttccacacctattgttcatactaatttattgcaggtcttatttctacagcctcctttaattgctttatgttcacgggacactgtcttcaggataagattcaactccttagccaaagacgtggcaactgcgggtgaagtatctctgggcaggaaatcaatgcagaaatgcaactggggagagggggcttgggggccagttccagggagattggaactgctgtgttctcatcagcagaagtggcccctgcccacccccatcctaatcccttctcatgtgggagaaggtctgtgagccctctccctaccaggcaggttctatggcaatgtgggcacataccctggggcaggggccgagggacttaactcacttcatgagcgccaatggaggagcgaagggaatgcctgatgaaaacaacattctaccagtatgcactgttttctaacctacagagtgcctctgtgttcactgtcccatttgagaattctaagtagaattctgaacaggctggagcagattgcccaccccaagggacagatgttggctggtactgttggtattcatggaagattccttctgacactccctccttctttgtaattgccatgaactggagcactgggccaatataaatcatccaagggtgaacacgctgcacatggacggctcctctttgtttttgaagggattccatctctattttgccatgtgctccttcaccccactccccacccccgtctttcatttctttctctggaaaagatacttcaactcacaggactgcgatgttgaaacggacacccaagagcatcacagatgggccaggcctggacctctcgggacaacattcctcacgacttttagatagaagagattagagatttgggactggtggcaactggtaacgttttcagtgtttggtaaacagccagggtccggagctctgggaacagcctgatttagctctttgtttaagttttgtgttagaggctcccaagaagctgatgcaggggaaagaaattaacaaccatggctcattcacagccaggcagccaaatggacagctctataagactcaagccgacagcggagagagtgcaaccaaacagccttggcccagctttcagaggagaacgttattcaccccaactgctctgcatctgcctggatgtctgccaagatctgtgagcattacagcgttggtatgctttgggtgaggcctgtggctatggcaacaagttgggagcaacccggtccctgggaatgagaacagtgtctaaaatcaggcaggcgaggggcagggaggagaggtaaaggttggacttgcctgaagatggagccgttttattgttgtgggtaaagctgctaccattaggggctgtttacagagtgggtgcagctcaagctgggagcatgttagactcagcgactacgatcaacctattgacttgttcccatgagacagagtaaattaactgttgcagtactggtcatgtaccaccaacctcctgtgaaccagccctcagtgaaacatttatgtgaaaggccatggtgttcccataagagggtgcatgttctctcccttgactaactcttcagtatgcctcattctcacgcgctggtgtgcaggaaggagtccaacatgccccattgacagtcatgccctgtatgtggaaagtcttcaggtagagcactgggctcaggtttgaagatgtgagttctaatcctagcaaggccattacctcccagtgacctcatgtctcgatttcctcaaccacaaaacaaaggcattggtgagctgacctctaaggcctctccagttctcaccttctgtgtctctacagactggagactagaagattatgggcacttttattgagtcttcattttgtttccatttctttgtagtcatcagctggagttgaggacaagttttaacaatagataggtttctttttgtctctttttaaaaaattttatttaaaataaatgccaagtgtagtggctcatacctgtaatcccagcactttggggaggccaaggtgggaggattgcttttgagtttgagaccagcctgggcaacgtggtgagaccctgtttgtacaaaaaattttaaattagccaggcatggtggcgtgtgcctatagtcctagctactctggaggtagaggcaggaggatcccttgaacctgggaggttgaggccacagtgagctgtgattgtgctattgaactctagcctgggcaacagagcaagaccctgtctcttaaaaaagactattttttaagaacacttttaggttcacagcgaaatttggaggaaacttggcatatgtcatatgccccctgctcccatgcatgcacagcctctaccattagcaatgtccccactcaaatggtacctttgttgtaatcaacaaccctgtactgacacatcatcatcacccaaactccatagttcacattaggtttcactcttggtgtggtgtacattccatgggcttgaacaactgtataatgacattatccaccactgcaggatcatacagagtagtctcactgccctaaaactactctgtgctccacctgtttgtcccttctttcactctaaactcctggcaacaactgacctttttactgcctcgatagctttgccttcttcggaatgtcatgtagttgaaatcatacatcatgaagccttttcagattggcttcatataggtttccttccttccttcctcccaccaccttcctttctttctgtattcctaactcttggatgtattttccccagcatcatgacttgatgggacttttgctaagataggcaatcatagaaagtcataaatctcttgtcagccttattggctcacctccgagatggttccaacactctttaaggcccacttttccaatccacagattccccagcagaagtccaagctgctgagcctcacatcatcttttgcactagtaatctttaccactacttcactgtagcatttgaaaattttcatatgaagccatagttctgtgtctttttttttttttttttttttttggagacggagtcttaacctgttgcccaggctggagtgcagtggcacagtcttagctcactgcaagctccgcctcacgggttcaagtgattcttgcctcagcctcccaagtagctgggattacaggcgcgccaccatgcccagctaaatttgttggcatttttagtagagatggggtttcaccatgttggccaggctggtctcaaactccttacctcaggtgatctgcctgcctcagcctcccaaagtgctgggattaaaggtgtgagccaccgcacctggcctgaagccatagttcttaacctcagttgtgcaatagaattatctggggaatttaaaaattagaaaaaacccatgccctgaagattgtgatctaactggtcttgcgtagcgcctgggcattggtattttttaaatgtttcccaactgatactaatgtggccattctgcaagccacagttgaaaggcttattcaagcatcctgttgctgaatgcatgtcgtccttaccacatgactctggaggttttcttgtattctgatgtggctgccctgttgaggcctgccccttagagtggagattatcccctgcagtaggctgcctggaatatgatccccagtgatccctgcttcctggtattcaggccctggtgtgatccctttcccttgaagcctgggctggattagtgacttgcttctaaccaacagcatatggcaaaaataaatgtttattgttttaaacctctgttttagggtcatttattacacagcaaagataacgaatatactttctgaaagaaggggaggctctttagacaggaacatgttcctgtgggagccacaccttatgttgattttgaagaatggagggtctaataatgtgtccccaggggaagtgataggggggcccagactgcttggggctggaaaggcaggt

SEQ ID NO: 2578 - DNA, 1727 bp, Homo sapiens
ggaggcttggggaaagttgaagatctgataaaggtagttggtgaggtgaagaaaggagaatccactaaaacttgaccctaggagcattctccgccgaatggcatggggtagtgaccctgactctggacaaggagagaagcaaatgtactcctagccctacttgggaccttaaggaaagactcatccatggccatgatagtgtaaatgctgtttattggttttaagctctttaactcaccctttggagtgaaaaacaatagaaagttaagctggttacagaacagactgtaaatgttataaaccttgaaaatgtaaactatagatacagcagatggaaattaggcagtggaagggcatgaggagagatggggggaaaggatgaaaactgattgttccaaggagctagaagatgcactctaagactgattaaaaatagcagctcgatcgggtggcttaatgtcattctggttgagggactggaatatgtggtgccactatattgggataaagcaggaaagtgagatgtcaagacaggacttcagtagatctaaaagagtataaaactccagtataaaatgggcagctggccaggtgctatggctcacatctgtaatcccagcactttgggaagctgaggcaggaggatcgtttgagctcaggagttcgagaccaacctaggcaacatgaggaaacctcatctttacaagaaaaaaaaagtaagtaagtaaaatgggcagttggtttagaagagagacagacaaaacccataccctttctagatagaaagatccccatctagatgagtgtgctttctgataggagtcacacagccatacctgccatcactgaaccattgtgtcttttactttacctgttctttgattttgaaatactgtggaaatgatttctcagattttcagagttgtctttatggaaatgattttgttttagttattcacgtctaggacatctgaaaaccaaaagtaaagtggccagaccatgtcagtctagaaactagcagccagtaaattgtcttcttaaatattaagaaagcaatatactacctagatgcaatcaaagatgtcagcttttccttaaaaggcaatgatcaaaagtccaaaggtgcacaaggaaatagttaaacctacctaagttgaaacaaaagttttggctttaggacaaaagggtttaataggaattcacaagtaacctttctatttttgagtgactgatttgcagttcaaactacaggtaacctctttgtgctttgtgttttatattgttgttgtgtttttgtttgttttcccacgtgttggcagtgcttgccttttttgaaattttccctgctcataaacactccactagggggcagacaaaagaatagagaagaaaagaaacccatatcaatacactgcatccagtatacatttacatgacatgtttgctgctccttctctatactgtggcggaagtctttctgttcattcatccttcttataagggcactcaaagtgatttttagcagtcttatttttacatttaaaatataaacatatttccacaagttaaatggtaattttaaaattcattgtcatagtaattttttatggtttttctggtatgtctaccagtgaaccacttaataacgaacacttagttgtgtattgatgactgtaatgatgatccctatagggtttatcttacgtggagcatttgtttacccatcc

SEQ ID NO: 2579 - DNA, 4253 bp, Homo sapiens
aaaaaaaaaaaaaaaagaaaagaaagaaagaaacaaactacctgataactttgtcttaatgtctgagtgatttctgagggctaaggaattcttttggtgtgatttgaaaataggattcaaattctaagatacagtttccttatttctccaagagagataaaattctttattatctattttgtgaaagtttatattcaatgaggtgttaaagtcatctgtgcatagtgtattttctgtaactacagggcctagtcaaatagtggggcttaagaaaaagagagctaggaggtttgcttcatcctactaaagtcacctcttttattttgacaaaactcttcacagttacacgatggctaaaacatttttctctacatttgctagtacctgtagtaaaatgtaattgcatttctttcattgtgttttggttttcagacatccagtagcatcgtttttccacttattctttcgagtcagtgcaatcatcgtctatcttctctgtgggttgctcagcagcagctttattacctgtatggtgacaattatcttgttgttgtcgtgtgacttttgggcagtgaagaatgtcacaggtagactaatggttggcctacgttggtggaatcacattgatgaagatggaaagagccattgggtgtttgaatctagaaaggagtcctctcaagagaataaaactgtgtcagaggctgaatcaagaatcttttggttgggacttattgcctgtccagtactgtgggtgatatttgcttttagtgcactcttctccttcagagtaaagtggttggcggtggttatcatgggtgtggtgctacaaggtgccaacctgtatggttacatcaggtgtaaggtgcgcagcagaaagcatttaaccagcatggctacttcatattttggaaagcagtttttaagacaaaacactggagatgatcagacttcctgaatagagaaagcttatgtgctttgttacattggggaacaactgaagagattcttgactcaaccttttagagcttagtccatgttgcaacgaggagtgttggctttgtttttccacttaaaaactttatttataaaaaggaaaagtagttttcatattaagtttttatttcctttccagcagttggggctagaaagtatgtgttggcactagaaacattgtcaagatttgttctgtggtgtaggtatgcacattccataggtatgcacacggccatgtaatatcagtatatcccaagttaatgaaagtgttcatttacataggtaatggagacctttgcattttgatccatagaacataggaggatgttcttagtctgtctcaaagctctatatgtttacatattatttctgtagattgttttcaggagaaagttttgcttctatggtaagagtgagcactttggcttatgtataagttagaaataattgttagtttttaatatgcacttcgtggggaaatttcttagacgtatgcaagcaagtgaaaacaattagggccagtggtattaactactttataaaattttatttttgtttgtaagaagtcatctatttaaggcccagttaatataagtggaatcatcatagtttaaggaatacccagagattgctgctgttctatttattttacagaaaggatagctagattgaaagctcttcagtggaccttgagctaatagatcttttaccactaaaagagcattattctcatgtcataatgagaataataatttacatacttggcataataaatgcctaaaagacattttattttctgaatctatttttttcttgctataatggggatattgtaaattatgcatttgtattaatggtatttcttaaagcaatctatgtaactgtaaattaaaccaatctacaaactattgtaggcatctgtaaattctgttgtaggtattataaactttgttgaagtcttaatcagcagattatgttgtgaatatatttgtacattgttaaaatagtttttaagattatttgtttaattgaataagtgtcttattggagtgatagctttgaaggtgcaaaactttatatttgtataaaattctactatttacaaggcatttgacatgtgtaatctcatttaaccctcatgataaatatgtaatactttagatgatataactgaacttcaggttattgagtgactttcccaaggaaaacagattgcaggaatatctgtaggatataaaacatgatatattagtattttttagagaaaatatttgctctaaatgccctttcctttcttaaaaattaataatttgttaagagcttgtttattttacttagctgttctgtctggtgagaattgatactgcactaaagacattttaaaatacaatctgaaagatctaacctaaatctttagggttgagagtctaacaaaggatacattggtgtagttctttaggtaactgtgttatttgaactgcatcctaaaccaagtaacaatgaattttagaatatgcatgtggtaggagctaccctgtattccctaatactcgtttttctccttctacagatttcccacctaattagctagggaatggcatcctggaataaagataaaacttttcctagattttatcgctgtatcttggtgtggccacatcaccaagtttgggccaatggatacacttccaggaagtatccttaaaaggaggaggcatgcccatcccttccccctttttcctgaaaggtagacacaatagcagaaactagagcagccatcttggactatgtgataaaggcttcgttttgtgaatagcagagaaatgaggtagatactgtctgaatcccatcttgtgggtatagtagccctgaactacttgtctgaatttttttttttgaaacagagtttttgctcttgtcacccaggctggagtgcagtggtgtgatctcggctcattgcaacctctgccctctgggttcaagtgattctcctgcctcagcctccctagtagctgggattaccaccctgccactacacctggctaatttttgtatttttagtagagacgggatttcaccacaatggccaggctagtctcgaattcctgaccttaggtgattcgcccgcctcagccacccaaagtacttagattacaggcgtgagccatcgtatctggcgacctgtttgaacttttaataaaagtgaagggaggaactaccttcttcaagtgttaatgttctggcttctctgttgctcatagcctaactggattcttgtcaatacagtgcactttgagcattatccatgattatttccatttgaagtaactttccatattgtactaacaactccagttgttagtacagtattagagatgtaataatttagtaaatacctagttgtcctttatgtagtaattaagtaaatattgtagttgctgccgagttgcactgttcagatgctgttgctacgtaaaactccactcctagaattactggtgaaaagtcattttattatgctcacaaattgtgtgggacaggaatttggatggagcacagtgatggctggggaaggagccagggagtggcagggagcttttcagctactggcctggaggttgacattggctgtcagctgtggcctcagctaggctctcggttggaacacctacactgtgtagtttctccctgtgggcacatttgacttcttcacaacctggcactgggttctaacaatgagccttccaagagagcaagagaagtgcatggcattttaatgattagtcttggaattcacatgatgtgtcttctgtcatacttcattggatgaagcagtaaccaaggtccatccagcttcaatagaatggtacatagagcccagtacttgatgagaggagtgttaagattacattataataagaagtatgtgggatgggagatagtctttagaaaataaaatctgtgacactttaatcatttcattaagactgaagaaattaggagagactgaggataagtggttttccattttttttccctgggtcagccttggatacaggtgaattgactgaatggtgctagtaaaatggaagtaaaatcacatttttgtttttttattttgacatggagtttctctcttgttgcccaggctggagtgcagtgccgtaatcttggctcactgcaacctccacctctcgggttcaagtgattctcctgcctcagcctcccaagtagctgagactacaggtgcccaccaccac

SEQ ID NO: 2580 - DNA, 308 bp, Homo sapiens
ccagcagcgaagagacatatataaggttgtctgccaacgctaactggccagctctgacaggaggtgcgtggcccaggaggagccatcaggccagttctctgggatactgctgtgtctccagctctgcagtttgctcttcgtcactcagcggcagacggagaggcagacacgagccccttgtgagccctcctccttaccgtcatctcacaatgctctgaaataaggaggcaaatggctgaggtcccctcagttgtgagtatcttgcttccttccccaatgcctcttcaaaccactttgtcaaaaacaac

SEQ ID NO: 2581 - DNA, 2331 bp, Homo sapiens
attcagtgtttgcaagccagaactaacagtgtattttctttattgtttatagaggtacctattaaagagacttaatttaatatggaatatttattcaactataattcgtgaaaatgtgttggcattacaagatgactacttagctctaatatcactggaaaaactttttgtaactgcgtgttggttgggccttgaagactgccttcagctgtcaaaagaacttttcgcaaaatgggtggatcatccagaaaatgaaataccttatccaattaaagatgtggttttatgttatggcattgccttgggaagtgataaagagtgggacatcttgttaaatacttacactaatacaacaaacaaagaagaaaagattcaacttgcttatgcaatgagctgcagcaaagacccatggatacttaacagatatatggagtatgccatcagcacatctccattcacttctaatgaaacaaatataattgaggttgtggcttcatctgaagttggccggtatgtcgcaaaagacttcttagtcaacaactggcaagctgtgagtaaaaggtatggaacacaatcattgattaatctaatatatacaatagggagaaccgtaactacagatttacagattgtggagctgcagcagtttttcagtaacatgttggaggaacaccagaggatcagagttcatgccaacttacagacaataaagaatgaaaatctgaaaaacaagaagctaagtgccaggatagctgcgtggctaaggagaaacacatagcttgtggctatctttcagcactcctcttgcatattataatgtagtttgttcacagttttgtcttccaatactttgtgagtctggaaaaccacacattttatttgtatttcagtcacatttattactcagagtgccattcttctcatattgtcatgtttggccctgagggtgggtgattgctgacaattttgccaatgctgctgtatttctgggaaagatgtcacttcatgttgggttataatcccacagaatttactttaaatgtcacgtaaaaacaaattcacctaagatagtcttgcttattttgttgcgaaggccagtggaatataaaaatcaatggcattaatgaggagcacattctttgctgagggaaataacagtttttccaggccctagggtttatttagttcaacattgaagattgaaaagactaatgagaagataacatgacaatataaaaagacagaaactcaaaaagtatattcactagaagacagtggagccaaagaaaagcaagttgaaaaagaaagaggagacaatttaacgagccctaaaggcaagaagtgtgtcttctcctgcccatttctctctcccacagtacatcctgcattgaaccacgtgttgctggttactaaactttatggtgtcacaaaaagacaaatgattgtaggatccatggaagtgcacttaggcttgctgtggtggaggccatagtggagatgaaggctctgctctgaagctcttaattgtgtattcaccagtgggatggacaccctttcagcctaagcgtacgagtgaaaacaatgatgtcaaaagacaatagcaagtataggctactatttagggcaaaaggaatcttgaaatgaaagaaacagaactaaaaggctaactggagcataatccttacagttttgcactcaggggattaagtttgaaacatagtgtcttttggccaaattgaacctacttgtaatgtggaccaacttactttacacattttcatcagtcccaatgtatggaattagcttagttttctcatgcttgattaaaacaagacaactaaagctaatcattcctcttctagactttgtgtatatgatttaatcttttatttttatttttgtagaatgggggtaaaactacaaatctcctcctcagggtgatatttttaaagattaaggagtatgacatcaattaacagtctttaaagatgttacatacgctcaaagcaatgtgattaagactttttgcctatttcttgtataagttaaggcagccataaatgaaaatacaaaacaaacgtttgcttttgtatttgattcacaagaggattctccctgagtgtcaggggaggctgtgggacttcaccacgtggacaaacgaaagcacaggctactcagacttggccacaggtcataggtcagagaattttttcttcaaatgtagaaatgtaaattttcagcaataaaatatctgcatgcctacaaagtgttgtagctgagataccttcctgttttttttcttaaacactcattctatatttcccatatttc

SEQ ID NO: 2582 - DNA, 769 bp, Homo sapiens
ctagagagggaggtcagaacatatatactctaggggctctccctgctagatcacaaaaggttgaatggttcttcttttaaaggctattgatcctgtcaagttccctttcctctccaggtttgagtagccatcttctccctgtacacatcagatccaggggtgttataccttctcacaattgcaagctctggaataaaacattatccctaacaggtttcccttagcccttcccatatttctgtaaatagcgcctctattaaattcttctcaattatacagtttgagtgagccgtctctttctgccaggagccagagtgatacatactcctttcattttggtattcaaaataagtggaaaatgcagtaattttaaaagacaaaatcagattagccatttgaacaatttgttgcttgatagtgaatgcccaatttagtatcatgataagattttagaatttttgcaatacatggaattttaggaagtcggtggtgaagggaactgaaggctgttggcatctacatgagtggggacttactctaagattttggattattttctagtctaccactcacagaaactaccttttagtgcaaccacggtggaaccctgccatagtatctctagcaataacaagcaagattcagaagtccaacaagtaagacattgatttcattaagagagaactagtaagcaagctatttgggaagtacactctcataagaatattgtttcatgaagtcttgagcaacaaaggaaatagtaagtaag

SEQ ID NO: 2583 - DNA, 14273 bp, Homo sapiens
ggtgaagatggagagtgaggccagaggagaggcagtgaggatggagactgggaccggagcagaggaggtgaggatggagaccaggaccagaggagtgttggtgaggatggagagggagacacaaattcaagagatactgcaaaaggaaaaccagatgatttggtaacatgaggaatgcgaaggaggagaaacaggctttgacctggagtgactgggaacaaggtttatctttactaaatatgaggaacatagggaagaaaaagaagttcagggaggaaatttagtctttggaacaaactgaatttgaggttctggcaagatccaggctgatggaaatgtgagctggagttcaagaacagtgtcaggactgcctcagagatgtattgaccaaagcatcatttctttttatagcctgggtccttttgtcccttcacagtggcatctgctttaaggtcatagtcaatctttttcattagaaggtagaacatcttacaaataagagcctttgacttcttcttggagtcatctgaggcatcacattttattaattgcacttttgaccttctataatagatgttttatctggctcttctacttaaaccatggtacttttagccatcttagaaagtgcataacaggctcccatgattgaagaaactggggccaagaaagtgccagtaagttggccaacctcgcacagccagttatcagcatcctgattcccgaccccctgcacttcccactggggcaagtggtgcctttcagaccctccctggtggcatcttgctctgtctctgcagtacagcttgttactttgcactcagaactgtttctttagaactgtcatattcctgtggtctcttatagcttatgtgttgtttccttctaactgaactttaaaaaattttgcttttctttcctactttgtgagggcctaaacgtagtcactttatgttcacttctaccaagaatattctcggtgtttgtaaccagcctatagatttgaacaccatgcctcaccctccttcccaaatgttcgttccatgttaatggttttaagaattgtatggattgttgcatgaaagagattgttgcatgaaaatgtatctgttgtcaacccacatgggttcctttaactccagcaacattaagtgatcttttgtctttcatactgcttatccaactcagagccccggcctcttctacgaggggaaaatgagctgcattcctagggctggtgagaaatcagtgccaatggggagaataaacagtaatcagacaagattccatttaaaacattagggttgcaatgtgtcatccaaagctataataataaaggcccattggtccccagtagagcacagtttaattaaatgcaaccacaagacaactttaccttaaccttgtagacctgatgctttctattaaaatattttctgcttggtccttcttttaccatatagatgccttgaacctccgaaaccgacaggtcatctgtgtcactctcaaggtcctccagcatctggttgtgtcagctgagatggtgggcaaggccttggtgccttattaccgtcaaatcctccctgtcctgaacatctttaagaatatgaatggtgagtgagcccacgagtcaaaatgtcttttaagccaaagaaaaagggagtggtttgaagtagagttaattagcaacacgtttaggatttattattgcatataaaccatgatccatttggagatctaaatagcatattcccacgccttctccagctactccctagggaaacagtaaagttaacaatttcatttattactcctcaggtacagcttacttactcagtacagaagtgctgaagcagttctataaacttccaataattaaatttgaagtttttttaatggtcttttgaatacattagtaggttttgagtttgttctttttcttcatagtgattctacctttagatacttcctgttacaatttcagtcagcttttttccattggtttaagatgaatttttaagcactattattaaaatctggtaaatggttttgatgattcatttattttttgtagtattattctataagctttggaaaacacagatgaattcatatggctctattttaccctaacaaagatattagcaagtttttggtgacctttggcaggcagtggatgtaaatctattcattaagcgtgtgatttcattgaaatgatgagtctaattttcttttttgttgttaattttgaagttccgtacttctcacatgcatgttataagtcaacatgaagttatttcctgatagtggtatcaataagttagtaatttaatggagcactgaatgaaacttttacaacatgatctgctcatcatacattcaagaaaaaaaatcaaacaagaagctgagtttacagcagctcctgccacaaacagacttttgtttggaatcactattttttatattattactcaattgctattatgtctgctccaggcatagactattcaggaaatcatggaattctcaaaaagcttttagctctctttcagtagtagaaccggcttatatgttaaatactatacatatttagaaaaaggacttcaaactggagttataggagcttacaaatgcctgtaatggagtgcttgcaatggtattctgttcaaattatctgaagagctgtgggtaaggtggacattcaggcaagatggttagtctttacgcaaagtaataactgggttttaataattgagtctcttattgttaaaatgtaatgttttagtaacaatattactacatttggaaaatacttatttaaacagtcttcattcatagttcatatttttaccatatagtagcagcaaatatccatgaagttatgggagactcccgatgtgcacctttttcaactaaggtcgataaaagaaactctaactgcatacctcatatttagattctagtaacttgagggagatagagataaagatgttctgctagagatgagagcattattaaagagatggaagcatcagggaacagccacccccaaatgtcttagttaacatttttgaagtgtgcgattcactaatatttcctcagtaatcctcatgcaaacctatgatgcatgtactattactatttccatttaattgttgcagaagttgcctcttgtagctttcctcccatgtgaacagttattctgtacttgatgatcctggaagatgagcctgaacacatttctcctttcttgcctgagtatctgggaataggtagctactgcaacactgctttaatgcttttgttggtcacacaataaaggctagaacttatatctaagcatcattctgtatccctgtataaaagtagaaaatcagtgatgttcaaaggacaattagaatctttctttatcctcaaggaaatctataaagatggataaatattgctgccgcaaagacagataaatcttgttgggagctctagactactaaacaaaacaattggtttctactgctttctcattatagtttttctttaaacctttaactcacaggtgttcatacacttaacaaagaaaattattgactttaagaataaatccctagtaagattttatcaatgtgggacatttaaagttcatacgagagtccttaattggttccaaactcagctaattcttttggagtctttctaaatgcatgcatcaggaattctacatttaaattatttttctgcttaacatttttctgacatttgtagggaaaaatattatcttccgcttcattttctacttatcttagaaacctgtcacaacaatgccagcctgcagtttgctgtattttcagagggtcctattacaaaattggagcattctagctataaaaacttaaaactgttccttaaagtagctatgttaccctagatccaattctttcagaaaaaaaagcttatcgcaggattttcaattacattagaattttcactaggaaaatgatttagctttaataacattttaagaaagcctgctttatgatatacatcacaaaattatatatacttattttatttaagcagatgtccttagtaacagatataattatttacaattaaaattacattagaaattgacagtatgtagcagtagaaaaaactcatcctaaatttcaatgtatttgagaacaattgcacatttccgtattcctctttttttgtatttctcttttatgtaaatcaatgtcttgttaaactcagattcaaaaatatttctttcaagtcccactacaaaattctttttagaatgagaccagatacaaatgacaaaaaagaatgagagaaaatattctttcaaataaaatgacctgtctgtcagcatcccctcaaagcgcaaacattagattagttctactgcctgaagtttttacaatgtctcctgttttaatgtcacatgaacttcctctgaaataagcagtgggggttgcagagccagggagctagacattgggacagtggcccatgtgaggagcccaggcttccagtcttttcaaggaccagttggaaatcaagtaggggagggaggaacagtccatgctcacagcaccaattcaggccccatctacacgatcagagcaatgaaaacttagagccagccccactagatcattcttgttctagcagagaaagtggctgtatcctcttgtgtgttcataatatttttcacagagtttaattaggctatagttaaaacaagaacagataaatctgagatgtgaatggtagtgtagactaaacagtaacattttggagccagaaaagctgtgacctcaggcaaatcccttaaagtctgtaatcatcaatttttctgtctacacaagatatgcatcgtaacaacttttcattagggtgggcataattagagacaaggtgttcagggcaccttcacatggagcctgtccatgaccgggtattaatgagagagccattatgattacacaacattatatacatatccaatattatatacatacaatagtatatattatagaagaatatcatgctctatgaattattatgtaacaacacaaccaggcaactgaaagtgttgtgtgtgacccatagcgctctctcgttgggtgacctgtcgcttggccctctgtgagcctgtgagtggcatgtggcctcccggtctcaccagctgcatcagtgcctttgcttcaaatggttcattttggctctaattgccaaatgcagggcgagtggccaaataagtgaaagactcagattcattcactggtaacaggttttcaaatccatcctttcctggcataatctctcagcttgaatatgtgactggagtttagggagcatcgtatttacaaaggagaaacctctttccagcacagacaaggaaagcctgggccacggtcctctttgaaaaaaccaaactgctgtctaagcttttgagcttatttgcctgcattctaaacagtgaattttggacgtaaaacatgctgtctttccagtgactgctttgaggggaaagaaaggggagttcctacaaaatattccttggatgcatttgtcatacagccaatagcaatttattctttcctatgttctttcacaaatgttattaaaggttacagaaaattaaaacaataggaatcttcaatttatagctttcagagatgaaactaccaaattaatgatgcagagtattacatttgaggagcatgagccaataaatggcattaaagcttttacagctggaatatgggctccgccagcagattagggctctccgacaggcctgtttaccatattttggttcatttctaacagtaccaatagttctgaaacaatccctacctaaaagatttcagactccagatatcagagactctgataatgttgtaaatttatgtcatgaaatatgcaaaagtaaacataataatgaaatatcctgtccccacgtttgtaggaatcaaattgcttggctttatctaagatgtttaccattatagactaataaaaagttcattaaagagacttaaaattttaattcagatgcaggcacattaaaacatatggggaatgaggatgcctgaagtttgcaaaattttaggatgtttgtaccaggtctttgacctgtaatttaaacggcttctaagaaatagaagtaattattttatgttgatcatcttttaaaacaacttctaaggagaacctaggccttgtaagtcaacctgattcaaaccctccttgataaccctccttgatattcgtgtgaattctctgggaccaattctcatgctcttttcaaacgttgatgaacttctgggaatggattaccaaacaacaacagcagcaacaaaaccttcagtttttctgtcccaaagttgatgtatgtaaatgttatttctcctcacagagatttacatttaattttggaattcaggttcatcccccatggaattctgaacaattctgcgttcatgatttacattttagaaatttacttcgaagtccctttgaaatggttaaatgtgttaaatttgaaccatgagattatcctaaattccttgaggaaattattagaactactgccccccacatttctgaaagttagatttggaattgtcatgcatatatctagtctctctgagcacttcctccatgcacacttaactcatttgtctgcagagaatcctgggattataaagttggaagatccgtgtaggggtcctttggtctaagagtatctccaatttaccaaactaatcaaccattacttccacgaaggcaaaatgtttgtgttggtctttccttttcttatatagagcttggcacacctagtagaatcaggtgcctaatatgtgcttgtgtgaaattagttcactaactcagcctacgcaaccagtacttatttattccgtcttgtccaagcagcctcactacttcatggggtagctgttctacttccaaagagaaaggcagctcctgttttgaaaggaaatttacacctaacatttccatctggttcacctctctcatctaaactacacagcacaatggttaatccttttccacatatagcaagccctcgggaaattatagaaaactttccttccccctcggtattcacttctccaagtgcaatatccctacttcttccaagcattctctataagcagagctcccaaagcctggaaaatctttgaggatggggagggaggactcatttctacagaaacagatggttgtgcagcgatctaagtgagagggcagcccaggacagcagatggtcctgggaagggctcaggcctccctccctcacctgatgcccccacgcgtggtcagcccataaagacctctttaccatggtgaaacctacacatgcttatgaggttaaatgcctttcctcttcactgagactgctacatttgagtctattttcaacccaaatccacttataaaaagcatcaggggagtggggtcagtcacaaactgtaaattacgtctctatgtgctcttctctgtagacctccctggttgcgcctgcccggagggaaggattattctgagttgtctgtaacctggtagggcgatgtctaaagaaatcagaatccagctctgaaggctgtgtcttagcttcctggagccacgtaacaaattaccatacacagaatggcttaaacaacagaaatgtatcgtctcccagttctggaggctacgagttaaagatcaaggtgtggacagggccagctctcactgcaggctccggggaagcctccttcctgctgcttctagcttccggaggtgccagccgtccttgagctccttggcttgtggatgacgcatcactccagtcccgccccatcttcatgtggccttttttcctgtgcgtctgtctgtgtctcttctcttcctatgagaataccagccctcataaggattggattaagggcccaccctactccaatactccaatattactttatcttaactactttcattggcaatgaccctatttccaagtaaggccacatcctaaagttctggaaaagacaggaatttgggggagacactattcaatccagtccagatgatatacctctttcctacagcctgtggggagaaaatctcatctttgataaataaaggtagaggttttgtgttcgtttcactccttcacattgctgtaactagtgttactgagcctgctctgcacggactaatgaaaactccctctttcaacaacaaaaatgtcatgccttttcctttcagcaggaagggtttgtttagttaagaaagaaactgggcctggataagttttgagtaggggagatgcagggaattgatgtttctcttcttcttcggtaatgctgcaaactaaccagagatggaagctcacacttccaacagctctggatgctgccctggggatcccatagcagcaccccagggtgctgccgcaccagcccagtctcgagggacctggccacggtgaggctggttcacctgggcctgtcccggcccaaaccagctgggcaggaggctcaggccactctgcctaaaggggtttgtaccaataaatgtgggtcacctggtggacaagcaggggaagatgcttgggcagatgggataatttgtggagaaacaagaaatgggacaaagcatgcagctgccgagcacagcactgaggcgcaaaggctccggctgcagttcttctgggttcaaactgtttgccggctgtggcttttgacgggtcatgtaacaactccgtgccttagtctccataatttaaaaaccaagttactgggaggattaaagcagctcattgacttgcagagaactataagaaggtcatttttcaggagttctacttggagagaaggaggggaatgaattgtggaatcgagggtaagtgctttgaaactagcgtgttaggtaaatgtctcctacctgcagcacagggtttatggagagaaccaaatacatgtggctttatatggtccttccaagaaaattaagtgaaatctttttaagttaatatcataattaacatctaagatgattacatatgaaataaatattcaagaatcaatacctttcccatatgtcagcagtcagaaatgcaatgcaaagttcattttctagatgctactaattcctaattgcaaatattccaacccagacaaactttcactgctcagctctcccttcccccgaagacagtttagttccttccttggccctctcacatcattgcaaagaagggctgagtagtgacctacgcatagggctgcatcagcaggttcactggcctgccccagtgaactagtgaaatcccaacctctttccactgtgttctgttttcgattggcccttatatttgtggtttctctgtataaatctttccaagttgttgtggccaagtttcctctggacatccccatttcaccagcatctggctttaccactgtccccacttatccaactttacctgaagggatcagactgccaggaggatacagagttgcagataggttcatgacccaggcacatccccattgtttctggaccagtggcaaatgtggtatatcaagaatggcttgtgtaagagaatcccattcattgcttctgaaacggtgatgaaaggtgtcgacaaaaagagtcacactctgtaaaatatttaaagaggcttattctgagccaaatatgggtgaccatgacccagggcacagtctcaggaggtcctgagaacatgtgcctaaggtggttgagttacagcttggtttttatatcttttagggagacataagacatcaatcgatatgtgtggggtatacattggtttggttcagaagggcggtggtttacaggtcatagtgggttcaaagagttcctgattggcaattggttgaaagagttaagttattgtctaaacacctggaatcaacagaaaagagtgtcagggtcaagataaggggctgtggaaaccaggtttcttattatgtagatgaagtctcataggtggtacccttagagaaaataagttggcagatgtagactctccgtaaatctcttcaggactgggagggtatggaatggggaaagatctattatgttaatagagattctttatagacacaactttctccccactaaaatgacttttcagtccatttcaaaatatggcaaagaaagatatttggggtgaaatattttgattttctactttgtctgtcatgtgaggttatgctagagtcaggctggaaagtaagccacgttatatagggttaaatgaaacctctctgatgagattttatggtttgtggggtgtgactccccaggtcccttagataggaatttgggcaagagaagtaaaaggtcagagttcagtcctcaaaaggaactgcagtatggaaacagcagctcaggatggagctggaactggcactcatgccccctgcctgtgtgtggaacaggccatgtgatctgaagcctgcttctcagcctacgagacaccctactgccattccagggactctgggagttatctctgctcttccctccatatccacactcagacatcccatcctttcagtaacctcccctgactccgcccccactagcagaacagagggctcgtccctccgattattcccaatctgccttgctgggtagaggtcctatttcttgtgtccctcctcaccaggcgggagagcccagatgccgggtgacagttgggacaactggcttttggctggacctgttttcaaagccatgtttggaatgtgtgcttttgttacaggaaaggggtcctgatccagatccaaagagagcattcttggatctcacgcaagacagaattcagggcaagtccataaagtaaagtgaaagcaagtttattaagaaagtaaaggaataaaagaatggctactccatagacagagcagccccaagggctgctggttgcccatttttatggttatttcttgaagatatgctaaacaacgggcggattattcatatctcccctttttagaccatatagggtaacttcctgatgttgctgtggcatctgtaaactgtcatggccctggtgggagtgtagcagtgaggacaaccagaggtcactctcatcgccatcttggttttgatgggtttgggccggcttctttactgcgacctatttcatcagcaaggtctttctgacctgtgtcttgtgccaacctcctatttcatcctgtgactcagaatcccttcactgtctggggatgcagcccagtgggtcccagcttcattttacccagcttctatttaagatggatttgctctggtttaaacgcctctgataccttgtcacccctccacccctctgaggtaccccaacagggatccacagacaaaatgactgggttgtggctggtttccagtgcttggccagtgacatccctcctgctagctgggaactggcacatttcccaatcagagattgcgaccaattcagctaaggccttacagatctgcctagagaaatctgtataatatgctttaatgtatttaaacgctcaaaatgggccccaagtgagcaggcatgcacatattcgcccaagagaaaatagcgttcttttctatttatgcaacagaaagttttacttaatctgagcaagaaagcaaatagcaatttctaaagctttaatttaaggaggcttctctattcagtcagctcataatttgtagtttttaagtcccctaaaatatcacctattctggatttgctgataattgagagttcattctgattttcctttatatgcaaatcttccatgagcaccaactaatgactttttaaaggtctctttgtggacattgcagagaaagtaagaatgtcaccaagtgtaattgttatgctgaataccactattcatgccatcgttaaaaggtccgtttaaagggggtgagagacaaaagctaagcttgactggatggaggagcctttccgtgccactgcggaacccctcgcaggggtgggtagtgagggtgagtaaattgttctgccctcccctgagttcccaggctccttgagtcgcacgtgctcttctagagactgatgggaacgctcagcttgcttcactctcagaccttctctccccgcccagcgcggacgggctccgggctaggagctcgcagagggacgggctgtgtcgcctcgcctctccctgcctctgtgtaggaattccccgccgctgaggtcaggagggcgggagtgacacaggagccgtggctgcctggactcctgggctgccccaggagccgaggacagccaggtggaggcggctacggctcggcccgaacccaccacggcctcccctgcagggacctgtgtccagcctccacggccctgcagctgcattcgcctcagcctctcgtgctgggatccctgggcccttctagattcccatcacgcagggtcaaaaatgcccccacccgtgcacgctcaccgtgagaaacccactcccatgccgtgcactgatcgcccggcgtgctgcccggactccagccctgctgcctcggcctttccattctgcaccgcagggaaggcccaggcgtcgcgcggccagcccctggggacaccttcaggctgctcgagagggttccagctgccaggtcaggagcagagcacagccaccgcgccctccaaggacaccaagaatggaatataaatggctcagaagaagcttaaccatcaataaatgtggagttgaaaaatgcaatggacatattctctagaaaaactgcaaatattattgatattttcttgcttgcctgctttctgtattatattctcatgtacatcttgaattaatgttccaagtaataaagaagaaaggtaaagatggcaacgtaattatgaccaagttctgttcagagccctcgaagatcaatttactttttttgctcttaagtacagtactttaatatgagctttagtgagcatatttatattcattttgaggcggtcatacaatgaaattaaaaatcattctccattcagtgacttttaatttagattttgcataccaattacaactctgcctctgcccccgccccccaaaaaaccctacatttcatcttaagttcatttcttgaaagtatctttgtcacaaactaaaaaactaatgatacaatactggaatttaaaaaacaagatgtaattgggccataatgacaggattattgcctggtaattttcccactattttaagctttgtgtttgacctgcatgctagttggatatttatttgtgtacatcgggttttgaggagttcatagtttttctaacagaaatcactgaatgttacatatgtttgtatgagtctttatttattataaatatgataaacaatcacctaaccaaatgtcttagatgttgttctttctggaagcatattttgtccttccaaagtttcttacaagctgtgagtgtaggataatgatattcaaagagaatcagtaccttttctatttttttgatgaccaactaaaatttctagaagaatttctgttaggaccatagacaaccatggagtgaggagaaggagtgtgatgtcgggcctgtaaaaacctgcttaaaaaacaacccacacattcacctttcttcgtgtacctgctgagctagccactggcggtgtggaacatgaggccttcctgctctcaccgtaagcctggttgcgctgcctacacaaagactaatgcaccaggctacctccaaaagcattagagagcaatgtggtttttatgaaagtcttttttcggggggaatgccaaagagagaaccacataatacatccttcactgattcatttaaacaaaacaaaacaaaaaaagttgagtgcttactatgtgccagcgcagcaaagcttcctaaaaaatcctttaaaaacagacactatgcggccacacagtcattttcaatttaccaaatccctcaaagacttccccagagcctcgcccggtgaacctgaatcaatgtgtacagccacggaaggcctgaggggtgaaggaggttttcactaccgtcgggaaacaagcaggtctagaaaaggatgggaaccttgccacacatggacaccatcctgcaaactttatgttccttctaaccatatatccttaccttctactcctctctttaataacctgactctgaggtcagggtacagtttggaacagtaaaatccagcactgatggcagacttattgaggttgct

SEQ ID NO: 2584 - DNA, 1480 bp, Homo sapiens
ctgcggccgggtgttggcggggcacggcgccgggcggggctggcctgcctatttttccctccgtggcggtctgcctaccggttccctttttgttttttgtttttcatgttttcggtcctacagttaattcgttaggagtagccttgaagatgaaattaaccagtcaagacattccggccgccctatacgccgggcaattaggacgcatctaataagagtaatcgggcgtttataagcaaactccagactgttacgaattaaaaaaaaaaaaaaaaagccagcgagagggtgtgccccaacgttgtcgtcttcagctgttttggagcgaagttcagggcgcgggttgccggacatttgggtcctcctccctcgctgggcggggctgggaggggcgcggcgcagggtacagagcacagaccttagagcaggaacgcccggctacgctatttacgagctgtgagatcttggacgaattccttaacctctctgggcctcagtttcctcctataaagtgaaggagtttggagacatgaccttaggcccttctctgctctggagctccaatccttccgctgagatgatggtgtgtgtgaatggagaagtactgtagcggaagtcagggaacttaggttttggtccagggtctgtgttagcctcagtttacccaattcttaagtagcgccagccatctgtaccccacagggtccttatgaggacccaatgttaagaggtgttgagagtccattgctgacaactcgctgtgcaccgtcacacaacttctgtcctcagtttccttatctgcaaagtgggggtgttggtagcagagaaaaatagagccgggaacgcgaagctttcctggggctctatataaagcgctggcatttccgggacggctggcggcatctggccgccccaagggccccaagatacggtaatcccaaacaatactcggggtcattgtttacagctataaaacacattctgtcctgaacgctatccccaaggacgcgcgcgcgtgcgcgacgaggcgaggccagccagactcctcgcacctccgctgctgcccgctggacagagtccccaactccgcaggcccaggagaggggtgtggggcaggcggacgcgcgcgccggccgtgggtgctttgctcttccccctccccatccctgcgtcctggcttgcctgggtgtttacgcgcctctcccagcaggactgagtaaatgcagtcctttgacgcaaaacgaatcagtccttccccagcggcagcagcaaaactcagaaaactgggggtgggggtagggacgggaggggcacagaagaaatcgtgacattttcccactcggttctcagcccctccccgcgccacgcgggcctcaggccgccctagccaagtcttgggggctgcaaagggaggcgcggccaaagcgccctgcctgagccctcccagtagcaaccgcgtgtcggagcggcgcgaacagac

SEQ ID NO: 2585 - DNA, 4403 bp, Homo sapiens
cagcactgcctcagctaccctagccctggggtaggatcctccctgccaaactcttcccctagccagtgggggacaagctgactttccccacagtgacctgcaagatccgccctgctgaaagacggctctcagctgcaccgagacatttgtgcttcctctgtggcccctgatgtgttggtctgctgtggttccttgttcccaaagctgcacgatgtaaataattcacatgtgaaacctcgagttatggaaactcttggtgttcataactgtgttttttcctctctgcttcatttgaaggctgatgatacctacctccagctgaagaaagacctggagtacctggatctaaagattaaaaataatgaacctttgatcaacgtgctttacaaagtgctgaagaagtcagcacggggctgtcggcccaggagaagcgtaagatgatctgatccgtgtctccaagcggggtcattccattgcttctggctcggtgccgacttcatcacttgcttaaccagttgctctcctgaccgccccaggcttcccgcaagtcattttggtttattttctttcaactgaagctctcttcagcattttggctgatgcaccaggctgagcctctcatctgcagttttctgtgactccatgttttgtgctgccaagggtgggggagcttgcctggcttgccaccagcttgtgttgtgtttccatcatcacgtgtctgcctccatggcgagggctcacccagacagagttgagcatgagtttcttgggagggaacagcagttattggtcatcttccaagagccagggtatcctcagatgccacggtggccctgagattaaggtggcactttttgggggcaggcagttggtatttggataacagcctggagctggactagaataaaatgccaccccctgcccataccctctttgattgatgcagaagtagggactgcaatgtggccagctctcacagcattccaggggaggatgcagatcgagaagcaggtgttgtgtccaaccatcgtgagccctgagaaagtgggttgggatgtggtggaggggagggaagatgcctgggtggcctttgattcccctctgatggagagactctttcaaatggatgagcacccacagacttttactttttctgatgacagagatgctggggggacccagagttgatgttttaagtgtatttgaacatggctataacaaacacacttttaaaaggaaaattagatgtaatacgctacacgtggatataatatttcttagcagcctcggctgtctggagcagagctacattcagaagcttaacggtcctctgagctgtagaaacagctctcatcaagcccatgctctaaagcctgtgacctttcgtccataggagacagagtcagctcacattactttgatacattcatgaactcactgagcaaacattgcccgaatttcttcaatatgctaggccctggctgggctttgaggatacagaggaaaggcatccatctccacagtcacccctaattaggttactctctagtgaggagagacaaatgagcaaacggaacattgtactctaatgtgctgggtgctgtagtagcagcagatgcaacgtgtggaaagagcaccctgaagggcatcacccccagttaaagggagagaagagatgtaagtacctcgtgtcagtcgagcttatagtcctttgaattcctaacctacaacacctagtaagcagcagttttttttgtttttgtttttgttttttttttttttttttgacatggagtctcgctctgtcacccaggctggagtgcagtggcgcaatctcaactcactgcaacctctgcctcccaggttcaagagattctcctgcctcaacctcccgagtagctgggactacaggtgcgcggcactgtgcctggctaatttttgtatttttagtagagatggggtttcaccatgttggccagactgatcttgaactcctgacctcataattcacccgccttggcctcccaaagtgctgggattacaggtgtgagccaccgtgcctggcaagataagcagcactttaaaaagggacaagagaaatctacttcttagaaaaagaggtagtactaatatcctgagagagagaaaaaaaaggttgaatgtatattcagtattccatgaaggcagcaaagggcatacttttagaaagctttccatcaaaaagtataatttagaggattcagcttcttctcaaaatgtcctttttatataaaatatctcattcttttcctgatggtgctggataaatgaggcattgctcaattagattttctggcttgttatttaagtatcaaaaagacatcctctgtaaaaagcttcagtgaaataaggggaagagttttgctgggggaaagaatccccagagtgtatctccatttgaaaatgatttctacctagaaaatgagccccaaaggtcagccggtttggagaatagacaacctccttgttcttggctttgatgaaaggacgatggcatagagcgaagacttcactgctttcacctgctttttctcctgggttcccctgagtttaaaacccacattctgcctgagaagttcagctgtttgtgattcaccaggattaacttcatgcccacctccccacacctccctgcaccgccccccccgcattgcaggagacagcacagtctgtttgtttgtggattgttgcagtcttgtgttctgcaactgtgtgtatacgtgtatgtacacataatctgacagtctgaagagcagaatttggctggagttctattttttccgggaactcaacaacactgacctacatgtgtttccctttgacctacatgcaatgcaattcaataagcatttgctgagtttgtgccaggtcttctgttcagggctgactttaccaagataaaacaatggttccgtcctcttctgtgtgaccaaagggatcgtgggaatgggtggggcatgtgtgtagcccagaatcagtcctcactccaaggcagggagaggtcctctcccttgacctttggatttgctcatgacagtttgcagggagaggtagcataggacagttgggcacatgaagggcttgagcactgagtggaatgtttgccaatttatttccacccccaatccacactgacaaacttcctggaccttacagatagaatggggagaaatctacacctctctctccagcagctatcggtccacattgggacctctctgcatagcacacacacaccacctgtctctgccactgttagctccaccctccattttcctggtcagatctgcaaaatagagctcagtgaggtggtttcccctacattaggcaaaatagacttggttctccctggccttatcttggccatgggagggtgcatctgtgaaagtcactcccctcagcccctgcatgacttttggcaagaaagaaattgggggaaatggaaaaatgggataagtaagatttagattctcaggagtcagtgagagacaggcagcatattgcctactttgagtcaagtgagggatgggaaatgtaaaatcccattggcccgcaagtttgggtgacttttgtatattgctttatggtttcctttcttgtaacttacacaagtacagcctagcctcagttattcagggaacaattaaaaacccttgctgggaactagccaggttcctttttaccttggccaggtcttcttcccaaatggtaaagggtaaggaaggctggccttacccacggggaagtgggctgctcagagacttcattaaactaaggcttgacaatggtcaagggatttgtttgttcctctgggtctgcccatctcaccaccctgggcagggggtgatgggcttcgtaacttgtgtttgttcccacgttcagtagtacacctctgtcttatcggtggcaaatcttccaagattcatgctgatttttcacattcattttaggcaaatatatacttttaaaattgatgatcctttaacttgaacatctacattttctttaactcaaaggacttaccagcattactagaatcatcaaaaggttttggttttttcctaaaatgaaataggcatagaaatagcgaagtatggcccaagtttttgtccctctcatactatgaccctacctgccactgccaaggacttccacaccatccattataggatgaattttctttcctgagttctgatctcaaacaccatggttaaatctcttttaaattgttcgcctcccagatgacaggccgggaccttctcaaggatcgaagtctgaagcctgtgaagatcgctgagagcgacactgacgtgagtgagcagagtgacacgctgacccctcagctgcctcctgacccagacccc

SEQ ID NO: 2586 - DNA, 12873 bp, Homo sapiens
aggaaaaggaggaggaggcagaggcggtctgggccgggccgggcctgacccctgcgtcccgggggcacaggcgttcttaaggctgcagagccctgggtcccccacccggccccggttcactttgagcggtcccaaggcctgagggcctactgtccagtccccaggttatcgtcctgagcaaagacagaccccgagccctgcggtcttggggctcaaacagtccctggatggccaaacaagcaaatattcgccatggcagtgggtgctggaagggtggctcacggagctgacgccctccgcagagaaccgtggtctagtcctgcggtcacgaggcctatctgggacagtggtgtttgagctgagactttaacgaatagagacaggtgaggttcctgcagcccagggcttcaggcactgtgctaagcagttttcctggaagtgtctacctcatttcgttctctgaatagctctaagagcgtgaacaaccccagaaggaaaaagagtgctgttgttaaaggtatctggcatcatggacccaaccatcaccaggagtttctcacttcatctctgctttattgtagtataatttgcatacaataatggcacacatttaatgtgcacagtgtgataaattttgacatatgtatacatccatgaagccggcaccacaatcaagataatgaacatctcgcttaccccagaagtttcctgtgccctgtcactcctccgtattcctccatcctcaggatttcatcaaatggtctgctgcactgtgctggaattttgaactccccagagtagtaaacaacatcttctcaagggtatacaagtcatcagatagagaaaacacccattatagagctgtggagcccttacgatatagtgctatgctgcaacaaattagacagaagagtatttgttgaataataaaaggtatcaatgaacgaacaaataaattaatgagctgatgtattgattaaatgaatttacttctttcagatttacttttccaaactaaaaaaaaattgttttaaactttgttccaaagttatacagtttttacaaaaataaaactttatttttgaattgctttatatttacagaaaagttgcaaagatatggaaagttgcctcaccctataattagcttctgacattagtatggtacatttgtcacaattattgaaccagtattgatgatatgttattattaactaaattctatactttataaagatttcctcagtttttacctaatgccatttctctgttccaggaacccatcccagaaatcacatttcatattgatatcaagtttcctaagactcctcttcgtaggtacagtttcagggccaaaattttaagggccttgagtgttttgagcagtactggacaggtgttttttaggatgtccctcgactgagctttgactgatgaattgctcatgattgaattgggactatgggtcttcagaagaaagatcatgagccctttttgtcacatcatgtcaaagataccatgccatcaatacaacttattactgatgatgttgacattgaccacttgactgagataacatttgtcagatttctccactgtaaagttacttttccccactttccatactatactcttttgtaggaagtcactatgcacaggccatacttaaagagagctccatctccttgagggcagagtaactacattaaatatttgaaatctttctgcccaggagatttgtctatttttccaatttatttattcaatctattattattatgttagatatgagaccttgctatgttgcctagatgggtctcaaactcctgagctcaagtaatccttctgtctcagcctcctgagcaggtgggactataggcatgcaccactgcacctgacaatcatttattgatggcagtatgaactcatggacatttgttttatccttaagttataacccaatattatattattttattgctaaattatttcagttttggccattgaagctcttttgtttaatgcccatgtcattttgacatacctctatcattgtgggatttctttttacttttttgcagatatttctttagtttttggcactacaagaggctctagtttcatcatctatcctgccccagcccaagattcaaccatttcttcaagtagcccttgctcttttttactgtacattgtaattaataatcaagttcttggcactaggttcttcagaaatttttttttagtttatatgtttgttgataaggtattgataaagattctgctagtgattaccaatgtaacttttggcaaattatctgaaacatggaaataataatttctacttcataggactgttgtacattttaaatggattcactaggatagtgcacggagtaaaaggaaacaaatagtaactctaaatggtattattacaaattcattggaaataaataaatgtaaatttgcttccaaaagtcaatctgaattctctggaagttttgtttctgctttgacatgttttcattgctatatacgtagactaagaagttagagactctgattctaggcctagctcggttgttaaaaagaattcactccagtcatctaatgcctcctcttttaaaatgggtataatactctttgctgactttaaccccacagggttagtctattggtgtaattgatataaaatgaagtttatacaaatgtataggtggcaatattaccaccatttttgtcggtatcataggcctctgattcattcattgctctttgcagctccattttctttctccttttcttaaaaagtgttgaccatactatcttgaatccatctatttattataaactttaattatgtcaggttttgaaaaactagtattcaagtttagacaacacaattgtgttcaaatgctattacaacgaatccacattgcacaactattttagagacttaaaatttagttaacatttttctaattagttcgcagacagtagtaagctggtgagcccacctagttcttggtcttgagaaattttcattcaactaagcataactaagcctactgagttactaagtcataaagaaagtagaaatatagatgtttgggaaagtaagggatagcaggagtgtgtggcatcttaaaaatgccctagtatcaaattattgatgcaaagcagttggctactgtcttaaaaggaagggacatcaaccatctagacaagatcaaatatcaaagtcgatgggttttgcaaactgatcatcttgttttcctcttaccaaggtaaagcaaggtgcttcgacacacctgatagattacagactgtatcaatatcactatatgagtaatgttgatctccataggatgtgtcaaccttcaaaaacattttaacaggtttatgtaattgtttgctatctcgttgttgggcagtatggataagaaaaagtgaatatttagctctaaatcctttgagcctcacttccttcaaaatacctgtcagatcatctgcaaaaattcactctaattgatcttaagacttaatggcaacatgttgagaaggagaattgaactgggttcccatgctaaatgtgtttaaagtcacttctctgatttattttctttctttcatggacagcaaattcaaacttaactatttgtacgtatcagtgaataccttttgttatgggtgtaagatttatttgcaaatcggcaaaatggttaatcaaatattttgtgtgcattatctgatctcttaacctttctgtgcatctgattcataaataaccaaatatattaataattctttttttttttttttgagacagagtctcactctattgcccaggctggagtgcagtggcatgatctcggtacactgcaagctctgtctcctgagttcaagcgattctcatgcctcagcctcccgagtagctgggattacagttttccaataataacatagaaaaaaggaagaatttgagagtttctcagattaggcaattccttgaagaatctgagaacacagaagctcccctccctactttccatgattgaaatcagtgattcattggtttctttgtgtgggcttttgaaagatcattagaaaccaacctgaagatcatgagattcttgtggacacaggagcaatgagtggcaatacagtgctttctaatgcaacctactttaaaaggtaaacagataaaagaaaataccgaagactgaaaatgcagaaaattcaaccatgcagcccattccaaattaaatatgtcttcctctctaattcctctcttctagcagagaaggggagatgagctatgactccatgctcatgcttaacaaaattgtgttagattggtgcaaaagtaattgcagtttttgccatttaaaagtaattgcaatgttatctcctagaatttttatagtttcaggtcttaagtttaagtccttaatccatcttgagctgattttttgtatagggctggacgttcgcttaggcaaggatttcatgaccaacaacctgaaaggaaatgcaataaaaacaaagataaatagctggaacctagttaaactaaagagcttttgcatggcaaaaagaagagtcagcagagcaaacagataacaaacagagtgggagaaaaccttcataatctgtacatctgacaaagtgctaatatccagaatctacaatgaactcaaacaaatcagtaagaaaaaaacaattccatcagaaagtggctaaggatatgaataggcaattctcaaaagaagatatacaaatggccaacaaacataggaaaaaacgctcaacatcacaaatgatcagggaaatgcaaatcaaaaccacaatgcgataccacctcactcctgcaagaatggccataattaaaaaaaaaaatcaaaaaacagtagatgttagcatggatgcggtgaacagggaacacttctacactgctggtgggaatgtaaactagtaaagccactatggaaaacagtgtggagattccttgaagaattaaaagtagaactaccatttgatccagcaatcccactactgggtatctacccagaggaaaagaagtcactattcaaaaaagatacttgcacacacatgtttatagtggcacaattcaaaatagcaaaatcgtggaaccaacccaaatgcccatcaatcaacaagtggataaagaaactgtggtatgtatatataatggaatactatgcagccataaaaaggaatgaattaacagcatttgcagtgacctgaatgagattggaaacttattctaagtaaagtaactcaggaatggaaaaccaaacatcatatcttctcacagatatatgggaactaagttatgaggactcaaaggcataagaatgatacaatggactttggggacttggggggaagggtgagaagtgggtgaggtataaaacactacaaatatgctgcggtgtatactgcgcaggtgatgggtgcacgaaaatctcacaaatcatccctaaagaacttactcatgtaaccaaataccatctatacctcaataacttatggggaaaaaagtaattgcaaaaactgcaattacctttgcatgaaccaaaggcctactttggagagtcagaggaattcttaaccataattcaaccaagacatacggtatgtgccttctctttggtggaacagtgaatatacaggctactagcctgtactgagtgtttcagccaaaacacattcttttaaaagtcacagttttaagtgacaatatcccaatgaaaatacaaattaaaaaatgcattggcatatctatattccctcccaaaataacacacatttggaatatataaagaactcttaaaagtcaatgagaaaaaaagcaatagctcagtagaaaagtgggaagaagacttggacacttcagaaaagagaatatattaaaatagtccataaacagaaataaaaggtgctcaactttatgagtcatctgggatatgtagattaaaaccacagtgcaatattataccacccctaccagaataactaaaaagagtaagttggaaaatactcagtgctgatgagaaagtggggtaattgaaactcttatacatcattctaggaacatccacttaggaaaacaacttggcagtgtctaataaagtccagtatatgcattccctataacccagaatttttactctcaggtgtatacccaacagaaatgcaggtgtgtgttcaccagaaatcatgttcaagaatgttcatggtatcactagtcatgaggcacaaaaactggaaatgttcatcaacaatgagtaggataaataagttgtgttaatatttatacaattgaaaattatacagcagaaagaataaataatctaaacctacacacaacagcatgaagaaatctcatgagtggaatgttagatcataacctaaataaacttacctggagcaggtgccactgaagccataaaatggtaggatgaattgctggaggctgactatggactagcttgacagtaaaaaatttggggaggtccattctgaaggaggcccctcacactttcttggattttatcttcaggaagcccaccagattttcatggtgaagatcttagaaaacatctctcatatcttggtcagttgggggaaagtagcattttgaaataatcctagagcattctccatagccaaggtttactcctcaacggaaacaactttaccagagccttagttgaccatggagaagggcagttagccccctacatccctctctagctttcttgtgttacttagtggaaggaaaaaaaggataagaaacacttctgaagtccaattcagggacttgagcccactaaaagactgaaatatacttacctcctccacaccttaccaccacatcaacacagctccagaataatcacaatgggttacaatggaaagagctgcaaaacatagactctatttaagaaggaattcttagggaaatccaatgtggagaaaacaaagacactgaggaaactaaagtctctggcatctatagctatggaaaacatgaagcacaacccatctgctaggcagattgacataaaacctcatactaaagacctattttcctcagttctcattacctgatacatcatgtttgacttttaacaaaaaatcataaggaaggctatacaaaaagaaaaggaaaaacacagtcagaagagacaaagtaagcatctgaactagactttgacatgaaacaaagtttggaataatcaaatagataattaaaaataactatgattagttatgttaaggactgtaatagaaaaagtataagcatgcaagagcagatgaataatataagcagaataatgaaaactctaagaaagaatcagaagaaaatgacagaaatgaaaaacactgcaacagaaatgaagaatgcctttgataagctcattactaaactgaacataaacaaggaaataatcaataatttaaagatatatcaaaggagacattgcaaattgaaatactaagagaaaaaggactacaacctccattccaatatccaagaacaattacaaaaatataacatatgcataattgaagtactagaagaagaagaaaggagcagaggaagtgcagaggaagtacagtagttccctcttatccatggtggatacattcaaagacccccagtggatgcctgaaaatgcagatagtaccaaaccctacctatacattctatgttttttcctatatgtacatatctatgataaggtttaacttataaattaggcataaaaagagtttaacagtataataaaatagaaaaattataacaatactcagaaccaagcacaactgaaaacttgtgaaatgtttatttctgggcatggtggctcatgcctgtaatcccaacactttgcaaagccaaggcagatggattgcttgagctcaggagtttaagaccagtgtgggaagcatggtgaaacctcatctctacaaaaaatacaaaaaattatctaggtgtagtggcacatgcccatagttccagctactcggggtggtgggagggtgtgtggtggggggcagtgtggggtggaagggagctgaaatgggataatcgcttgagaccaggaagtcaaggctgtactgagccttgactgggccactgcactccagcctgggtgacagaatgagaccctgtctcaaaaaaaaaaaaaaaggaaaattattaaggataaagatgggcattaaataatgagaaaggggcaattatccaaaaaacataataattcttaagttatgcaggtaacacagcatctaaatacatgagacaaaaatttataaaactgcaagaagaaataatcaaatttaatattatttaataatatttttggagatctcaacatccctatattaataacagctaatttcaacaagcagaaatcaggaaaatgttcaactgaatagcactaacaatgaacaggatctaactgttcaagtagcagcagaataattaatcaagtaacagcagaatacatattcctctcaagtttatatgggactttatgcaaaatagaccacattctggggctgaaaaagatgccctcacaaatttaaaagaatagaaggtttactgcatgtgttcttagactataatgaaatttaactggaaatcagtgccagaaaaaaactcagaagtccccaaatagtttgagattaaataacatacttttatataacacataggtcaaagaagaagtctcaaaggaaatttaaaaatatttcgaactaaacaaaatgaaatgtacatcaaaatttatgggatgctcaggaaaaatagctagtggatgcttggcttcatacctaggtgatgggttgatctgtgcagcaaagcaccatggcacacgtttacctatgtaacaaacctgcacatcctgcacatgtaccctggaactgaaaataaaaattgattaaaaaagaaagagaaaggataattcctttcacccacagtttcctgtctcctaatagtccttctgttgtgtctttaaataaatgtgtctcaaatcttaagatattcataaaatctgggattgcagatgtattttgcattacaagtcctatttttattttttaatggaatgctgtaaaagcagttcttagaggcaaatttatagcagcaaatgcatatattagaaaagaagaaaaatctaaaatcactaatagaaatgtgccttaggaaagtaaagagaggagagcaatttaagcctcaagtaagcagaagaaaagacataaaactttgagcagaaatcaataaaattgaaaacatgaggtcaacagagaaagtcaataaacccaaaaggcaatgcctttaaaagatcaataaaatcgataaatccatagccaggctaaccaagtgaaaaagggagaagacacaaattataaatattgattccatagacattaaaaagataataaaagaacattacaaacaaatgtatactgacacttttggtaatttagatgaaatgaatcaattccttgaaagacataaaccatcaaaacttatggaaaagaaatacattacctaaatagatctatatttatttaaaaaatagataaatcattaataatctttcgaaaaagaaagcgtctcgcccagattctttcactaatgaattccaccaagcatttaaggaagaaataatgtcagttctctataatcacttttagaaaatagaagtaagaggtatacctcctaactcattcaaggaggcaggcattatcttaatatcaaaaccggggaaatacactacaagaaatgaaacctacagctcaatatattttatgaatatagatggaaaaattttcaataaaatattagctaattgaatccaaaaatatataaaaatagtaatacatcacagtaagtgcaatttattttaggcataccagactgatctgacatttattaactggctaaagaactattttatgattctgtcaattgatgcagagaaagcatttgacaaactccaacatctatttatgagaaaaagtcttagaaaactaggaataaaaaacatcctcaacttaatctggaacatctaaaaaatgggacttcacgctattttatggtgagaaatgatatgcttttcttctatattgggaacaagacaaggttctttttttgccactcttattcaccatcctactggatgtcctaattagtgcaacaaggcaagaaaaaatatatatacagattagaaagaaaaaaagaaaactacctctgttcaagatgacataattacttatttagtaaaactgaaagaattgactcctggaattaatatgtgattatagcaaggttgcaggatgcgaggttaatagaagtcaattgtgtttccatgtaccaccagtgaacaagtgaaaattgaagttgaaaacaaaatacaatttcattccttcccccagcaaaaatgaaatataaacaacaaaatatgtatacaacgtatattatgtatatggaaaattttaagtctgatgaaagaaataaaggaagatctaaataaatggagatgtaccactttcatggataagtagattcaataatgttgagatataaattcttcacgaattggtgtatacatttaatacaattctaataaattctcagcaagttattttgtggttattgacaaatttattctattttttagcttcatctcaaaagatgattttaaaatttatatggaaatgcaagagacccagaatagtctacataatactgaccaaaggactaagttggagaactgacactactcatagtactacaaagctacagtaattatgacagtgaggtatttgtacaagaatagacaaatggattaatagaaaagaggagagagcctcttttagaccctcaactgatccttgacagagcaaaataaattcaattgagaaaggacagtcttttcaacaaataatcatcaaaaattgtgcatatacatgcaaaaatgaatctagacatataccttatgcttttcacaaaaattaatttaaaatggaccttagttctaaatgtaaaacaaaaactagaaaacttctatgagatagcataggagaaaatctaggtgaccttgggtttgattaaatcatgatccatgaaagaaaaaaattaaaaaaaaattgaacttaattaaatttaaaaattgttatgtgaaatatattgttaagtaaatgagaagacaagccacagaatgagagaaaatattttaaaaacatatccagtaaaggagttaaatccaaatgacaccaaggtatttaaataattctatgtaatgatcaaaagatctgaacattcaactcaccaaataagatgtacagatggcatataagcatatgaaaagatgctcaacatcttatgttattagagaatagtaaattaaaacaacaatgagaaaccactacacctattagaatggctgaaatccaaattactgacaacaaccaatgctgttgagaatgcaatgcaagagaaactctagttcatccaattttcaaatgtgactgtaaaaggctgcagccactttagaagacattttgtctgtttcttacaaagctaagcatagccttgcattataatctgcagttgtgttcctctgtatatacccaattacactgaaacattatgtctacaaaaaaatcctgaaaacaaatgtttatagcaggtttattgttacttggtagttaccaaaaatggaaaacaatcaagatgtctttcaatagatgagtgaataaactataagatatccataaaatggaatattattcagcagtaaaaagaaatgagctttcaaatcatgaaaagacatggaggaaactcaaatgcatactgttacatgaaagcagccagtgtgaaaaggctacatgctatataatttcaattagatgacattttggaaagaagcaaaactgtaaagaaaaagatcagtttttgcctggcgttcagggaaagggaagaataagttaagcacaggagacttggggagctgtgaaatgattctgtgcaatattggtggaattttggcaacattatgcatttgccaaaggcaatagaagtttttgacacaaagagttaccataatgcaggcaaattttagaaaattatttagaaggtcagaggatcccagaagcaatgtggactttacagaagaaattcactgcattacaaagcatcagataaccttagtaaggtggagagagaaaatggtcttaacataaatatctttaaaaatgaatggaatctgtcagactataggcaagatgagctgcacaaaagcactgtactctagctgataaaattatttctcattggcttctggttaacagttctgatactgctatacatatatatgggaattgaataattaagcctataaatggcaaacattgggagttatatttctcacggtgtggaaatttacagatcaactaggggaacagtcttgaataatcaatgtgatgatcattacagttggagacatcaaggagaactaatgtttaacttaatatagatatgggtggttatatatagaaatattcaaagatgtttatgtaaatacacaaaagcacaaccatgacacatctaaaataaataacaccctggtaaccatgggcacacttagtactcaaatgctggagtgcaatggcgtgatcttggctcactgcaacctctgccccctgggtttaagcaattctccagcctcagccaccagagtagcagtgattacaggcactcaccaccacacctggctaatttttgtatttttagtagagacagggtttcaccatgttggccaggcttatctcgaac

SEQ ID NO: 2587 - DNA, 10059 bp, Homo sapiens
gggatgtgtcctacaatcaccatcagccaggaagtggtcaggatgcagtggttataactggattattttccctggcctggctgaccatctgcaaccccctggtgtttcaatgtacaaactattttaggaccatctgcgtactggctgttgcctgaaaatcttgtgttgatgtggatttgtaagactgggaaagcaccagcattcaaaacttgaagaaaggtgttagcagtttggcagacaatcctacagaaaactctttattcttgggggagaaaaagttgcctcccatcaacttcaatggttcacaggatgatgacgtgtggggaaacacaaacctcgacaacattgagtccaaatgtgtttcggaagactcagaatgaagaagaagatgccaaggaaaaccttaaccaatttattttcctttttaatgagtgatatgtgatttttcaaaagcctaaatacatctaaaagagctatatcagttaagtataagataaaaattctaaaccatagaaagcactgttactgcttaattgacagcaatttttctttctttgcaatgtataaaataatgggtgctttttatgttcactgaaattcatattgttgtctccttttacagctgggaaagcggaaatctggagaactaaaatatcttgctgaagatcacaatgcagtaaagcatagggcaagtttccaactcgaacatcaccccagaacacttccttttaaacataaattatgttgctaacttttttattgttacttagcaggcagatttcaaactgatacaaatgttgaaaatgatacaaaatgttttcccaccttaaaggcattctgaaacctagcacataacatctgtcactgaagtccatagtttccaatgccatgattggataaagaccctattgagactcatgtgtttgtctctcactgcttaaaacactcatgtgttttaagcaacatgacaagcacaaaagagaacaagtactgctcctgctctccaggaagttaccataaaataaaggggataaggtgccttccaaagaaaaaacaaatactaggagaggtcagaggagaagagagattattccagaaggagagactgaggcagatttcaggagggaagaatataagagtcccaaaagaagaaacaggaacccaggttagagagcaatgggcaaggggtaggaggtgagactaaactcacaaggaagttgcttcaaaacaatagtgccccaaatgccaagctgatgggttggacccatttaggaaaaacccacaaagtccacaggagagcagactgcacttccatgagcttcaagctgtaaacagtaacctcaaataaaacttttcccggatcggtaatttccatcctgaacaatggccaagtcaaggaagctgaggatcgagccccctaccgcatgccacaaagaacctcaagggaccccatgctctggggagctcgcaggaggaccagcacagaggtgtgactgcgttggggcagggtggccacatgtacaatgttgtaccttccaatgttcctccttaggctgtgcttatgaagtcccaacatgtcttctgggctgtgttttcaaccaagagagttaataaaaagtgggatgggcaccaactatgcctccagagacatcaggcagaatatgccacagcgtgccatgtcctcctgcaaacagtcagaaagaaaagatctctaaaagcagattggaagagactatatatacagagcgagtgccggtacagaagttttgctgcaaatacaccctctaatcccttgcaacccactgcaagctcgagagaccagtgcccttggtaaaacataggagagatcattaattaaagcctaggccctttctttgatcctgagggataaggcttgggaaaatgcacagtgataaaagtgaacattttaaaagagcagagtgagtgtgaattcccaaagagaccattcatatcaagacccaagccatgagaaaatgctacaatgcccttgatcaatactttataggcattttgacctcagatctaatcccatgaggcttagaccaagaccttgcttgatgcagacctctctgactgctgaaattggtcaggagctcagtgatgaaaatttggaaagtcaatgctgatacctgaagaaagtcccatcagagatctgtgacctgaatcttcataactttcacaggccctttctaaatgccaaggaggatgtgtgtggagaagaatatgccacctatggcatcccaatatgcctgtgcccgcctgctcttcaacaagggaatgaaacctgggtattctcataggttttttaaagcacttgtccacatattttattccgcaaataacacaatttaaaattcagctagaatttgccattttctgtcagggttgtgcatttcttccagtcaccatgacttcctgagatagccaaaacacaaaatttaaattgtgtttaaattaaataaacacaatttatgctgaagctgactttacccactctgttccaacattacttatcctcagcatctctgaattcaaatatcagccaggtgtggtggctcatacctgtaagcccagcactttggcaagccaagatgggaaggttgcttgaggagttggagaccagcctgggcaacatagcaagacccccatctctacaaaaaaattaaaaaattagccaggcatggtggtatgcacctttagtcctagctacttgggaggctgaggtgagaagatcacttgagcccaggagcttgaggtggcagtgagtcatgatcataccactgcactgtagcctgagcaacagagcaagaccccatcccttaaaaaaaatacctgccctctgtacttcatagcacctggggcattttgaacagttcttccttcacctgaggtcattatttgagaatccaattttagagactacaatgctctcattacttggattgtatcatttaatcttcccaacaatccaggaaggggagtctcttaatgattgtccttgatttccagttaaaaaatctagacccagaggtaaccttgtgaaggtcacagagtttcagagttctaagatcccatgcgagattgctgaacttgaacttgtttcttctgatctcatgtcaataagtgacttagtcaacacctgggtagaaatcatcactaaagtgagaaagcacatggtgagggggatgaatcctgtgcccacatggtccctttcacctgcccaatcctcaggcctctcacctggggtacccctcacacacatggcactttcctgaactcatggacatttcagtttgtaacgatcctcctaagattatctactttcacctatccacatttgaactatacttctttagtggaaaaaaagaaataaagccagtgctgagaatgatcaaactccagaaatagtagactgctgtataatttgtcttgcgtgacaccagatctttcaaggaactgcaagctcaagtgcacagttaagcaagatcaagatctacctttgtctttcagagccttcccttggcgaggtcaaggatatctgctgtgagcctgggctggctgaaccaaagggcaatggaggcggccaagaagccccagccaactgctcccctccccaacccccttctccctggaggtcccttcagctagaatttgccattttctgtcagggttgtgcatttcttccagtcaccatgacttcctgagatagccaaaagcatttgctgtgagcagagccccatggctggctttgcacatcaaacatttcagacagccatatatttcatagaatacaaggggaagataacactggacacacagaactttccaacagcttgagaaaatgtggtgcctggtgactgactaaatatacaatcggacaacagccaggccatagcaaaagatggaactctgatccacaaggtgcagcaactttcccagaaaacaatacccttacccacaaaaagcaaccccggaagctggcctgctctaaatcagacctgctggaagccaaattgctctctagtaactatccaggaagctaaataataacttctgtaacaattgactcaaaatgttcaggactggattaataactgatggcttccctaatttttgtccccgattccaacttaggacccaccagagaaagccaaatatggtcccctgaccaagcacacaggatgttcgcttctagtgagccgcctccagcttccccgcattgataacctccaatcagggcacacctgaagccttcgcctttttccactataaagctctcccactcgtctgcccacctttgagtctctgccaaattgcaaatgatggtgtctgactcccttgctgtagcaagctctgcataatagcttgtgcttattctctttgggtaggtcttcatttcttttcacaccagataggcatcatctttgaaaacatctttactgggtctcttgtctccctcctgcagccactgatctaaatcacagacttttttagaaagagggaaaatagtaaagaaagaaagcgattgagttgatgctcccagccactgtctgtaccctgaattttgtttttctgccatatgtcaggtggcctctcctggaccatcgtcactgtttctcctgcttccctgcagctgcagacacaggagcactgtgtaggtctggccttgagcacccacccacccagtacagagccagcccctgctgttctgaatcagtgcagtgaccacttagaacacagtgcccatgcctctgtgatctgaactgctctttccagttccatacaatgttaagaacccacttaagaatgttttaatcattcagtagtttttcgtggtatataataaaaaagtgatttaaatacaatctattttattttagattatatcattaggggttattttacaaagttacctttaaatactattgtaaataaaattaataacaaataagcaaaattcttacttttccttgtttgacaattgacatggtcaatttaatttcctttaaattaattatgcaagaaaaggatatttcctcaagaaaatttaaaatgatatatatttcttggttgggtgccaaatattcattcagaagaagacggaaatttaaatccttgtttctaatttaaggaaaaaactactttcattattggatgtgtgaaattcacccattttgtgtttatctagaaaatctagtttattgtccaaatgttcttattttccccaaaagcatcagttaggagagaagatttccagctgccattaaaatacaattgtgtgcaatgaatacattttgggtatagatagtttttattctctataaatgaaatgccaaattggatagaaccatcctttttttttttttttcaaaaaaaaaaggcttttggagtatcagagacatcctcttatgttattttaaaataaataattatttgagctgtttgcttcttggaagcagataacaagggggcaggtgagataaaaaaaaaatatatccaaactgaggtgagaccaaagatggccaatctaagaaccaggcagatgtctctgcctgtcctgggaagattccctcaccaggctccctcactggccagaggagcccacttgttgggctgccaactggttcctataaattctaaggcaattagaatcatgtggtgactgtaacgggaatgacacagctgcccaggcattagaaggaaaccacacccaatggctcaagccagtggcgagagataaaaactgagagacatctcccctgactagcagactgggctccctgcttccccattgcttcctttaaacaggccattcacacatttgcctgaaaacttacagtggcccagaccctactccctatacacactgccagttgccatgtgccttgtttctctctctctgcatgatgcttcattcctatctggagtggcccagggacaaaggactgccctcccgactctctgtgccctccctgcccaggatccgtaaattacactttttgaatttgtttcctactgtggtgtatattgcctttgcaccttccatctgaagaccaggggatgccccaggccaggttttacctgggatgcccaagagagcacaaggtttggctcccagcgccagagcaatgggcaggggggcataaactgaacacaggaaaggcaagagccacaaagacatataaacaagtttcccaggcgaggagcccctggtcacaggtcagacaactaggcattgggccatctaccaggtaaaagcagcatcctatgaaaggcacgcagtaaataccatgtccatctccccttcatttccccttagggcggtttgctagctgttctgggactggaacctcagtttagctgggggctctcagaacagacagctagatgaattaaacaatgaagtctctcagccttaggcacatcttccaggacaaggggaaggccaggggagagtaacatcagtgatcctacaagatgtgcttccaggccaaggccaggttgcagttgcagctacttagccatggtacacggtgggcctggagcttctgggtgtgcaaagatgtgactcaagagtccatctgccagcagtgagcagggcaggccagctctcctctcactggtacggtggttccagccctcacaggacattaaaaccacctggaaactgtttatgaaggttcctatattcaggaaaaatccctagagattctgaccgaaggaatttggtgctgcctgggtaccagtatttttaaatttccccagatgatcctaacatgcagtctgagtgaaaaacccaagtttgacggctacaggaatttagagcttctctaaaacatacagggaataataccagggccatacattggaagtccttccattgggaatgcaaagaaaaaagaaaaagatggccaacatctaccattttaaagggattccagcaagcatattattaaatgcagggctgcctctggcatctggaagcagcttgggtgccctggatataattctcttttaaaagtttttttcacagcttttatagaccacttaaaactggccttcatcttgtgccaaaatagcagggctgtgtttgtttagcttcaagattttcaggtccaattgattaaaaaaggtgagtgagaagcctgccaacacacagtgaggctgtcacccaggcagctgctgctgctggcttccagcatccagaagctggaacatcagccagctccaatcacctgacagaggatggatcctatgagaaggaggaccggggcttaaaaccagacgtacccactgaagtcagggcaggagatgaaaatcttaacaagtgaaggaggtatgaaaacaacagattctagggatcagcaaccaatgaatgagggtccattttttgaaaaacaaatacttctactggctgtcttttgagtgccaggcattaaacaaagtggaagaaaaaaattggagggtgactcaacagatggaccagatcaataatgaggggtaatttgagcaggacaaggctggagctggaagtgcatgcaggatgccagcatcagagcagccaggcatcagagagccagccttgactactcgccgggcctcaggggctgagccttcgtcccaggacaagggagtggccagagcttggctggccccgttccagatgaggactgtgataccagtcaggtcaacgagcaccgatagaggtagggcccaatataggaccgtgtctcacaatggtgcagacccgcagtccaacacacaggaaggatgcttgttgctaagtcttagacacgggaactggaggagggttgagggcccccagcagtgggaaggcaggcatggcatgcagacggtggacgcggactcaagacaccaactctcatcactacaggtccgtggtttggaaagtcccagcaccattccagagaaggaaacaggcccaggtttctgatggggatgggtagtagccacagagcacaagtcagccgcacccaccacacacttgctgtagtgccacactctcggccctagagggcactgacgctttcccttcgctctgccccagggccagggccaaagccatcaagtcctgggcagagggcgggagcgttcagtgagagcagcacagaggttaaagagctgctcttttttgagatcttcgctctcacttcctttccaggcagccagttcagcaaggtgggtctggggctgcctcctgggagaagaggcctttcaccctcgaaccctgcaggacctcagtttgtcccagggcaaacctcctacattgggcagttaggtcagacctgcttcaggccttggaagactgtcttctccttggcttctcttactgcactggatccagccaggacactgatcagacctccagggcccaggttaacaatatgtggcccagctctgggagagaagccagcaggtctcccaggcttttgaactcggagctgaaaaccaaacaaaaaaacgaatccaccccattgacaagtggcccagcctagttggccagtcaggagactgcacaggcactgaggccaaagctgccttggattaagaggtatggatgccaccgctgcccttttactacaggtacactggccgggaacctgtagcactgagtgacacctgatcagagagtcacccactggctgggtctcccccaactcagatgcatggctaacaatcactagctaagcatgtattcactctgtggaaagccacgtcacgttcatatatttattatctcatgtattaatatactgatgtaccacattattctaatttactacctcacttaattcttacaacaacctaatgtgatgggcaatattattattagctccattttacagatgaagaaacaagacctgaaaaggttaaacaacttgcccaagatcatccagccaagtcatgataaagctgcacttgaacacacacttctcagattccaaagcccaagtttctctctactaactgtatggcccctgcactcaaaaactgagaaatctctctgccctggaatacaacaagaagtcaaccgtctgcagcctgtaagagggcctctcaccagaacttagccatgctggaaccctaatcccagacttccaggcttcaaagtgatgggaattaaatttctgttgtttataagccacctcgtctacagtactttgttatagcaactcaaatggagtaggactgtatgcaaacaaaacaacccatttttgatatttgggaaaatctaagatctttaatagtagttggaaattttcagcaaatcctaatattgggtgcgtatcagtatatgtgtgtatccacaatatacagtgtcatacacacacccatataagcaccatctgcattatataataggcacacctgtatcctcaacgttggtgtacagatgcattcatattacccatacagtatgttctgaagatagtcaataaactcagacccaagacagtcctcccatcttttaattctacatagaaatcaggacgcacctgataaacagcagaaaatgtaagagaggccaggtgcggtggctcttgcctgcaatcccaattttgacacactgaggcaggaggatcgcttgagctcagaagttcaagaccagcctgggcaacctagcaagacctggtctctactgaaaatcaaacaaatttagctgggcaaggtagcatgtgtctgtagtcccagctacttgggaggctgaggcaggaggattacctgagcccgggagatcaaggctgagtgagctatgatcatgccattacactccagcctgggtgaaagaacctttgggtgagcagagcagaagtcaagcatttctgggtccctggctccgatgctgtcttacgggcaccacttgttcctaacaggaagctctctttgtacacaagttataattacccatcaaacctgcggctctgtgacctttagcaaaatcactgggtgttgttttcagaaataaattagatacagaaatggagaaaatgcacagagtaactccagacatttttg

SEQ ID NO: 2588 - DNA, 11473 bp, Homo sapiens
ctcctgagccaggacgcagaccatgactacttttgcctctgcacgtctgttctgatttctttcttcatgtgggatgcctctctatccttctcctgcttttaatatggagcttcagtctctaagctaaaaggccaagtccagattcacctgccaatgaagctctttaaattatctcttctttctcaggactcactggctatcagacattactttaggtgaagactttccagtctgacttccctcacctgaggtaggtgtttattctttcctcatctcacaggactttgcaaatcccactgttatagcatattaaaatttaaattgttggcttgcatgtctatttttctacttagcgtgagttcattcacagtagtgatcatgtgtttggttcttaacaaaagtggttttctttggattttccagaagcagaacctaagagaaaaattcacgtgaaaataatttattaaggaagggctccagggtagataaataaggcaattagtggagcagggcaaggaagagaaggaagtcaggcaagagtgtgattgccatgcaaagcccaaggagaacagctttagcctgattccacagggaaactttggagtgtaaactaaactttagagctactataatccagactatggatctgggactttggtgagtatctttcggtcactggttagtggaaacctcaaggggaaataaactcccaggcacttcacgacctttttaagcaagggccaagtagctccagtagctgagtggcagttatccaaaggaaaaaatcatgtaggcactcaataaattttgagtggctggctggcgggacaaatggataagtgacaaattatgcaacttggggttgcttaaaagacaacagggggacactgaagacttttgatgaagacagtggtacccctcaacttgataaattgagtagattagtttagaagcattgagtagaatagattaatggaaggaaagtctaaatgcaggaacagtatttaaaagaaaactgccgtggtgacgaaagcctgttctagcatggaagtagcagtatgcaaggtaagacttgccttggattcatattgcaattgaaaatttaatcattcttgatgaatgtcggcatttgtgagataaagggaaagagagaaagagtgggggttttgtgctcaagtgacaatgggattgcttacagaaaaggacaatctaaacacattgggagttgagttattacgatgggctgggggcagagctagtgttaaaagttcagctctagatgtaatgggagtcagtagggacaagcaaatatatgtatagcagacatattggaaaagtgggacttgatcttggaagacatgacagattggaaatatggatgtaagatttagcatttaagacaggagagctgaatatggaatggggagagggaacctttaaaacagaggttattgaacaaagatattgaagaagaacaggactatgacaaatgtcatttggtgatacagagaaagaagagataggaagaggtagaggagaaacaggacttaaattcacactgtattcttatcttactctaatgacgatttaagctggcataacttccatgaaaaacaacttgacaataaataccaaaaatgttttaatatttggatattatattccagcaatcctactttaatctcaacaatcctaagaaatcagccagagataatcatgttagcaacagtatcaaaatagtattctaaatgttgagcaataggagaatatttaaattattacagaaccaaagggcaaatcttacataatcattatagtctatgattttagacactatttaatgccataaaattcttttataaaatattgtttgaaaaaataggccataaaatatataagccaacattactaaaatgtattttgtttatataatgtatatgtgtgtagatatggataggtatgtacacaatctcatttagtgtgtataatttatacactgagtgttgacaattgagtcttaattgattataattgtctatttttttttttcaaatttctccaactgagcatgtcagtttttatgtttttttttgagagagggtctcattctgttgcccaggttagagtgcattggcatgatatggctaactgcagacattacctcttggactcaagtgatcctccaacctcagcctccctagtagctgggagtgtatgcgcacaccaccacacccagctaattattattattaaagatggggtttcactttgttgcccaggatggtctcaaactcctgagtcaagcaaccctcctgccttggcctcccaaagtgctgtgattacaggcatgagccaccatccctgccctgtgtgagttaggttttttgtttcttttaagtggatggtgaaaataaaatcataggagaacttctatctaatataaaagttgttagaaatgttaactttaaaataattataaataaattaaaaaaataaaaattcaattctttagttccattagccatgtttccagagctgaatagctatatgtggctggttaatactgtattgggaaatactgatttagggaatatttccatcataatagaaaattgtgttagattatgtttatgtagactaagagatctgttaggcagatttttcagaaaagaaagtaatagaaattctagaactaaatgcaatatgcaaaatagcctaaattaataattcaatggataagatgcagagagatcattacgtggaagagagggaagaagaaaccatcaataatgatgaaaagagagacaaaaaaaaatatgtgaaaagagaatagtacataattttatattagtattatgcatgaatttgtgttcacatatgtgcatatatatgtatatatacatgtatgtgtgtatatatttatatatatacatgtatgtgtgtatatgtttatatatacacatatatacatacacctcttgctgtttattctagagaaatgatgtgcctatgtgtgtctggctgtttaatcatattaatcatatataatttgtgatcactagaaacacagaaatataatgttcatcatcaaagcattaggtacatgaattgtatattcatacaaagaatcctatcaagcatccaaaatgaatgaaatacgtgactcaagaacataaacaaattgaaaaaacaaaatgtactataggtaaaatcatacaccaagactatatgctttatggttccattcatataaacttcaaaggaaattcttaagagtggtaactaaatgtaataaggaattactgccataaatatttgaaaagtgtagttagtattccttcaatggaacaaagggggctgtgactggaagagcagacagaaggattctagagggctaacagtgatggtttcatatacaagcagtggctccttggctttctttccacacgggtttctttctctttctctgatgcctcccactctgccttgccacaggggttttgcacatgctcgttcccattctgatagacttccttccttttcttttcactctcatatcccagatcagctatcacttcctcagggaacatcagccctaccagatgtggaaaagctaccttcttacataccctctgagaaggacattcattccttccatcagagtatgcttcagtttgtaacattgtaatgtctgacattattgaagtaattgcaccaaaaatgaaattggtacaactttcaccattgaccctccaatgtcttatacattgactataatggcttgttaaattaatggatgaatatggttacacaaattgaatttaaagtgtctatataacacacacatctagtaagcagcaggatatatggaccagttgttcctcagagttttctttctagagatagggagtcacgaataaataagggctagcatagctaatagtgtatttaattgctctggaagaggcaaaaaaaaaaaaaaaaaagtcaaccaaatgaaaaggcaacccagggagtgaaagaaaatatttgcaaacccgatgtctgttaaggggttaatttccaaattgtatatgaaactacaattcaatagcaaaagaaagaccaaattaaaaatgggtaaaggactggaatgacatttctctaaagaaaacataaggccgggcgcggtggctcacgcctgtaatcccagcactttgggaggccgaggcgggcggatcacgaggtcaggagatcgagaccatcccggctaaaacggtgaaaccccgtctctactaaaaatacaaaaaattagccgggcgtagtggcgggcgcctgtagtcccagctacttgggaggctgaggcaggagaatggcgtgaacccgggaggcggagcttgcagtgagccgagatcccgccactgcactccagcctgggcgacagagcgagactccgtctcaaaaaaaaaaaaaaaaaaaaaacaaaacatatacaacttttctttgtcaattatatctcagtaaagccagaaaaaaataagagcaaaacatacatctcctataattcaaccttgatgccttgctccagctgtattgcacttgaccccttcccaagatctacactcccagccctctggattacatgacttttctgaaatatttcttctttttttcctcatctctatttccttatgctttatgtcattttcctgaaatgcctatctcttccttctttgcatcactgtctgtctgacaatgtgttccacagtttaaaattctgaaacaacagaaacaacaacaacaaaaccaaaatagcagctcttaacgctagaagatttttaaatattgtattacacaacaaaacttgacacaacctgaactcattcggtggcaaaatctgatgaggaaacacgggaggcaaaacgtggtgctgtccagtgctggaacaggtgtggctttaaaagggtatacatgtcacattatcattctcaaatccaaatgaatacatagaactctaaattttgcaacatagatgtccccaaatgctctgtataagattgagtatacaccttgtattgtgtcttgcgcttcataatgattgataaatattgccatatagaatgccaaaccaatgagtaattatgtggttttatgaggctctgtcaatttcaacaacagataaaatacatatctcatgtatgatggtggaagctagcccatataattatgaatattgggatatttttcaccccaagaattctccagtctagtgactaatgcctacacagagaagaaagacagtgacaatctgatgaaggatgtatgtagaataaaaatgacagaattggggtaagtgtataataaacacagagtaaagttctgtgatattataaatgataataggtagttttagagttttcaaaacaagaaaagtaatacattaaggaacatatttgcttagagaagtatgattcataccagttgcaaaaaaatagaaaaatagaaaagcaattcagatgatctcaactttattagttttctaggaaacactcagtatgtgatatagactgtagtaacagtctgaagagttaaaagaatgtaaccttagaagtaaaaaattgcagagtgaagaatccatttcctgttttctgcagacttatcttggaaaatttgaagtattcattgtgcaaagaatgtggttacattgaggttactaatgttgatgctactgaaagggtggcctttaaaattgcctcacaccttcacaggatacacctgtccatacttcaactttggaatttcaaaaaaaaaaaaaaaaaaaaaaaaaccaaaaaaccttctagaaaactagtagttctgactaacactcttccgtgccagttgtgtctctaatttaatcatagttgttggtattttccctcttgattacatgccaatttgtcttattcttgcaccctgggatctagacttggagtaaaacacacagggatccagtgttagagcaaacacttagcatgaaaagactttagaactgagagccaggctgaggcctttggtcagatcattaaagggttgcagttttatttctggaacaatgtatgtactatttatttacttagtatttccatgaaataaatatgactttttctttttatttaaatatatttatcatacttaactttaatatatcttaaaataataaattgagttactgcttcaggttatcatgtttattattaacctgtgtctccaccatcacctgcaaagctcagttaaatattcaccatctaatgagagcaaagactattcatgttaatttttaaaatttacttaaaattgtgtcttttacaattacctaaaattatttcatttcttttttaattgtgttttgaaaatatctagctgtgtaatatcaaaaaaacttttgccttttttctttttaagacagggtctctgtcacccaggctggagtgcggtgtgagagcatagctcatcgcagcgttgctcactgcagcgttgaacacttgggctcaagccatcctctgtcctcagactcgtaagagtagctgggattatggatgcatgccaccatgcatggatacgttttgtttgcttttgtagaaatggggttcactatattgcccaggttggtctcgaactcctggcctcaagtgatcctcccactttggcctgtttttgctattattgaaagttgactgaacttagtttaggtaaataatgagccaaaacaaccaaatgcagttcataaatagaagtaggctaattcatttgaaagaatagaaaagcatgtttgtgagtgggtgggtatataaataacttgaatgtaaataacagaaaatctgtttccttgaatgtagcccattggttcctgcctctctattgtgtacctgggccctgcccttcatcttgggtgtcctgcctggagaaaactgcaccatgatgccactaacttccactaactggaatccgcctttccctcctccctttctctccttcacatctctaccccaattaaatccctaaactttgctgattaaccacttaaacatccttttaattcatccatttttttcactgtgtcttttcattgctaattctctatttgaagccacctcacctttttctcacaatgtcaactataatggcctagctgatctcccagtcattccaggcttgtatctgcctaaactaccttccactctgccctgtgctgttttctaaacaacaaattttatcctgttgcttcccaatttcaaactcctcaatgacttgaaaatgccttcagtgtatagctgaacatgatataactctttttttttctgtagcctcatgtttcccttttcattgtatatttcattgtatattacagttatacttcgaattccttgaagtcagggaaattgtcttattcaaggttgtattcccagaacctaatacagtgtttgctatgtagcaggttttcaagataatttttattttaaatttcagtttgatgagtttaaatcagataaatatatgactttttggcatcctgagtctatttctattctttcattttagagtttaagtaagcttaggctactatgagagttacttgaaaactgttatccagatcctctggaggttgaaattctggtaatagaagcatctggtctgttgtcagttctaattttgctcaacccaaacaggcagatagaaatgcttactaacaaaggctgactcttgatactccaaaagtggcaaccgaacaggtgcggtggctcacgcctataaccccagcactttgggaggccaagggcggggagggtggatcaccagaggtcaggagttcgaaaccatcctggccaacatggtgaaaccccatctctactaaaaatacaaaaattagctgggcatggtggcacatgcctgtaatcccagctactcaggaggctaaggcaagagaatcgcttgaaccgaggaagcggagtttgcagtgagtcgagattgtgccattgcatgccagcctgggtgacaagagtaagactctgtctcaaaaaataaaataaaaataaaataaataaataaataaataaataaataaataaaagcaatcaactcttcatttccagaatattacaaaaaatgtttgccggtggatgagaacagatttggtactgtattttattctgtatatatttccttggactgctgcaacaaattaccacaaacttggtgacttcaaacaacagatatttattctcttgtgttctggagtctgaacatttgaaatgaaggtgtggataggattggctccttctgaaggctctgagggaaaatctaactcaggcttcttccctagtttttggtggttgccagcaatctttggtactcttgccagtggcaacctaatgccagcctctgtctccatctataaacgcatctcctccatgtgcctgtgtctgtctccaaatttccctcttcttataagaacatcagtcatattggatttcagatctttagcaatccagtgtaaattcgtcttaactttattacatttgaaaatgctctgttttcaaataaagtcacattcacagggcccaggtagaaatgaaatttggggggatacatttacttctacttttttttttttgatgaatacaaggtaaaaagagttgagtataaaaataaaattacaaaactatttttaacatgacatgagaatattattttcaatgaatcatgtttgtcaaacgatttcaacaaaaaagtgacaaaatccaaaatcgtaataaaggtttaacagctaattaaatgcaggatcctgaatcactgactgacagaattattctctcaaattagaaatatagaaatggtcaagtgtaatttaatatattttttctgatatatggtcatcctatatcagcactaggcagtctcctagttaagcctttccttaacagtaatggtaaatactaataaaatatgccttatcaaatggaattattttgtgttcatggaagtcaaacaatttgtgaataaggactctatctgacaactctggaaaaccatttttattgcttcatttagaaaaggaaatggaaatattgagttataagggaagataacagtttttttaaaaaaccaatctttacatcatgattattagaagctgtgactctcccctataatgaggcacttaaacattttaagggtattcattcacaatattgagatatcagtttgcactttttggaaggcaaaaattaaacaaagtgcaatcctggaataatttacaaagaatagcaaaagtattgtgaatggaccgaaacattcaacaaatatctatttagtactgactctgtgcaaggcactgttctatttgtgggggatagtgtgggacacagaaggataaaagtcaggctctcttgcaacttgcattgccctagtcatgctgaatattctccacctgctcttctggcttcagttctcatacttcactgagttttgagctctgggcactgactaagtactacttcactctggttgctttgaccaacaaaaggcaaagacagcagatcagaagttggaggagagatcaatctgagtgtgatttctcaggatccttccctgctgaggcatagcttggcagtgcctgatttctgctacttacttatgtgtaaggccacagaaattacacatctaattggttcaagtgtctgttccttacccttgctcctttagaccatggaaatagctttagtccatctagctttcttgtaacttgtgaaattcttgaaaactgcttacatatttataaatagccattttgttacattctctttaattatcccctttgaatatgctttctatttcctaaagaatcttaagtgatgcatggggttagaaaggaaatacaaatacatgagatatttgaaaaaaagacattttagcagatgctgtctgcagcccatccgtatcttcctggctttcaccattcttgggtatgctccctatcaacaactcttcaactgagcactctctttggctgcgacagtttgccaggcttaaagataaagtagattgggcatgctagaaacgaatgcatcccttccacttccttccccaaagcagccatcaaccaataattgtcagatggtatggaccaaattgtcagcttcttggaaccttggttggaactgctctgggtcatattcaccctatccttctgagtttcctgctgagcctaggcacctggtgcccacagcagtacgctgcttgataacaaaacttttattggcttactttcttccctcccatatttttccactccagtgttggtgagtcctaggattacctcagcaaatacacattgtagtctctcacacacatatacacacacccatacaaacactacacaaactcacattcttgtgcaatagtaagctctggaaggttctgaggagaggagagatgcacactttttaggctacaatgggcccacgctggatattgtgttgactcagagatttgaagggttgtgagggcagacacactgagactcttttagggaagttagttcatctataacactagtagaccattgcaagaatctagaggaaagatgataagggattgcatctttgccatgatgctatgatgagattgctttttagatcatctgatcaatatttattaaaatgtattatgtatcagtttgtatactagaaattagcaagaaggatactgtcctcattttagaggtaacgacattgagattaggaaagtaaagtaaaatatgcaaaatctcagacacacagtccaaatctgcccagagctttaccctgtccaccacggtcaggaaggttgccacactctagactgagtagagaggtaaaggcagaagacagcctgcagtgaaccagcagagaaaactacatagttttctctacataggaagtagaaataatgaaatcaggaaatttggcagaaaaaaaatacagggtaactaaaaggcataaggtagcttttttgttttgttttcttattttcctctttaacctgagagaaacctattcttctttacatgcctagcaaaaagaagcattggagaagacacttgatgtcacattaatgaaagggaataatggattaaggaaagcttggtagcaaaaagaagttaaaatatatctgagaaaagtattttaaaccataaataacttgtaagtatctgcaaatatatgtttattataaaatattcaaataagagaaatgtatagaaaaaaaccctatgcccacatttaccccatttcctataaccctcaatattattgctatctttaatgtaaccacactttagtatgtacctcttcaaatatttgggtgtatgcatatgtgttcacatttttgcataaagtgggtcacaaaaatgcaatatttttgcaatttgcttttttttacataatgtatccttgacgttcttccatatcagtac

SEQ ID NO: 2589 - DNA, 901 bp, Homo sapiens
aaataacataaattgtcttagctaacactgaacaaatatcgattatgtgctggcacattatctgatttaattctcttaacatctccttgagacaggtctattgtgcagatgaggaaactgaagccctatcgcaaggtgatggctctgttgaattctagagactgcaaagatgaagaaactaagaaactgtggcacaaattattaactatactgcccaaggtcatacactggaaatgggtggtgaaggaggtcagcaggagggcactaaggatgaagacaagctgtcagatgaagacaagctgtcattcaaacacagtgacagaaggagcagtgcctccttctgctcaagtgtgtctctacttttctgcatgttgcttccagacaaaagcttgaatttcctagactttatctcaaggtgtacaacacccttcctcccacttcagtcccatgctggtggctgctcctgctacctcttttgcatggagcagagttctcaagattcgtcctcccaaggtcaacttcttgtttcttgttttcctaacaaacaggaggccaagtgtggaaagtacttgtgttaaggttgcatttcccaccagagaaggaacatggctaaaaagcattaattccatttgattctttctttacagaaatccatttggtctttttcagctttgagaacttaaaaactgtttccctgcatcacttttccgaatctaacagagacttcaagcatggtttaagggcagagatggcgctgtgtgtttgattgttaaagtgaaaatgcagactgtgaggaaaatcaagactcccagagcatttaaaatggaatgacaggtaatattccaacattgccacaaggttcgagggtgacacatctcacacatgtacgtgaacaaccaat

SEQ ID NO: 2590 - DNA, 3746 bp, Homo sapiens
ctgggtgccagtggagatgctgcctactgcagtgtggagaatggattggaggggtcagaatgaatgtagagagaattcaaaggctcctgcaggagtccaagcaagaggattgcagattgtagcctggaagaggccagtagctgtggtgacaatggacaccaggtggatatgttggagagacacttagaagggtctcactctgtcacccagactggagtacactggtgtgatctcggctcactgcaacctccgcctcccaggctcaagtgattctcctgcctcagcctctcgagtagctggaattacaagcatgtgccactaccaccctgctaatttttgtatttttagtagagatgcggtttcaccatgttggccaggctggccttgaactcatgaccttaaatgatccacccgcctcagcctcccaagtgctgggattttaggtgtgagccactcgcctggcagaaagactgtcttctgaaaaggacttttgggagtgaaataacatcagctctaagtgactcatgtgcctatatccacctggttggtggtgaagaggagttgaaaggaatgaaggattctaggacagaaggttcctattgagaagacactttcggctataaccactgttacgtgtgtgtaatttattcaacactactgtgtatataacggacaaacaaatcatatttaaaacatcatctagtctttttagatgtttagaagtgcacaaagtatgttaaaagtagaggtaaataacacattttgtagatatccttttgatgtgaaatattgtcttttggaaattgagcaaaccaattccctgagccgtacacattattatatctgtgtcagtttggggaggaaggaggagcagaaagtacaaagggcttttcaccagtgtgtttatggtgaggcacattgactattatctttttttttttttttttgagacgacgtctcgctctgtcaccaagctggggtgcagtggcgcaatcttggctctctgcaacctctgcctcctgtattcaagcgattctcctgcctcagcctccagagtacctgggactacaggtgtgcaccaccacacccagctaatttttgtatttttagtagagaaggagtttcaccatgtttgccaggatggtcttgatctaagtctgcattttctttgtgctgtgtagatagcgtacataagaggacaaaccaatcctaatctatatcatctagtctttgtagatgttagagaggtccagtgcgtgacaaaagtagatttagtgaattaaaacactgagtacgttttgtgttaaaattcatagggaagactgttgttaaaaacatagaagtgggcagggcacggtggctcacgcctgtaatcccagcactttgggaggctgaggtgggcagatcacttgtggtcaggagttcaagaccagcctgaccaatatgatgaaatcctgtgtctactaaaaatacaaaaattagctgggcatggcagcgggcacctgtaatcccaggtacttgggaggctgaggcaggagaattgcttgaaccctggaggcagaggttgttagaatcctttctacacaatacatttggcttatagctgtccacagggtggacagaggttggaacgggaagggttctaggccaaaatgttcaggggaggggtgctaggccagaatgttcgtatttagaagacactttcaaattacagtctatgttatgtatatgcaccatttattcaatgctactatgtatatagtggaaaacctaagtcctctttgaaacatctagtctttctaaatgtttaaaagtgcacaacataggttagaagtagagggctaaagtgacaccctttaagcattttctttattactttttaggagtgtttgcatttggaaatggaatggttaaacttgatgctttggactgttcatagggtgatggtgggtgtaggaggaggaagtatgcaaagggaagggttctgtgcccaagagttagattagttcacatgatctaaccattgttctatatgcattttagttaatagtgttttgttttttatttttgatggagttttgctcttgttgcccaggttggagtgcaatggtgtgatctaggctcactgcaacctctgcctcctgggttcaagtggttctcctgcctcagcctcctgagtagctaggattataggcacacaccaccacacctggctaatttttttggtaatttttagtagattcggtgtttcaccatgttggccgggcttgtcttgaactcctgacctcaggtgatccacccacctcagcctcccaaagtgctgggattacaggtgtgagccaccgcacctggccaatagtgggtattaaaagataaacaagtcttaatgctcaaagtatgttaaaaatagatgtagtaaaacaatccgtctacaaatgttcttttgttatattttaggaggcctgtcttctgggagtgacctttgttattccacctcttggagctaggcatagtcctatacctagtcactgggatggtggaagagggagaaaaggaaggatgaaggaaagagctatttgctagtatctccacatctagaagatggttttagatgataaccataggtctacatgagcatttttagtaaagtgcttgtgtgtaattctggacaaagtttattattttgcactatctaagctttatgaatgtcctggggtgataatgtgtgataaaaagtagaactagtgaattagccaatttgtaaattttttcttgttataatttatagaaaagatgcaacttggacatggaactgttaaaccatctctgagctttgtatgccaggacttgttcattaggttggcagcagagcagcaaaaggaagtataaagagagagatgtatgcagatgtgtcgatatttacattttgatgatagccattgttgtatgtgcatctcttttagctgtactataggaatacattaggtatttcaatgaaaacataccttgctaatatttgaatagtatagatctgctaatggattctcttagaaacattatacttagtgtattctattgctgtatatttcattttaaagtgagcactaaaggaatgcggtattttaataaaaactctgccaacgcttttacttagaggcgtgttgccaatttttgtcttttatgaaaatttggcccaagaaaggcaggattacattgtttttccaacagattgagtgggtgtagtgtattcttgatgatcaaaatactcatatagctttgagattttgaattggtaaatactcaagatgtgtgaaaaagcatgatacatactatatgatctcagtcccataaaattgactattgtatctacacccacacaggacctagaaggacatgttaaactgtaaactgcttgtgattgtggatgacctttttcgttgcttcttgtgtttttcagtttcctataatgcacatagtaacttaaaaaaataaagattatttttgaaacctaaaaaaaagaggttacagaattgaatactccctgagataaggtaaaatcatcttatgctaacggttgcaagataatggtataagtaagctttcgtcgtacatatcaatgaactttaagatttggaagacaaaattcagtttatgtattcaattaaatgtgctcagattgtattgtgctagataggcacattattctaacataatatgaatgaatcaataaaatccttataatactg

SEQ ID NO: 2591 - DNA, 2218 bp, Homo sapiens
ggatggtctcgatctcctgacctcatgatccacccgcctcggcctcccaaaggatgaatcctttttctgacagtagcttgcctgctttgtggatcgttggtgacacatattaaatccctggccagctaccctctgccactgtagcacactctctgagccacctctctctaatggagggtaaactatgctcataagacactgactctttttttattaactttttttttttgcattgactcttttaaatggtcacactaaactaagaagataaacaccatttctaaagacattctaaaattcacaaaaagagatgatttttttcagagagaatatttttctggattagccactacagttgaccttactgagctgagggcatcagcagatttcatgtgctcaatgaatggagtgttcattcagtgccagtgtggtcagggaacggttacacccagagtggagaacatgaatgggctattactctgagcaaatgtgatatgtttcctgtgggggtttcttctgttgcctgtggaccctccatttgcctcaaatacattttcaatttatttagcacccactgtgttctagccaccatggagggagataaaagatgacaagatttggtctctacatgaaggagcagacagtttgagtggggagagaagcatggaaaccatggaaagtttaatgatattgaaggagttacatcacaatacctgagggcgggtcatcacaagagatgttacaggacagagaagactcattgccaaatgagcgacactaacaagagtgatgctctcagaggaaggacagactgagtggactgcaaggataggggagacttctggaagaggtggatggtgtggcagacccttgacactcattccccttcagcaggcttggaatgtggggatgactatccccattttcacatatggcaaaggcccaagccacacagctggtgaagtctggagcaggacttctgaggctttctatcctccatgctgctcactagaaaaggggctgtgaactgtaagtaactttgattggcgttttccatgctgactcaataaggttaggggttaaagaccagccctgaacctgatctttaacagccatgcattgtgcaagagaaacactcaacaaagagctagtcagaatgtaatatacagtggagctctaattagattatgtctgaatgtgacaaagaggccctgtaatatgacatcgtatttaattagactatattgattgtgcattaaggtggacttgatgtgttacatgtgtcatgagtgccggagaaggaagctcttgagtctgcaaggccgacccagaccccagccactatcgcctgtgggctaagcctggaaggcaatgagaggaggaagtggcaacatcagtcctcaaactcggccaagtttatagcctgcacttgcttttacatctggttatttctggggaggcatgagggaggaaaaaggaaatgctgctgaccgcttcccttccatcagcccagtaatagcttgacctcttaggcttatttgctcatattggttctccccacttggcaaaagtctacccacctgtgggacccggcctaagtccagcctcctctgcagagccttcctaggtaacgccagctggaagcgatctcttccccttctgaaattccgcagcattcacacacgctgcccctgcctgtgtcccctgcctctgtccccacctctggctgtcacataaccataaccctctccagcaaggctgtgagctcctggggggtaaagtctgggattcctacttctcagtctgcccactgcacactcagcctagtcgctctttagtaagtgttacctggatgactgagttgccctgggcaggcatagtttccccacgctgcttatggggctacctgaggctgagctgttgctgccgcgactttgatagtacgttggcttccaaccagtccatggaattataaatgattaaccgttatcagcgcacatcttcacctctgtgtaaaaatagattgactgtaatgagtatttgaataaatcataagaatggccgccctgcgatcggctaacatcctgccgatggctgcccggtgagtgagcagggcgccggccctcccgcctaatggcctgcgattcagcgccggtcgcctctgtgattgacgggcctgggctcccagggcacctcctctgcagccctgctcaggagc

SEQ ID NO: 2592 - DNA, 59352 bp, Homo sapiens
caggatcaagggctcaagcaaagtttaacattgtcattataatatttctagggctggaaagaattttagagtctagtttcaccctctcattttaccggtgaagcaactgaggccctgacagagttttccaccaaatctgtcgaattggctaaaggcacagagaagaaactgcacaagggatgctaagacttagaactattctagtcttcatgaatgtatatgcacagggttatggggaggtcgaaacgagatcattttgaagattctttggaaagttaaaagcaagacttaaaataagcagaacatctaaaatggacattcattctctctctcagcaccccgaccttgttcttccagatcttctaacaacctgcatttacctgctgtgttgacttatcatctgcctctctgcactacaatacaagctctatgggagtaggggttttggttttctagtttgttactaatggattgttaatatgcagaatagttcttacaggccaggtactcaacaaatatttattgaaaaatcaataagcccagggagtcatgagccctagtaataaagaaatctttaaaatatcagctttttggtagacttctgcaatcacccagcaattatctatggggagcttcagagttctcggcattctctctggatctggggtttgagtggtaaaggaaacggaccacgccctgctgatcttcctgtggggaagcccagcagcaactggaaactgatagagaagtaaaatatcagacagtgacccaaacagtgcagggaattcaaggagggagtatcacatcttagattggaggtcagggtagaagaatgacccaaacagcgaagagaattcaaggagggaggaccacatcttacattggaggtcagagtagaagaatgacccagaaagtgaagagaattcaaggagggagtaccatgtcttagattggaggccaaagtagaagaactctctgggtctaacatttaagcagatgttgaaatgatgagaagacagccaagtaaaccaacaaggaaagcattccagggggcagcccagaagaatcagcttcttgcaatgtacatttatatagtgccttgtctatttctaagtgccttgctgtcatcaccaccacgagagccctaaggattaggggttttgttatcacaatgtctggtttattagaagggcctctaaagtttgcctctagtttggaaaaccactgtttctatttatctgaatagagaagagaaaagctaaccttgggaccagttgttttaatttgcaggaaaacctagatttctaatgaataacaatgaatgagagagaattgatacaggcagatctgagatatccatatctgtctctgcagtacatggttaggaaatgctacatatgatttgtatttactgtgctgatgttgagagaggaacacctgggtgagatccagtaggttctaaataaatctagcttgatgatatctctttgagttataagtatatgttctatctgtagagaaagaaagggagaagctacattgattttaatggaaatgtcaggaagaggttgaatgagttgaaacataaatgagacagtcattacaaaatattcaaatgaaattttgggataataagaatgctcatttaaaaagcccgttcgattagtgtcaagctagaacagaaaaacacatttaaaaggctgtactttagtttgtgtctgtgtatttgccacacataagcttagacactttaataagacacttataaacattgaaatatatgagttgatatggtgaaacataattccagaattcttgagtataataggtctggagcatgatttataagttattttgcaatgatgtgtctgaggtcatggtggccgcacctgtagtctcagctacttgggaaggtgaggtgtcaggatcctttgagcccaggagttccaggttacagtgagctgtgatgcgccactgcactgcagcctgggcaacagagtgagaccccatctttaaagaaaaaaaaaagaagaatctgagacattgtaagaaaaattccttcatctcctcatcaagtgtttattgggtgcctgctgtgtgcccagccatatgctagaggctggggatataggaataaaagctaccagccatgccctaggtcagtgcctagttctgggtcagcaaatagcatccaacttgttcagtgctattctatcattaaaacataagctggagttctatttgtttgcacattttacaaaaataatgtgtaaatagatgattctataaaaatgtccaaacaatgctgttaggtagacatcactctacacacttgttttgtgggtgacattgcctcactaaggagcagctccagcagccaaccagaatcaaagctgtcctctttcatggggctctgggcttacccaggaaagaacaaaataaattgacacaatgtaggctaatcatgatattgaaaacagaaaggacttgggagcctcctgaaataaattgttaaaaattacataaacctatttatggttggatttataataagtgcctgtgtgtttgttttcttgacagctctgtcaaccaggctggagtgcagtggtgcaatcatggctcactgcagcctccccatcctgggctcaatcgatcctcccactgcagcttcctgagcgggtagaactacaggcatgcaccaccactcctggctaattttttttcctttggtatttttttgtagagacagggtttaaccacattgcccaggctggcctccaactcctggactcaagcaatccacctacctcggcctctcaaagttctgggattacaggcgtgagccaccgcgcctggcctgtgctggtggttgtaagagcataagctattgttctttccatccttctctttttcagtttttcttctgtttttgcatagttaggcccttgtgaagtttggctgacatttgttgtatgcttttaattcccctcaaaaaagaattttctacattttacaaagaactaagaaaaaacccaaagaaagcactttgtcctggggatctgtggtctcgttgcctgcagcctgtttcctgcggcctgtttcagcgagctctgttgcttgttaaagccttaaataaagtcaatattttgtgatgagaccattttagaggacatgcttgcatatctgtgatgtgcccatggactcccaacagatgctgctattttcgtaatgacattttctagcagcagagatgaaacaaatattgaggcgttgagctcctttctttgttatatcagattagaatgtaatgccaattgcatccagcttcaaacaaactcaaggaataaaaatctagacttccaaaacagatgcacgaggtttgaataaagattcatctgagggtctgcacttgctttcccctccttacgtattgttcgttgaagtgattttttaaaacccaggtctgaccctatcatctctgatgcttacaatctttccaaggcttccctttacctatggacaaggcattttaacatgatagaaaatgtcctttcagcccattcccaactcagcaggccgctggcatgcacacacgcgcacctccaagtgtgtgtcccatgctcatgtggctatgctgtctcgtagtctccaagtcactgagggtcccattgctggggctaggtgtggtgtgcatggttctttccaaggagatggagggatgccagccctttgcctggtgaggtttgggacgaggtcttgccgtaaccagatgctatgctgcaatgccaggtgtgggcgctggaagtctgtgtaaccccttagtgtcctttcccaccccttccccacccctttaggctagaatgtaatgccttaatattcacactgtggtccaagtgccagcaatgccagcctcacctgggagctccttagcaatgcatcacactaggtcctaccctggacttactgtgtcagaaactctagggtggatccagctgttgcgtttgaacctctgggtgattctgatgtacatttgagtttgctgtaggtgaacacagcctggctcttctaggtcccactgacgtattgaagcagaatgtgcatgttaacaggaacccatgatttctgtgctcagcaccgttcagaacctgcttccttgattgcacatattacattcctactgagctcttctaggtaggtgggcagctaggaggagcagtatagacagaggccttgcttttaaaaagcctgcattccagatggagggtggcatgacaataagaaggggggaaaagcaggtaaaacagtggcagagtaatggctctgaatcaaaggaaacagccaggtgggaggacaggggagagagagagagacaagagacagagaggaaggtagagaggcagagagagggaagtagagagagagaggagggacaaggtaaagacagcatggccagtgaggcctctctctaggaggagctagcctgtgctcacctgggaccatgttgcacagagggtgttgtgagatgactgggctcactgcgcagtttctgactcagtaggtctggggtgaggcctcagcgtgttgcgttgtcgacaggctcccaggaggtgttgctgctgctggtttgagaaccctagatctaggagaccattccagaaacatggcacatgtatttagaccttgggctttggggcaggcgtgggtgggacaggctgttcagcacagcctgggggcagaggaaggtgggacgttgggggccaagtctggcaggtcagcaggtgccttgtgggctgtgggattttgttctcttggcccaagagagctagtggtgggttgtggcaggggagagatgtggggcctgatttgcatttgtaaaaatgcaaattatattgctttgattttctattcaaggacagattgggaggcagaggtagaagcaagggaggttaagaggctacggtggtggtcagtcccttccagagatgacggtggcttggatccccatgacagtggcagagagtagagaaaggtgggcagatttgaggtacatggtgcaggtggagcagacggcacttgctactggatgcttgggggtgggagaggggaagagaggaaccaagggtgcctctcagcacagcacttgggtggaggtgaagccattcactggaatgggaagctggggttggagcagtgggaggtggggcgggaaacccagtgttctcttttagacatgtcatggtgtatgtgaggatgagacatcccagtggcaacatggagctggcatttgtgcctgtgagtctgaaattcagggaagtagccagggatgaggattttattttggaaggcatcatcaagaggtgccatttgattgaagttagcaaattggttcagccatccaagggactccacactccccagcacaccacgattcccagcctccttctaagactctcccgagcccagcctgggtctggctgcttcccccgaagcagggctggcttgctgctctttcccacagcacagccacagctagcagcctgctggacagaagaaatcctctaaacccagctcctttctactgggggctctgctgaccttcagtgccagccaccacttcactcaagccctcccacacttgcctcagtggggtttccaccagttgggtctttgcacacgtggctacttcagcctcatgccctgaccgtatgggggtgctccactgagccaggatctgcccccacgccgtcctgctcacctccatgatgcggagctgttttatcagctggttactgtgtgtagtccaggtcctcagaacttggaataggatgggcctttttcatttaaaaaatatgctctccaaacacaattttcggataagctctttcaactttattttctttttctttttccttttttatatgactagaggcatgtgcaggtctttaaagaatcgctgtgtgactgtgattgattctttggtctgaacatgacagccttctggtcaatctagctgctgttgagtcacaccaagactgaggagctgcatgttccactcgctgactgtctttggcaagccaacgtgaagtcttggaattaaataactatccattctgtgcctaaatactcatttgtagaatccatgctcctgcctttcctaagaagcacctttgatttgcttttacattctcatttttttttcctgtttcataagctcagttcaattcatcataatcagctgtaggcagctccaaatttaaataatgtcacctgggtgagtcatacctaagggaacacttagttggtcaatacatggtctctgcacaatctaaattaaagtcaactctgaggttgacttgaacagagtgaattcagccagtgcttcaggtttaaaagaccaagctgctcttggttgtttgtacatgataaactaggttgtcttagttcacagacgaatcccaaagaacgtcagtgtcttttggaagtagcagatgttgggactgagaaacactaagcactatcaaaggactaaatgccccagcaaactgaaaatcctgatactctttgcaaagtgcctcagtaattatggtctggaatacctggtgtgttgggggaggtttatttatcttaccttaatcaaggaccatatggtactaagtcaggaagcagcagtgggaccttgactattcctaggccaaatatggtaaaattactaattgccttgcacaggattaataaagtgctattatttgtgttgaattttattgaaacataagttagagtttatagagaccgtcataaaatagatatgatcttttctgttcctgatccttttccaaaagatattactttcctcctctttcagggcccaggaacaaagaattgatttcctttcctcatttaattaatatttgttgggtgattgctatgcaagaggtactgttgtacaccttgaggatacaaatgtgagcaacatcatggcctctgttgacataaggctgagaatgtggcagtggaaattgatatgtattaatgttgtgtaattaggagcggtccatcttacatggaggtgaggcctgaggttctggagccatgctagctcctcgaagctgaatctttgaaaagagagtaatcaagaatgaggacagagatactggtgagttgggaagagctcagatgttcctaaatatgtcaagctcggatggtatcttctaggcaatggctagccatccaaagattttaaacagaggtgtaagactcatcagattttacttctgaaagatcattctgggattaaggtgaaagatagatttgaaaggtgctgcacacacccagaagagagatagggagatttcacagggaggtgacggtgggagtgataaagaaaggatggagtcattggtgagaagtaggtgaaacagaaagaccccaggagacagagatgtggtgggacagtgagacataggtgtggtgggatggtgagatgtaggtgtgttgggatggtgagatgtagctgtggtgagatggggagatgtaggtgtggtgggatagtgaaatgttgtggtgggatggtgggatgtagtgtggtgggatggtgagacgcaggtgtggaggcctcagaacatctagcctttggacaggtgagttggaactttagcaggagttggggaaggagacacagtctgagaaagcagctctgtggaactgattcttcatctgcagaagtggatagtctcttcctgcaagcatttagaggagggaggagaagcaatcactaagccagagggatgtggagaaagcacaaatgacactgaggagaaagagacaccagaggagaaagtacgacagtgtctttaccaatacttagtaatgaccttcctttttgttaatttatttaattctcaaagtttcccctatcaacagggaaggaaacaggatgacagtgtgtgtcagatattctctgaaatggccacaatcaatcaacaccttccatttttggaagctgaggctgggtcttctcaggcagggcagactgttgaatctgggctatcatctccaccacattgactattagaatatagtggaggaggccgggtgtggtggctcatgcctgtaattccagcactttgggaggccgaggcgggcagaccacgaggtcaggagatcgagaccatcctggctaacacggtgaaaccccatctctactaaaaatacaaaaaattagccgggcatggtggtgggcgcctgtagtcccagctacttgggaggctgaggcaggagaatggcgtgaacctgggaggcggagcttgcagtgagcccagattgcaccactgcactccagcctgtgggagagagcgagattcctctcaaaacaaacaaacaaacaaacaaacaaaaaagaatatagtggaggtgatgtcaggtgcctcctgagactaggtcataagaggccctgcagtacctctctcttagagtagagctctatactgggggcaccatgccacgtggagaaactacatggagacccaggtggaagtgccccagtgacaaccagtaagctctcagggacatctttgcagaaccagcctgagtcatttggctcctgggtccttgttcttcctgttctgagatgcctcatgcatactgtggaggtacggatgcattcttgcgcaaacagtattcatgctcttataaaaatatgtacttatgcaaatggcacatttgccatgcacaagtgtttccctaaatatttagagcaaaaattattgcatggatagagcctgaaagtcttaaaaaaatctttcagaatttatcttttttcatttgtgagttggaaaaaaagagcccttaagactcccatactgatccagtttgcttattaagtgtattggtttactggggctgtcataacaaagtaccataaactgcatagcttaaaccacagaagcgtattgcctcccagtgctggaggctggatgccagcaatcaaggtgtgggtagggttgggtccttctgaggctccggggctgactctgttccatgcgtctcctgtttaggctaatgagcagcacacattagctgctggtggtttgctgaacatctttgatgttccttggcttgtagaggtctagtgccctgatctctgtcttcatcttcacatgggcttcttcccatgagtgtagctgtgtttgagttgccctttttataaggacactggtcatactggattagggctcaccttagtgactttgtcttaatttaattatatctattccaaatgaggtcacatgctgaggtcctgggggttaggattcaacataaagatttgtggggacacaacccaacccataacaaatagtatttattaagtgtttattcagcacacctctgcaaagttctagcacattgaacagaagtaccaacaagtaatcatagtcaatttttgtaagacagataggagcaaagtgccctggggaaagaagcaagtaataccctctgcctgggagaaccaaggagggcttccaggaggaggaatttatagtgtgtacagagagcgggcttataaaaaagtagaaatcaccccatgcaagagccaggagcagacgggccttggtgaagggtgtgctagagtctggagggctgtccagttcatgttttagccagaggatagcattccaacttgaatttctgagaaaaaatgctgggtacttgtgtgcatttcttcttttcttttctttctttttttcttcttttttttttttttttttttttttgagatagagtcccgctctgtcacccaggctgaagtgcaatgatgcaatcttggctcactgcaacctcccccttgtaggttcaagcaattctcctgcctcagcctcacaagtagctgggattacaggtgcatgcctggataatttttgtatttttagtagagatgggattttgccatgttggccaggctggcctcgaactcctggcctcaactgatccacctgcctcagcctcccaaagtattgggattacaaacatagccaccatacttggcctgttttttcttttcttgtttttatatcatgtcctttattattattttggtttaggtgcctctacatatatatgtctgcattttacccttatgataaactacacttgatttactttgccatgcacagggctgatttttactccctctattatgttgggcactgaagaacaaggagcaggctcctgggcagggctggccctgtaggaacgggcgtccacccactccaggtgtgttcctgtacgcctcacactcctgccatctcgaaggtccttggcgtggggtcgcagcactgctctcagctcaccttcattattggcattaactgtactgtcacggggcatgatgggtccctggacttaatccccacaacagccccgggagcaaggcatggggcctatctccattttactgaggaggaaaccgtatctcagaaagagaagcctgagaagtaccacacagaggccctgagaacacccccttcggctgtctttgcttggagaggaagctgaggctctgcagggcaaagggacttgccgaggtaccaggagacccagtggccaaatcaagcccaggcccatgccctgtctcattgtcctgggctgcttctaggttaccatttcaagcttcctgccattctacatgacttaccataatgatagagggaaataaacagcattttagtctcaagggtttttttttttttaattttggttttgttttctttaaagagttcagtgcatcttatagctgagagtgatttgcctgttaagtatgcaaagtgaataaacatctttgtgtactgatgcatcagatcttggagttggaagggcacttcctggtgctaacccacccctggcactctcagaaggcaggtgctcagtgtccatgtactgccatgcccgaagcttggggccacaccatgggacgcacatgctgttcttgttcttgttccaggagcaaaggaagcttccaaggctctgcagaggggtggtagcacctacccttggacagtttccctcctccctcctttcctcactcagtagctcgccttctttcatgtgcaagtcccttgcagctcttgtaggtgtgtcctttctaacactcacggcagcgtgcaacccttgagtacagccttgtgattggttttaagtgtttgtctccctaactcactgggatgaagccatgcatatattgtttcccactggaatctcatggcttagtgcagcctctgacacacactggggctgcatagctatttgcagaatgcatgaatccagcgcctggtctcagccaccaaactctaccgctttctgcactaggtgggtgcagggcagttgtgggctggtaagtagtaaatacccacaacctggccttccttctgtgtgggtgggaggactggttcccatgcatctgctccaggctagtctcactccagcatgcacactgctgatgtgtgcagcttgttagcctaaacaaatgtgttgaggattctccaggtccaagcataaaagtcactaattgtttctctaacaaaaacccaaactagcggctggtgggccagtccaggcccagggttttgtgctgccaacttcattcttttgggttttcatggaaagagatgctggcttggcaaaaacatggtatactaaaattttttaagtgggaaagattgctgagccctgaccttgacaatgttcttggcaaagaggacatgagaagctgctggcagtcagttctccttttggtggggacacgctttgcagttccaggctgcactgtgtcaccactcctgcttccaaaagctggtgacaagcagatatatacaatctattcagccggctcttttggcaaactttgttttctccttggtggctactggctcgtttttatggttaattattggctttctttttctttctttccttttcatttttttctaacagactccaagactcaaacatttggaagctatccggatgtctctggcccctctcctcctcattctctcccagccaatgcttcttccttcctccagtctcacccccaggagttcatcagcctctgctgcagattctgtggcaatgcagaagaattttgttccgagcgaacttgtctgaaggcttgaaatggctttcttaaattgagtcactttttattctcataagaggttaattttctttacacatgaaatcgatgtagcttgctctagtgttgcatattgaatcttctctcttctttccccagtggacccataggggacccaaagggacccatagactcccagagacctggaggatgcaggtatcatgtggtcattgccacagaaccatgatgtgttaggaagatggcagaagactgtggaagatgtgcatttttttaaataacaaggacaggaaactcagggaatatctggataaagcagggattggcctgggatgttccagatgaagacagggctgcaggcttgccaaaggacccccccgtggggatggtggtcctttggatcaagttgtggtccaggtacaagaggcacatcatcaggattctccccacagtggaggcctccaggagaccagagagaggttcttcttttgacttacatcaccatcttaaaaaacagcactattacccaaaggacaaattagcagagaagaggaatgagttgtgcacattggcactgtgtcaacttggaacgaaggggagcacggatattgttcacaatataccccaaaccaaatcgtcattaaaaacaaaagccatggccgggcatggtggctcacgcctgtaatcccagcactttgggaggccaaggcaggcagatcacaaggtcaggagatcgagaccatcctggctaacacggtgaaaccccgtctctactaaaaaaaatacaaaaaattagatgggtgtggtggcaggtgcctgtagtcccagctacttgggaggctgaggcaggagaatggtgtgaacccgggaggtggagcttgcaatgagaccagacgagatcaagccgctgcactccagcctaggccacagagcgagactccttctcaaaaaaaaagaaaaaaaaaagcaccaaaagaaaaaaagccatgtaatcagtcaaataagatgtcattactttggggatttatatatatttaatcctaagctaactaacgcagaaacagaaaagtgctgcatgttctaactgggtgctcatggacgtaaagctgtcaacaacagatactggggattcctacagcagggaaggagggagggggaatgcattgaaacactaactattgggtactttgctcagtacctgggtgacaggatctatactcccaaacttcagcatcatgccatatacccatgtaacaaacctgcacatgtacccccagaatctaaaataaatgttgaaattatgtaataataatcatttaaatgttagcccatgagatggtgaaatattgttaccaagacaactttgacaaagtgggagtgcactgaccagaagcagatcatgcgatggtgaggatataggctgcctcccttccaatttcagaaggaaacacggacgtgggaccagctgcactcaggccagcagggtacttgtccttcttacaaccacacatattgtgaatttgtatagcagttaacattgctgaagccctctcaggaatatatgtcatggtcctttgaactgataggcgtggtgtttaaccatgtctgtagcacctataaacttgatactttaacatctgcctctgtgatgatacccgacgccttgttctggacagcctgagtcaccttgtcttggcctcccgcctccctcatcaccaccctccacatcaagaggagtccttctcctgaagtgtgcttttcaaaggcaaaccacctaatccagagtctgcacccccaaccacctcccttatctggctctcacactctgaaccaccatccccctgccgttatcaccataccagataccagatagcccctggaattatttaaactagcccatcctgagcttgtttgccctacctcccgttgcttcccttggaaaccataataaaggctcttgcccacagtgacctcttccaccgccttctcagcgaccctggggagtccccatgtggccctgtggtgtgatgcacgttccctctcttgggatctgtgagtttaatgcacaatcttttcaatggtagttgtcccctgatctgttggcttcaccacacctgaaaaaaataatgaaacctatcaaaatacaggctatgaggcagaggatctgatgcctgcaagatgagagaccctgacagttttttctagctcctagccctaagcttctcccctgcatgatattctagtgagatatggggtggaatgacagaaagaaatccagcttgggttgtatgtatgtacctttgacattgcatgggagctctttgcctacctgtcttgcttgggcatttccagtccttcctctgggcattctcaatagcagtggaatttttaattgggaaaatggggattacttcattgggaaatgaagtaatatgacatattatttaaaaaaaagccacattacttcatttcccaattataaatagacccttcaccatggatctgccatttgcaacttccatgacattgcaagtgtttgagttcaaattcattttctgcaaaccacgaccatgtttgtctgttgcacagctgtattcccaggcttagcatatctggcgcagttagtgcaggctagatatcagttaactgaatgaataaataaaccacccaactactaaatcaggttgtctcaaactcatccaaaagtttatatgggttgagtgtaacaaacttcatgggtttctgtggtaggctgaataatcattcctcctaaaagatatccacattcaaattcctggaatctgtgtgtattaccttatatggcagaaagggtctttgcagatgtgattaagaatcttgagatggggagattatcctagattatttgggggaccctaaatccaatcacaagcatctgtgagagatgcagagggagatgacatgcacggaggcaaaggaggcagcgtgagcaggagccagagattggagtgttgtgtccaccactatggaagcttgacaaggaatttttctgcagagcccccagagggagtatggtcctgatgacatctgggttttgggtttctggcctcaaaaactatgagaataaatgtctgttgttttaagctcctacctgtgtcataatttgttatatgtgactcaggaaactgaaagtttccgagggaaattgatgggtatttctctctggagaattctaaaaagagagactccctggtcatgtcctgtagtggccggatagtagaaactagatttggtggtctgttggtgttcctttccaataattcttcttggattctttgagaagtgtgatgacttggcttcattttctgtcctcatgtaagtgacttaggtaaggttagatgagaagaagagcacaggtgtgtttaggtcgacctacaccccccagataattaggatacttcaactcctgttgttcttagtccattcttgtacttgccagtccatgttacttagaaaaaagcgaagggagtctttgaggtttatgttctaccattacacagggattgcatttctttctctatcgagttaggactggaaaagatacttcaagagaatttttgaattcaataggatgacctttgaaggtaaagaatatgtaaagtggatttctaatgaaatcttattcaatcccggtgaagatattaacattttgttttgtgtagtattttcctgctttattttttgtcagttaatttattaagaggccactgacacttttttcattttatttttttaaatctacccaaacaaggtgatcagaagcttctaaaatcttaataaacacctgattcttaaatgtgaaatgaacttagagaaaggatatagcatacatcatctaattatttaggtatgaaatgttagaattttgggggttagagtctcagatatgtccaaatcatgtcctgtcctttcttgtctcctaggtaactgctagagcacatttgagattttttttcctgaaaaataaatgtcttatataagaagctggcagttaagaaggcggaacatatatgttttttttttccattttaaacaatacaatttggccatagattatatagaacataaaaattgacagagaaatatagcttcaagagatataatgtcagtatgcaatattttagtgaaagttactaacatcattttgattcattgcatttctcttaatataaaattttatagagcctgcttttccacaacatccctgttagcagggatctgtgttggtctcattgtagactttagtctatattcagtgtccaggctctgtccagtattgcaaaggcaacatatctagcaagggttcatcatcctctacctagagaagctctcacagagggcagtgagttttctcctgataacaaaggccaaaatgccttttctctcttaatgtaagattcatctttaatcctgcggcatacaagccacttttgtgcccagtcagccagtgtctgaaatgtctccaatctgaatccagtttactttttttcttctagttggctccagtgggagtttgcaatttcacttgctttttgttttacctttctggagttccctagggaagttagtctatactatacaaactttagtagatggccaatacatgcatgtatcttctctaccaataatattgatttctttaataacattcctaccagtgttattggtagaaacattattagtggaaagaatgatatcaattgagagtggctcctaggcttctggctaagaagcctggtgagtggttttagtatttattggggaagatggtgatttagtgttttttttttcaatggatttgattttctagagcagttttaggttcatagcaatattgagcataagatatggaattttcccgtatatctctagtttctgcacatgcctcaccttccctcaacataccccaccagactagtgcatttgttacgatccatgaacttacactgacacatcaccatcacccaaggtttatggtttatgttagggttcagtcttgattttgtacatgctatggatttggttatgtttataataacatgtgtccacccttgtagtatcatgcagagtagtttcactgctcttaaaatcctctgggatccatctattcattccatgatttaggttttgatgtcttgagtttgcccacagaggacaaatgaaggcttgcaaatgggtaagggcatctaggtatacagtgtaaaataagaagagaagattgcctgtcactgcatcttgaggagcaaccacaggcggcaaagagatggaccaagaaagaggcatctacagcacagtgagagtggcaaaaagataagtgaagcaattcttttattcattcattcattcaacatatatttttgagtccctactatgtgctagagactactatgtgttaagagctgagtatttggagagtggcatcacagaagcacaaaataaagagtgtttttaaaactagaaaatggtcaagtgatgtgttttggacatgaggtcattggtgactttagaaagagaagtttcagtggagtggtgagagtgggagccagatggcagaggcttgaggatggagagagaggtaagcaagggtgacagtgaatgtgaagagttgtcaggttcacgactatgccaaatgtcatgttgaggtctgaagggagtgggtggatgagcagaaagaactcaagggcccgtagacaggtgaaagatgattttattcagcagcaactgtcatcaacagctttctcacactgtctgccctgtcttggttgcttgagccagtggctcccacatacagctgcgcagctggctctcccctgctttcagggtcagcagcttaactctttctctccctgggcatgagtgagctgagctatgttctggctgcccttggtccatctgcaaagatggacagctctgactcactctctctttctctgggtgccagcacctatagagtgtcaacagggcaattatacctttcacagacagtagtggcttagagccaggtgatgagcctttcttatgttatggctatggtggtgagcttctctatgttaagtctacatggctgtgataacaagtggagttgtacacctgcgctctaaattcattgagtcactctggatgtttacctcggcctacccttgaccaaagcacagccttgttccttacactccaccccctgggctgagggagacgtagggcttgatacacaggttatatgcataaactttgggtacatagactcaatatacacaggcatgggctttatacataagtttggggcacataggcttgataaacaggtttggcacacaggccttacattctatcccctaggctaagggagtccttagtggggacccatgcacatagggcagcaccttggacccataggccacagcaacaatacagggaacaacagactaccactaacgttcctgttatgctacctgtgattattagagcccaacataggccagagcctagagaagcccaccgtctctgcagggggtcatcagtaaggcactcaatcaccttaatatcctgtgacaccccttataaggctgctgttatgttctggtggttgtcaggaataaatgtacaacattgcgtctctacaagggcacagctgccacattgggcagctctgaccatgtctaaggccatccggttttgcagaaccaacttcctgatctgattgacttcatcagttaacaaaaaggagagcaactcgggtgtaattcagggcccaaactgtgtgctctgcaagggctgtaacttgcatttctacagtagcgacacctgctctagggatagttatcgcttaggggtagagtcactagggggcttgctgaactcgtaaaaaccaggaacatagcaccttccagttaggtggatgactaggcaatgtgggaaacacagtggcaggcacagaaagccacccccaggtacaacgtccagtccaattggctggtagatatggccatcctgtgtccccacagacccataaactccctgggggcataaagtccatgaaggtccagccttggtaaggcaacttattccaccacacccttggtttcgcggcatgtgttatgtttgcacaaacctcagcaataatccctcagtgactttaccccagtgctcccctatacatcatggtacctgcaatgggggcaccacatgttttcccgttagccagccccatccatcatggacactataagtcagccagtggcaggcttgccatgggttttgggacgtccccctatccaaagcccaccattgcattgtctattgaacaccaagtctctagccatgtccagttctgcacagaagctggatgcacgttccagggcaagctgcctgcagctgctgctgaaagggtggtgcagatacaacagttgaagacattggtcacctcagtgtaggtgtgggcccagaacatgatgctgttggagcatgccacctatggctggaatgacaaagcaagcacaggtactaacaggggtaaatcatgtccctcaggcaaaatacaggccaacttttcacctctcgataacagtgcagccaccaagggcatttgccctgggtgatgataccacaccttatcagctccctgtggtccttttgggtgctgtacccatgccaaacacacaggggagcttatgctaagccacacagacagtacacatgccctctggaggagagtctcttccctggccgttcccctatgcatggttaattgtggaggccacacattaaatacccaaggagtaacatgtaagttatactgcagcccctccccccagggggctatgatagccaaccatctgcaatgaggtgcttggagggtccatggctaacaccaggtttttctgttcccctgcctttaggggtactggggcaggcaataacagattactgttcaaccctgtacctggttggagaaggttgttcttcctctcatagatctggccacatggcctggccctacatgggtcgatgactaactagctaattctgtaacttctaggtaattaaccacaaagttaagccttgataaattgcctagctactagtacagattaccacaggtgtcatctccttggtgatcacagtccatattgccttgagttcaacttattagctactttatttacacctggttttaaaccatattgtgtcagtactaggctggactgtagcagcaatccaggcagcagcagtactctggctatacctacctgtatactatgcctcattaggaatgggaggatgcccttccttatggtaaaggctcagggtctagaggtgcctcagaccccatgactttatcttgcattaggactataggcttcaagacctattgtaattttactcctaagagaccagtactcagtgtactctgctgctctaagtaggtgccccacttcgctaaagtggatgtctgtgccttccctatccagggggttgtttcccatgaatgcccaatctcacaattactaactgcttctctatcaaggaatactggggctcagctcccttccacagctgggaacaaaagcctattggcatactcaggtgctctatgcactgctataggccctaactgaaactctgttgtcacaggcacatctagtttaaatgggcacctctggtccactacccgtatggcttgtgcctgctaaatagcccgctaggctaccagaaagactgtctcaggagcatcatcccaatcccaggcaagaagaacattgccacttctaaatctgcaggagaatcagaggttaacatgacatcattaataaaataatgacacgtggtggggctatgaatatagccctgcagcaacactgtgaaagtccattgtcaccctcccatgaaagcaaactgttcctgcctctctggaacaatgtcgactgagaggaatgcattggtcaattccaccacatagtggcattgtctcagttctgttgtcaagaagttcatcaaatccatgatagaaggtacagatacatgcagaaggagtattactttattcagtttccgataatccactgttatctgccaaatcccatcaggctttctgactggccataatggaaaatggtaggggctatggatgccacacactatttgcacctcctctaacttcttaatagtctcagttacctctgtattcccccctggcaaacggtactgatgagtggaagtaacctgtcagggttgtggcagaacttggggctggtgatgtgtatgttcacccagtactggctttactgcatggactcagaatctggattctctggccgtggtgtgcaagcccagaccatgcaaaatgtccacccccagaatatattcaggtataggagaaacatacacagtgtacaggtggggagccaagcggccaatgccaagatgcagagacacaggcttcaccttcaccgactggctcccataaccgtccataaatgcagctttgcctagaaatttatctgggttcccataaactagactgcagtctgcaccagtatctatcagtgctaggacccgcggtacattagtgggggaccagtggattgccagctccacatatagcctctggttgtctagttccccctgccaagctggcgacctcggccagttccctaatcaaacaagaaaggctctgtatctctgcctgtctgcaaatagtccttgagttgcagcgtctgggagggattaggttgaacaacattgttttgccccccacaccttaggcattttctggaattgctgctcccgggacaattgccttcacagagtcaacaacattccattgggttgcccgtcaattttctcccgagcaaccccagctgcaagtaaatcaatccacatctgcatgcaggtcacctcctggagcccctttttatctggtggggtggttaactgcggatgaggcattttctccctccttacggtgcggattctccggtcctgcgaatggccttctgcctccctgagggctgccagagcagtagtcacttcatgtatgcggcaccccacatactgggtgagaacagcggctagaaagccataagggttcggggtgctgaactcagcacaagatccctcatgtgggaggtaaagcgttcatcatctggccccatggtaatcagaccaaacatagcctgccgcatacctatctccaagagtatctgcaccaaattagtatgtgattgccatttactcacagtttgtagtatctctctggcatcattgaaaacagtccatatgactgtcattagccacttgattaatgtgtggccaccttgctcttgtgccaaccgttggcacagctgcagctgctgacgaagggaggggtgagttgtgatagaagtcagcttctccatctcagaggcggaacaaaaaatgctatcagctccctcagacgctgccggcactatttacctaattcccacaactcactggggttataagcataataagaggcgtgttccaccactgtggacggggtccctgggctttcccctagggtcccatcagctgcttatgttctaccttctgacggatcacaggaggagcctgcagcggaggagcctcctcctcctcagcatcagacctaaagggagtgtcctgcctgaaggaccggctcaaggtcgcactaacagctcttgctaactcctgttccaggctgtttatctgggcctccaagtaccctgcttgcgcctggaggtctctcacccccaggtcctgctcaaagctgtgcacttgggcccccaggcatgcggcttgctccggaaggtcccttacctgtggcactgagcatgtacttcctgcagtgcagttagaaatgcccatccgactctgcttgcaaagaaaaagactatcttggtggaagaaaaactccaaaacaggcacagctgcttaaagactgttaccggaaaggaatcctgatccagacgccaagagagggttcttggactcatgcaagaaagacttcaggtgagtccatagagtaaagtgaaggcaagtttattaagaaattaaaggaataaaagaatgcctactccataggcagagcagtggtatgggctgcttgattaagtataatagttatttcttgattatattcttatagttattccttgattatatgctaaacaaagggtggattattcatgagttttctgggaaaggggtgggcaatttctggaacggtttttcccctttttagaccatatagggtaacttcctgctgtttccatgacatttgtaaactgtcatggcactgatgggagtgtcttttagcatgctaatgcattatgattaccatataataaacggtgaagaaggccagaggtcacttttgtcaccatcttggttttggctggcttctttaccacatcctgtttgttgacaaaaagagtcaaactatagaatatttgaagaggtttattctgagccaaatatgagtgaccatggcccataacacagccctcaggaggtcctgagaacatgtgcccaaggtggtcagggtgcagtttggctttatacattttagggagaaatgagacttcaatcaaatacatttaagcaatacattgctttggtccagaaaggtgggacaactcaaagcaggggcttctagcttacagatagatttaaaatttttctggttgacaattggctgagtttatctaaagacctaggatcaacagaaaggaatgtttgggttaaaataaaggattgtgaagaccaaagttcttatttgcagaggaagccttcaggtagaaggcttcagagagaataggttgtaaaatgtttcttatcagacttaaagtctgtgttgatgttaatgccagggatgtataatgaggcatgtcctaccctcacttcccaggatagcctgaatcagtctttcaggttgaatttcaagagtgccctggctgaagaggaagtccatttggatggtttgggtgccttagaattttatttttggtctagacgttttatcagcaaggtctttataaaatgtatcttgtgccaacctcctatctcatcctgtgacttagagtgcctaacttcctaggaatgcagcccagtgggtctcagtcttattttacccagcccctattcaagatggggtcactctggttcaaatgcctctaacaaaaccagatggcctgggatggcaccagagcttcttaacccctgaccagatactggagggagatatgacccccaaaccagcacagactggaacagatgaccccttgttacctttagatcattaacatatcattataatgctaaatttcccacccttatgtaaaaggaaaataaatctcaggaccccaaaatcactaagccaaagggaagactcaagttgggaactgcatcaggcaaaccttcctcccattcttttctacatacctctctcacaatttgcccacaaggaaattccttgtggacaaaggacagatagaactcaaagtcatccctttgctcatgtaagacaagtgcatatctgattgcttcttttgccttattgttttcactaagccagactaaagcataagtgactattcctatgaagtgtgtattcagtgaaaggctaatcaaaaactcaaaagaatataaccatttgtttcttatctacctatgacctggaagccccctccgtgctttgagttgtcccacttttctagaccaaaccaatgtacatcttacatgtattgattgatgtctcatgtctccttaaaacgcataaaaccaagctgtgcctcaattgccttgggcacatgtcatcaggacctcctaaggatatgtcacaggcacgtccttaaccttgacaaagtaaactttctaaattgactgagacttgtctcagatactcttggtttacacttataggaaaatcaccaccattttctgaacatatgtcacatgaagaggagagtttattgtctacgcctgtgtctagggttcctccttgcacatgtttgcatactttcccaccccatggctaactccttaaaattccccagtgtattagtctgttcttatgctgctaataaagacataccggagactgggcaatttataaaggagagaggtttaattgactcacagttccacatggctggggaggcctcacaattttggcagaagggccaagtgcagtgactcacacctgtaatcccagaactttgggaggctgagacaggcagatcaccgaagtcaggagtttgagattagcctggccaacatggcgaaaccccatctctactaaaaattagccaggcgtggtggtgcacacctgtaatcccagctcctcaggagactgagagaggagaatggcttgaacctgggaggcagaggttgcagtgagccaagattgcattactgtactcccacctgggtgacagagtgagactctgtctcaaaaaaaaaaaaaaaaaagaaaaaaagaaaatcatcctgaaggcaaagacgaagctaaggcatgtcttacttggtggcaggaaagagagcaagtgcagcagaactcctctttataaaaccatcggatctcatgaaacttattcactatcacaagaacaacataggaaagacccacccccataatttaattacctcccactggatccctcccacaacatgtgggaattatgggagctacaattcaagatgagatttgggtggggacacagccaaaccatgtcacccagcttcccatgtctcagggagaagatgctccttctacattcctggccaggaataaaatctgtttgtctttttttctgattgggtgttccttctttgcgaccaatacaaagtaggaaacaaactcagtttactggcaacaagggggctcaaacaacaggcagattgattatctacaaattgaacaggccccggatgtagtgaatgcaggcaaggttggttcagtggctgtgtaatgtcacaaggactgaggttgtgggggccaagagagaactttccccttggccctttaaaggttggctggaaaatcgctgacatgaggcagattggttaataggaaaaaaaggtgtacaagtgtatttaacgtgtatacacaggagccttcgaaacgaagactcaacttcccaataaggtagagaagcttatgtgccaacttgaggtttcagaaagaaaggggccttggattctgataaaacaggttatgggaacatggagaagaggaagtctattgatgggaataaatgattattcaggagaatgattgaatggggaacagaaattaagttgtaaatagttctctttggaaattaagtgatccttggagatagtcatcatcttgaaaaagggtccattcaggtggttacattttggtcttacagggaggggaagaaaactgttctccttgataggtctggatcttaggcagataatggaacttcagtttctttggaagaaacggtggaaggtcagagagaccttgagtcttgttcttcagttcagcatgtcgtattttggggtactggtttctgaaaaccaacaggttctttccatctttctgtccttccatcctccatgtcccagctctgtcctcaacctgttccctttttagggctgctgatagaggtgtagtgtggtggttgttaaaaggaaaactgtagagaaatttaacaaagtttaatggagcaaagaatgattcatgaattgggcagccccctgaaacagaataggcttagggcaactccagggttgccatatggtccaatactatttatggacaaaaaaagtaaagtggcgtatggaagatggaagtgaggtaaacagaaacaatcagattggttacagctcagagttggtcttatttgaacgtggtttgaacagttggctgcctgtgatcagccaaatctcagctgctgtgattggttgagacttggcgacttgttgtaagagtaggttgtggtgtgtttacacatccagttaggtgacagttcactatgtattaagaaacctttagtcccgactgaaaatatctaaagaagaagctgtagactaaattcaatttaacaagactaaatcatggactggagttcaaatctcagctctcttgcttagaagtcatgcctcagtctcctcatatgcaaagtagaggaaaatggaggaatttatcccacttggttgtgctaaaagataaactggttttattaaaatagtaaagagtttattcgaacagagagcagttcatgaatcaggcggctccagattgccagcagtccacagctccaacaaaggatcctgaggggaggatttttataaggtgcacggagaggcaagacaaagaaaacatctggctggtttaagtgcggcagtagcctaatttgattcatttcagtgcacagttcctagttagagtttacttggcagtttctgattaaacttaagttttgttctacttcaacactgaattgggttttggtttacttatacaggaacccagggtgctggagttgcctcaatgtaatgccctcccaattaattagctgttgcgatcatacaaggaataaatgctgtctgccttatttatcattttcttggctgaatctgactatgctaattccagacttcagacccacaatatacagtgaaggaagaagaaccattctttccagtgtctttgtctttctgttagcctagagggcgcatgtagattaattaggaaacatatccccttccttgaacccccacgctggatgctttctcacctgagggtgacttgtgtgcattagacaacaatgcccatttgctttgtgtaaagacaaaagtgttctttctgggtacctgcctctccacactcctcatgggctggtgagcagaaatcatatgggtccaccctaaatttcctgggctgtgtgctgttgcttcaaaccctatctcaaatgccacttaatttgcttacactgtatctttaaaatggaaactttcatcttccatcatatcttataattatttgtttgtatttaattccccacatctgacagtgatctccacagtgtcttttgcaaatgttcttaaatgtttgttcatactacttaatctctacggaatggtactggatcactttaactttaggaggtggtgccttcttagacctgataaatcaagtttagcttaaagctgcctccttacatattttaagtttggtctaaaggtttctccatacattgtaaactctaacctgactggatgtgtaaatagactgtaacctactcttgtgccactcactgagctttggtcaatcacaggtgcacaactgttcaagtcatgttcaaataagacaaactgagctgtaaccaatgggctgtttttgtacctcattttagttttctgtaagtcactttccttctatccataaatcttccaccatgtggctgtgctggagtctctctgagcctactctggcttggaagactgcctgatttgctaatcattctttgctcaaattaaactctgttaaatttagttagtccagggttttttttttgtttgtttttttaaaatcaaatcttcagtgactctttatggtggtcaattatggccaggatggataggagactaccatgcagaaaagtatgagagagacttgaaaaccatgcagtgatctttaaaaccctctgaatatgtattttcaaatgctgctttcataagtcattaaccataatttattgaatgtgtactatgtgtatggcattgtactagatcctttataaaccatatagaatttttatagtaaccttgaaaagtatgtgttattatatccactgtacatattggggggactggaggcttagaaagtggaagtcgaggcttgcacacacttattatgaaaggccagctggcatgatagtggttcaccctgaacagcagatggaactgataacaggcccattaaattatgggccaaatagtttgcaaccttaagaaatccctgtgaaatgttcatagaatattaacttcttatcttatcaaagaaaattttaacccattgaaatataagatttgtgttagggtctgaatggccaaccatttttttttttctgtatgtgtttgagaataatgtgttttgcaatttttacatgcagtattttatataagcttatggtacagcttgtttattgtataatttaaaacttccttgtccttactaacttttgtctgtttattctattgctaaaagtggtatagtaaatacactacaataatgcatttgtcaatttatctttagttatgtcactttctgcttcatatattttgagaccatgttattaggtacataaaatataataattatatttttttctggcaaactgaagcttattataaatgaccctctttgttgcgagtaatgccttttgcatttacaactgatggagacaggacgcagccaaaagtccctggtgaaaccccgccttcaagcctaaaacagcctgaaggatgaaaaaccagacttctggtgcctgatgaagcctgccctttcctgactgattctaaataatgcctacctgccaactgggaaggcagggtggagccttcggaaattcatgaccttcgcaggggagaggagcttggcctctcctattcctgtgtggtgacctgggattcaaactgtgaggcggaaaacctgctagcaggagtctcgctttgctgagagttatttttcttttcctttttatccaataaattccgtcttctcacgcttctatgtgtctgtgaccctactctttcctggtcgtgtgacaagagcctggttttagctgacctaagaagaaagttctgcaacatttttggtgtccagacgtgagtcttgaggaagggtgagtacatgcaaatcaaaaaatcttttttttttcctttcgcttctaagcctttttgtccttgtacctcttctgggggtagaggaaactgcgcaccaccccaccccaagggctgcaggtgtgtgcggcatggaccagtgaatggcggctcccccggtcccttcccggccagggctggagtgtatggctcgaggctgcgcaccagcaggctggccagcactccctccacttgtccatggaggcttcccctcccctggccaaggggacccactctgtccgacagcaattaagtttctttccctggtggaggaaccatttgcataagaataagaggttcttccccaggcatctttttcttttctttttttctgagaggagtctcactctgtcgcccaggctggagtgcagtggcgcgacctagactcactgcaacctccacctcccgggttcaagcgattctcctgcctcagcctcccaagtagctgggattgcgccaccatgccctgctaatttttgtatttttagtagagacgaggtttcaccaggttggccaggctgatctcgaactcctgacctcaggtgatctgcccgcctcagcctcccaaagtgctgttactacaggcgtgacccaccgcgaccggctggcatcattttttttttcctccaccctgtcagcagttaacacagccctgcatttaagctgtcttttccttttctccgccgggtcaggagttaacttttaagtgaggctattttgctttttagaagatgttttactaggccaggaccccaactgtcactgtctatattctctgtaaagttttaatgatgaaaaaggatttgttaggttggccttaaattgcagccaatccagtgtgctttgcctggcattctgcatggtcagcagcaaactttgctgcgggcctccatcttgttttacctccttgggaacctgacctgtaaccaggtgacaatgcttcgtttagcctcccccattttaccatggcagccagattcagtcctggcttagggaatgagtcctttctggtttggtgtctgtgcgacccttgctatttgttgattctcttcccctcccaaactgccttggattttcctttctctgagtctttagtaaagtttgaaagtcagaaatattgtctgcttggtctggttaaagtcaggtaataggggatttaaaaagattttcttaaaaagcacccagcttaattaaaagtggatatccaagtcacaggtatatttaaaaggcctttatgtttttcttttctaggacctcattttgttgggaaaaggtgtgtttttttttttttttttggtcggctgaagtatttttctccattttgccttgccacttttaatggacacatgagaagggagagacctctgtttttctcctggaaccccaggaattaaaggcagatagacccctctcaaaatttgtttttgcttcccagttatgcctcttatgccttaaaagccgcacattttcctagcctaactcaaaagtcttccctccggaggccaataatccaattaggagattggcaaacgaaaaaatcttatggctgctggattttcttctgcttgtctgtgtagttatatatgtgttgtgtgtgcgagatgtccataaaaaatagctctaattaattggcccaaaggaagacaagtgctaggatcaaatattttttaaagggaagataaaagctgtggtaccgtttagatcacgactttaatctgagaaataaaaacagccttaaaaattattggtaaaatgcagatgtcatcaaaatgtaaataggtaaactaaattatgcaggtcagatactagatttgctaagtgtattgaggttataaactgcctttttggtctttaagagcttttcaccttgcaatggcatgatctcggctcactgcaacctccacctccccagtttaagggattctcctgcctcagcctcctgagtagctgggattacaggcacccaccaccatgcctggctaatttttgtatttttagtagaggcggggtttcaccacgttggccaggctggtcttgaattccggacctcaggtgacccacccgcttaggcctcccaaagtactgggattatggacttcagatgttatctgagagaatgcacaagacagacgcagaggacgctgagcagtggttgagtaggtgaccctagagatgaattccaatgctaagcttaattaaccagtcagcacattggggattctaaagcctctatctcaaattcttttcacatttgtcacagtccttttgagccaagaagttcaccctataggagagagagagaaaaaaaaagaaaaaaaaaggaaggaataaaaaagaagcagaaagttcaccctataaatactggaagagggtagagttttctttttttttaattaatttttattgaggtaaaatatacatatataatttaccatctttaccatttttaagtgtacactacagtagtaataaattagtttacattctttttttccttcattcctcctccccttctccatcctggcctctgggtaaccacgaatctatcttcattagatccacttttttagctctccatatgcacgagaacatgcagtatttgtctgtgtttggcttatttcacttaacataatgtcttccagttccattcatgttgctgcaaatgacagaacttcatttcttttcatgactgaataatattccactgtgtatatctactacattttctttatccattcacctgttgatggggacttaggctgagcccatattttggctattgtgaatactgctgtaataaacatgggagtgtagatccttctttgatttcttttctttggctatatactcagagtggagttgctggatcatatggtaattctatttttagtttttgaggaacagccagactgtttctaatttacattcccaccaacagtgtatgagggatcccctttctccacatcctcaccaacatctgttgttacctgcctttttgatataagccattgtaatggggtgagatggtagttcatttttttttttttttagacagagtctcgctctgctgcctaggctggagtacagtggcacaatcttggctcactgcaacctctatttcccagtttcaagcaattcttgtgtctctgcctcccgagtagctgagattacaggtgcgtgtcaccatgcctggctaattttttgtattttcagtagagatggggttttgccatgtcagcaaggctggtctcaaactcctggcctcaagtgatctgcccatctccagctcccaaagtgctgggattacaggtgtgagccaccatgcctggcctgtagttttgatttgtgtttctttgatgattaatgatgtcgaactttttttatatatctgttggcaattttttttttttttagacagggtcttactctgtcactcatgctggagtgcagtggtatgatcatagctcactgcagcctcaacctcctgggctcaggtgatgctcctacctcagcctcctgagtagctgggactataggcatgtgccaccatgctgggataatttttattttttgaatttttgtagggacggggtttctccgtgttgcccaggctggtcttgaactcatgggctcaagtgatccacccatattggccttccaaagtgctgagactataggcatgagccactgtgcccgacctgtatgtctccttttgagaaatgtctgttcagatcttttgcccattttgatttcaattattattattattttgctgttgagttgtttgaactccttatatgttctagttattaatcccttgttcagtaaatagttagcaaatattttctctcattatgtatgtggtctctttactttgctgattgtttccttggctgtgcacaagctttttagcttgatgtaatcacaattgtctatttttgctttggttgcctgtgcttctgaggtttgacccccaaaatctatgcacagatcaatgtcctggagcattccctcaagttttttttttctagtaatttcatagtttcaggtcttagattcaagtctttacattgagttgatttttgtgtatggtgagagatagaggtttcattcctctacatatagttatccagtttccttagcaccatttattgaaaagactatccttttcacattgtatgttcttggtgcctttgttgaaaatgagctggttgtgctgggtgcggtggctcacacttgtaatcccagcactttgggaggcctaggtgggtggatcacttgaggtcaggagtttgagaccagcctggtcaacatggtgaaaccctgtctctactaaaaatgcaaaattagccaggtgtgctggtgtgcacctgtagtcccagctacttgggaggctgaggtggcaaaattgcttgaacccaggaagcagaggttgcagtgagctgagattgttccactgcactccagcctgcatgacatagcaagactctgtctcaaaaaaaaaaaaaaaaaagaaaagaaaagaaaaaaagaaaatgaggtggttgtaaatgtgtagatttatatctgggttctccattctgtcttattggtatatgttttcatgccagtaccacactgttttggttactatagttttgtagtaaattctgaagtcatgtagtattatgtctctagctttgttctttttactcaggatttctttgggtattcaaggtcttttgtggttccatataaattttaagattgcttttcttatgtctatgaggaaagtcattgatattttgaatcccttctctcattttccctccctccttcctgcccctctccttcctttcttcccttcttcccttcctttcctcaactgctcaaaagtatatctagtgagcactgcactttcaatttcactaagaaaagcagccaaatagagctagctaaggtgggcagcagtgggtggtatctgagttttggtggctgaatccatgggtcccctatcttcctctactcctgcgttcctgtccttcaccctttattgctccacatctccatgattggtgaaaaatgtcctttccacacagttttcaacaggcaaatgtgatggcatctaatgcagcttaattcctcttatgtccttgcttttcattttctcctttcgctcttcttcctcactttctctcctccaggatccttttggcttgtctcgaagttccttctgattcctttgggctgtcagctccgggggccgtgtgaggggcagggggaagatgtgtttgggtccatgcctgctagctggcacgaggagcacgttgtggggcacacgtatgcatggagccattgggaaaagctctcacatctaactgtgtttccctagacaagtacagacaatcaccaggaactaaggaacaagaagcatccaaccctgcatctgtgggtttcctgaggtgactctcaattgtcataggtgagcttgctcccctcctgctctccacccttacactgccaagagcaagagcgtagaaagacataagggatgcggtggagccaaaaagctaaaagtttttttctgtctgatttgttcaggggtgaagagtgagtgaggaaacccttggagcacttgtttgcttcacagacatcctgacctcctttcaactgtaaagacttagtcagaggacggcggctccctcagcctcattctgcagttccaatgacactttttacaaaggctctgtacttgtctgattcttaaatattccagtttttgaactttgctgcagtagttgtattcgaaatgggttaattgtctcattttctttttaatgcctactctttcaaggctcaaatcttgaataggtcaaaaagagcaagaggaaaatgtcagagaatggagaaaggcaaatacagagaagcagtgtgaacatccacccggcgaggtgacctgatggtgctgctccatgtcagagacagtagtgtctgggaagagggagccctttccacagggtggagcaaaaggcctggagctgacacctggctcctgggcccactcgcccaccacctcgagcaactcccttccttaacgtctgcccgagtgttaagggctgagcacatgacctcacaggaggatgtgaggggcagcggtaacatgtgtctagcactttgtcccttataagtcactcacaaatacttatatccttattatcttcatccttttctcttgagtttttctctaattctttaagaaggaaacacgtagccaggaagtggagagcctctcacatacttggggagttttcatatttcccccatcagttccttttctggcctgagctcatgctccctaagatcagggcttgggctttgttttagtctgtgttgttataaaagaatatccaacagtgtgtaatttataaagaaaagaggttgacttggctcatggttctgcaggctgtacaggaacaagcttggctccagcatctgcttggcttctagggaggcctcaggaagcctttactcatgggggaaggcaaaggggagcaggcattatgtgagaggaaggaagagagaggcaggggaggtgccaggcccttttaaacaatcagcgcccatgggaaataacagagccagaactcactcattaacttcagaatggcaccaagccagtcataaggatccacctccatgacccagacacctgccaccaggccacgcccagtatcagggatcacattttaacgtgagactcggaggggacaaacatccaaatcacatctggccccataacctttggagacctcagctctggcgctagggtggtaggtcccctaagggttcgtgctctctgaaggaattgggttacattacctgggagagctttctggaggaagtgagctttgcttctcacaggtttctataaggagaaggatgggctgttggaaagggagtgagtgtgtgtccaagtgagggaaagtgaggttcagcatcttggtgctcttggctcagcttccctttctatgccatgcacagtgcctccaggatgccagggggtgccatccctgacctgttctggggtgggtgtgcaagatgcgaaatggctaatttcagttcactggtaactctaacatttggataataattggccatagcattagctttggttatacatctccaaatgtgttattacattatatatatatatatatatatatatatatatatatatatatgcacacacacacgtatacatatatacacacatctacactgtattgatatgttgatatattgatgttatgaattattttaaagagtattctattgatgtagaggataatatgaaattcaatattttctggcactctttttaaatgatacttaggccatctgatgaaaacagagctcagtaaagatttcttattgataaatcaacattacaaatgaagactagtttcattgccatgatcagtaaattaagggtcataaattaactgttgagttattttctttgcactattaagccttccactcaatctttctacagtctttcttatttagcaaacggtgttacttgatagaaacctctgctgtgattttgttttttgaaatttaataagaaagctatataatacaattctcgggggaaaacaagcaaggtaggtttttcacggtaacctccaagcagagaaatggtttcagtgcgcagtccagtgaatttcctccatagagtgtgctggaagaagtcacctggaagtgatcaccagagtgatattcagtttgactctcattggtttgtatataattgattatatataaaaacaaatgccagggtgagggtgggactagagtccccctttcaggctcctccccttgcatttccatctggtcttgcagcaagttaaccacggtcctatcttcaggttcaattactccctttaaaaaataggttttaacacctatgtatctctcaacattatattgttttattttgaaaaattgaataataaccacacacctagctttggaagcaagaggcttcatggccaggatcagataaatgatcctcttagagtgggtgggacctcagcatcccagagcgtgtggaagagtgcctgccaggaagccaccagacaaggtcctaagtacatgcatggaaacactgggcacgatgctgactgtggcatgggccaaaaagtgacatggggcagaacttcagtgggaggaggggtgctctgtacgttcagcttctaagcccactgtggccttcctcttagggtttcacagagccaagcagaaaaggagcacaggtgaccttggcaggaaggcatgcatgggagagcaggtctgcactctgggacaccagcctcaacaggtctgtctcttgatcacgctggcgacaagctgtcatcgtgagatttcctcccctcctggggattgccttggcctctgtctctgttgaattgaatcccgtttcctccattctagtggggtttttttttgttttgttttgttttttttaacaaggactcttgctctgtcaccaggctggtgtgcagtggcgcgatttcggctcactgcaacctccgcctcctgggttcaagcgattctcctgctgcagcctccctagtagctgggattagaggtgtgtcccaccatgcccagctaatttttgtatttttagtagagatgaggtttcaccatgttggccaggatagtcttgaactgctgacctcaggtggtccacccgcctcggtcttccaagtgctgggattacaggcgtgagccactggcatccggcattgcaggtctttttctctcttagttttttctctcactttggtgatgagcattctcctggagatatttaagaagttccaaaagagatacattttttttgaggttttgcaggtttgaaaatgtttctatgcaaccccccatgcttcactgatagtttggatatggatttctaggttagaaatcacttcccttcagtgttttgataggttgctcatttatcttcttccttcaggctgttgagacattcaaagctattttaactcttcatgctttctatataaattgttcccccgacccctgctttaagactgtagaattttctccttggccccaatattatgaaatttccagaaaatgttttttgttgtgtgtttgctttacacattttgttggacatttggtgggtcctttcagttgtgggaaactttcttgagttatttcatctataatttcttctaatgcactatctatgctctctctttccagacctcctatttgaatattggacctcctgatctagttctttagttttctcactttatgttttcttcaatattccatctctttgttctactttctggagagaacttcaactttaccctttaactttcttaaactttcttttgtgttttcattttgagcttttacttctcaagtgtttttcaaatgctgtctattattctctgtatgtttctcttcatagtatcctgtttttctcatgcatgtgatatcttattttatacctctgatgacattaacttttggctgatgcattttttttttgcttaatgtcaattttatacaattgcttttctctgcttgtcttcttttctgctctctatgttatcaatttttctcatgaacctggtagtttttgttttgctgctcatgattaagaggaatctgaaaatctcaccagaaatgtttgtgtacagcagtgacttattgattttgagtttattataaggtaatctgagtgggcgattcactgattcactaggtcttttctgttaaaagtctgtggaaaagactctatgcatcttgtgttcttaaaagttaaaggtctggcttctagcatcctaggagataggatgcaggaataaaaagactggacatttaaaatttagcttttaacacccctataatcatttaatctcctttttgtctctataggacacaactccttttatttgcaaggcatcagatattccttgtttaacttttactgtagaataaagctttaaacttttggggtggggttagatcagtcacccaaagagcactgagtaggaaagatatcccgggggctaaaagcctgtcaaggaactttcaccccatctctatattttcctcccttccctctatccttcgttccagaggtaactggtgccaccgctttctcatcttttaaggattctgacatttaaattggtttggatctcagctttctcttctggaggcactggatttagttctcttgagctgctaattactacttgtccatctgttgctgctgtctcttatcttctcttcatcatccagcacatgtgtctttgtgtgtgaatgcagttttaaagaagtttcagcagggagcaaaattgtatgcacgtgtttaattaacttatcttaacacggaaactggcctgcagtctttaccatatcattcattttatttatgttctatacagagccacagaattcagagtaggaaaaaattaaacattttatatactctaatgccctcattctgtagatgagcatattgtctccaagaagaaaaacagcatgtctaaaatgatatgcttggtttgtgttaggatccagatttaagaagtcaagccccaatctctaaatactacccaatgtccaaagttgctaatatgtcttaatttagtaatttagcaggtcaatttgagttgtagagaccaaaattttgtcctatgggaaattatgatatttgccagaccacaaaaattgagcaaagtatagaagtgctccaaaatcaaacaaatagtggatgtaatccagaaacaaataattagtttggataatgaaagtataggtatattttacatttaaaccaatgaacaaagaatcagtgagcaggaaaaagaaatcctgtgttttaaacatgtcagcaaaaacatggtatgtgcatggaatattcccatctgctccttttgagttctggatttcagactctcttctcagccctccagggcctaagagtccctgtgctctccaaggcttcctccatttctaaggtgctgggagttcctctatctgctctctgctgtctccacccacctgcctttcattctatcaacaaaacaagacaacacaaaacaaaagcaccttaattgtgatgagttttgccccataacagcctttctccatgactgactaattaaaaaaaaaaacttttggtatgatcctgagtgcctgcatggaacttggtgatgagcatgaggcgaacaggattccagtccttacctgtcatgagtcatgcgacttggcctagatacttccaggcctctcactttcctgatttgcaaagtgatctttcaagctctagtgttttagaaccatgaaatttccaaatgattttaaataactattagttatttagaactcataaccaaaggaatgcatctctaagttggaatttcagactccactgtggaaggttatatgtgtttgggtttggagccatgagagaggaactactggaccacgtcatctaggtggctgtccatcctccaaggatagagagcatctaaaaatttgaggttcaagagaaaatgggtgattttgtggctataaaaaatcatgaatgagtaaaaaagaaggaaaccctgccatttgagacaacagggatgggccttgtgagcatcatgctaagtgaaatcagtgaatcagagaaagacaagtgctgcctgaccctactcacagatggaacgtaaaaaacaaactcatggaaacagacagtagaacagagattgcagggctggggagcaggaaaacgggagatgctggccaaagggcacaaaccttcagttacaaggtgaatagctctggagagctgatgtacagcctggtgactattgttaacaatagtgtattgtgtacttgaaatttgctaagaaaatagatcttaaatgttcttaccaaaaacggaacagaacagcctaacagtgtgaggtgtggacatgttaactaacgtgattgtggtaatcacaatgtgtacctctatcaaattatcacattttataccttaaatatatataattttatatgtcaattatatatcaaagctgaaaagaaagaaaaaatgagacacaattttaatctttatatactggggacagatgtttattttatagacatacacctgattatttaaaattaagtcttcactcatgtttcttttgaattaataatctaaaaatgtaaatggaaaataaattatggttgaattgtatcttccaaagggaaaatgacatttaaactgtcataaccctgataagcaaatatttaactttccaaccaatggatgataaatcagctatttatttaacagacttttatagtcatggcttgggattttatagccatttggttttgaattaggctgactgtacattgtactaagaaagaatcacataattaaaaaaataaaatttatggggttgataggtctcacatctgagttataattattatccttctgcttagttgtcttgttttcatgtggagagggtgactgggagttttatttaggctttgcttttttctacttttagaatacgagttttgaatttttgaattgctgttaaaactttcatcatgaacactgaagtgagtgaaaagagacttttgcagtcatttttttggtaagcctattacctgatctgctctgagtaattagcttccttgctcaccgagccatcttctatttctgcttctcacagtctcaagtcctctctcccgaggacatgtgcctcctgagctgcaaagcatggtatgggtgttgtccagggtgggggttttcaaaaatggggagacccccaaccagaaatattcagatttcggctttcagcaggatgacaggaaggactgggatgcactttgtagatacttgttaaacttcaacgaagaatttgaagatttgtataaatcatgggttttaggtcaatagcatctagttagcactgaggtaggtacctggcaaaggccttattcctccatgtctgattcacactgttggacatattctcttttcttttctttcattttgagatagggccttactccattgcccgggctggagtgctgtggcagacacagctcactgtagcctcaacctcctgggctcaagtgatcctcccatctcagccttctgagtagctgggaccacgggcatgcactaccatgcctggctaatttttgtatttttttttttagagatggggtcttactgtgttgcccaggttggtctcaaactccaggactcaagcaatcctcctgcctcagtctcccaaactgcttggactacaggtgtgagccaccacaaccagcctcattggatatattcttttgtagctaatttttgtgtttttagtagaggtgggattttgtcatcttggccagactggtctggaactcctgacctcaggtgatctgcccacttcagcctctcaaagtgcagcggttacaggcgtgagtcaccgctcccggccaatttaatttcaagaagacaaaatacaaaatggaaaaataaatttgaaacaagcacttacataatgaaataattatttatttggggagttataatggaaactattttgatatgcgcccgggttttgttgcatggttcacacacaaaaattctttatattttttcagtctttgatgatttctaataaaatgagaagagtttgttattgaacatcactttgcttttcttctttaattggctgcagaaatgccagttcccaaggagaaagcatttgccagtttctcttcagtgttttaattttccagttataagccatagctgccagatatttttctcctgtgaatatcaataatgtatgtttaactagatttacattttgtttcttttttattattgacatttttcataattagatgattgtggatttaacaataggaaaaaaaaggcaaactgtctttagtgttaacgtcaatccctgcctcagaacaggagtgcttcagagtaggggcattattccactcagcacatgagcatccgctcagcatcatatatgcaccaaagaagatgcactgcatgaggcaatccccttagcgcatatcctttcagatagatgagacaaatacacataactgcaaatgagaaagatacaaagtgttaaggaaacgtggcagaaagctttctgcaggtccacagttggattacattttccatggggggctatttcccagaatgtgtgccacttccatgactgctatacaaaccctccatgaatgtcctttgctgtccttttctgccagctggctgcagatgacagtgacaccctgggagttgagaaatgcttgtaagatggaaggaggctgtgtccctgaatgatcacctggaagagagccaccttagccaatgaaactcctgctatgaatgtttgctgagcaagaaatatacttactgctttatatgcctttgaagctataggttcatattgttaccacaatttaaagtgctataataaaaagagttcaggaagcaggcacatggaagcaataagagcaacaaacatttacacaggtattgtttaagtgcttttgtttaacaatcactatagctattagtagcctcattgtaataatgagtaaagcttagagattaaaaagtatttcttataacacagttatttgagaagactgcccagctgaaaacttggcctatctaattataaagaagagccagtgcatgttcctaaaatactagggtgatatgattagaataagctggcttatcaccacagatccacttaagggcaagttacaaataagtcgatgtttacaaaatcttgagagtccactgaggcatattaccatatgtttgccaggaaactctttttaattgtataggtaatattcacattatagaaacattttttaataaatagaaaaaatctttttcatcaacccacaatcttaatataatccttgtttgtattttgatgtacttctttctatactatttttctttttcttttctttttttttttttttttttttttgaggttgagtctcactctattgtccaggttggaatgcagtggcctgatctcggctcactgcaacctccatctcccgcgttcggtggattctcatgcctcagcctctggagtagctgggattacaggtgcctgccaccacacccagctaatttttgtatttttagtagagatggggtttcaccatgttggccatgctggtctcgaacacctgacctcaaatgatctgcctgcctcggcctcccaaagtgctgggattacaggcatgagccaccgtgcctggcccatactattttctatacatgtttttaactaggctataatcttattgtatgtacaattctgaattttgctcttttcacctgagtatatcacaatcattttccatgttattaaaaagttttcaaatgttttcagtataaaaaatcatatgtgccaattaaataaaattggatgaggaaaaaagtagggaaattttctctcttgcatccatcactcaagaagcaacgagaatgttctgctatttcactcaatattttgtcataacaatcttctaatgctttacataattttaaaaagctaacttttattagtaattgtaaaccaaatacaaattctatgcacgtagctgaagaacacagaaaagcacaaaggcaaaataaaatataatcttactactttaagataaacatttacagtattctattaacatatatgtatatgtgcatacattttaaaagatagtgtatcatatatattgttttgtagcattttttaaaaaaaattcagtattctatctgtaatggttaatttcatgtgtaacttggctaggctatagtgcccagttgtttggtcaaacactaaatgttgctgtgaaggtatcttttagaagtaatacttagaatcagttgacattaggtaaaagaggttacctttgatgatgtgggtgtaccttgtccgattagttgaaagcctaaagaacaaatgctgaggtttcctgcctgagtttccagcctaccatctggtattacaaattttaaacttaagattgcaacatcaatctttgcctgagtttctagcctcctggcctgttctacaaattttgaacttgccaactcttacaatcccatgagccaattccttaaaataaatctctctgtatttatatatgctttggagagccacagaatgatgttacaatatcgttaacattttctacctcagtattcttttacaagattttaatggcttcctaatgattaattaaatggtaatcatattaataagatcatagtattcaattgaatgatgttccatagtttacatatccattcctctactgttaacacctctaacaatttttttattgtggtagaatacatattaacaaaaaatttgccattaagtgtacaattcagaggcattatttacattcattatatggtgtagcataatcataatctatttccagaacttttgcatcaccctaaacagaaactgtaaccaccagatcatataccatagttgttttaagttgttaagttttgtaatattcattattccaaatagccatagataactgataccaaagttagtaccatgagtagggtgctactgaagaaaatgtaaagcaagtgtcattgtttttaggactggacagtgagtgatgctagaaaagtgatgaggtggcaattaggactgttggtgtgagaaaataactttttttttttttttttttttttttgagacagagtcttactctgtcacccaggctggagtgcagtggcacaatcttggctcactgcaagctctgcctcccaggttcatgtcattctcctgcctcagcctcccgatagctgagactacaggcatccgccaccacacccagctaattttttgtatttttagtagagatggggttttaccatgttagccaggatggtctcgatctcctaaactcatgatgtgcctgcttcagcctcccaaagtgctgggattacaggcgtgagccaccacgcatggctgagaaaataactttttgaggctggaaaagggtgacctgtgttatgtagtaggggaataactggcaaatatgtcacctgcagtaactggaagataggaaatgccatgttcctaatgaattcctgtgtctggctaaggagatctctagacaaaatgttgaaaaggccagttgggcagttctgtgtaggtatgacaatatgcacaatactataaagaagctatagagagaactgtttgatttgtaaacaaaattttgagaaaataaagaagagatagtacttgctgggttgaaaataaaactgtttctcatttaccacattttcagtctctccaactgacaaaaggttcttaaaagtaagaaatagcctcagggtaaagaaacataaaatcaaagttgtggctaggggacttctgatacctcagaaagatttaatgtcatgccagaccctcttagaagacaaaagggcttctaaaactcttaagagtgtcttcccaaagcaatccaacagaccaaaatttgaaagaagtctgtctcaaaaataagtatgtttatgaaatttggggcatagagtgaatcccacaaagttgtaagagagtcatatgaatgaaagcatggcccaattggactaaaaaggcaaaaacatttgaaaagaagcttccagaaccccaaatttttatgtaacgagagtagtctaagaaagctacttagctacagacatggtccatttcctgttgaaagatgtctcagaaggtggagctaagcatagagaacaacggattagagaatgacttccatggagcagaatgaagctcaaatctgtgttcctacagaatgggagaccccaacgacagctgatgactgggtttggaattactgtagagcagtgtggttgctatgtaactccttattctgtgcctttggaatgggagtgtctgttgggaatttcctgccctgtgtcttctgtttaacttgtgtttgtgagaggcagataacttggctattcagttctcaggtccctggaccatgaagggccacatccaaggagctaccccaggaggcctctcatttgcatttgtccccgctaatgcaggacagagatcatggaagttgggcccgactggatgagatttgggggtctttggaagtggagaatgtgtttgccctggggaagagaggtgatgtctaggagacctcttcactcagggcaagctctatgacctgctttgactccagaatgtggtagaagtggcatcacataaattgcagagcctaggcttcaagagaccttgcaacttgcctctcactgacttgaagtgctcccatcagagcatcttgtaaggagcaggtggagcatgtggacaagccatccccaccagcccctgagacatgtgagagaggccagaacaggccatccggaccccactgtgctggtggatgagacagcagaaggaatatcaacctaccaacagaatcctgagaaatgctcactcttacttcaagctgctgcattttgatgttatgaaaccataaataacttatgaagtcatctttgctgacttaaagttttccataactttattataacatatcaaaattatgaaaaatgtgaaaagtagaaaactgatgaattttgcttcttcatatggtctttaagaatctcaaaggcactgaagttttttatcttttctgtcttagaataaaaaaccttgaatgaaaatctgcttcttggaaaagcagcaaggtttatgcagaggcaatctggtatttgtgtgcactggcagctgatcatacccagcatgcacgcactctcagggcagagtctgatgccccacataatggggcatggtaaggactcccatgtccttgagataaaatgataaggaaaatacacactgctattagaataacaggcccagcttctgcacattttaattcccaaagttttcatgaaagacaatgattttttggtaccatgtttaactctacaagaatcagtagtgaaaactaaaaatgatactttgtgaaagttcattaattttgttttcagccagtggtggccttggtcagatagaatcaaatctatgatactttttatcagaaatgcttatactgtgtacaaacccaaagtgatggctttcaaagattgaatttgattattttctgtatggtgcagatgaaaaattactacacaggagaaggtgggttggaggtgctcacgagtaaccaggaaacagtctgaagtttttctgatacttctccttggtccaaccaaatgtgagatataaacacaaacttgggattccgttcttatgttttggttgtttcagtctttacagatgtatcgaaaggctgtccaaaaatgtctgacttctgtagtgtgccttcgtagcactagagggttctgcagctgtgaaactgaaggcattggcaagaagccctccatcttcaaaccactttctgctaaggtgtggctctataaaaccactatgagctgggcttcactgagactgagttgtttcagtaggatcttccggaaaaacatgttccctcctttacctgggttgtcattctgagaacaatcacacctccaattttggcttactaagcaatagcgttttaatgattttaagccaggatttgctcctcctttcctcagtatgagagcttaaccactggaggaaccaagaattcatgctggttgggttctgattccactttaacttactgtatagcctcatcccttgtttttctggagattctctttttctgcttcactgatttatatttacattaaaatcaaatgaggccatgtttctgaaatcacattgtccctacatggtcattacaatgagtctgtaatgtgactgaaagacagccatggatacaggtagaggatatcaggcaattgaatgctcatcaagcattcaattcagggcaaatggcataaggtatgcagttggcctcttctgatatctgtgtcttaatcctttctttagcctctgttttctggaccaaggctaagatattttctgggcacagtggctcatgcctataatcccagcactctgggaggccaaggtgggaggatttcttcagcccaggagttcgagaccagcctggggaacataggagacctcattcctacaaataataaaaaaaattagccagctctggtggcgtgtgcttattggtctcagctacttgggaggctgaggtgggaggactgcttgagcccagaagatcgcagctgcattgagccatgattgtgccactgaaccctagcctgagcaacagagcaaggccttatctcaaaaaaaaaaaaaaattctgagccttctaattttttttttctttaattaactttctgtaagcccagcaagtaaataaaacacttattttatgaagcatctagttgcttttaggggaagggacatcctccgcatagtatctaggccagctcactttcttctccttactgttgatttactctctgccattgaatcttctgtgccaatgttggattaatgtttccgggccctactttcatcatgctcctctgtattatcacctgttttggtttacagcaatgatttttaaggtaaggcatggtgtgtccatcatagtcacatgggaactttttcaagccatattaaaaatgtcccccattcatcattctgcccctggaacagtgtgtgcagttgggaccttcaagtaaatctactttgttgaaacccactgatcagcatggtgtatttcataactctttgacttacattcaagaaattccttaacctgaactccattttactctttttttcattcattcaaattaagaatattgcctgaacatgaattatctgctagacgtttttctaggtgcaggaggagtaaggatgaacataactagccataactatagctatcaattgtggagtgtctgttatgtgccaggcacttttaagtgacctactcgatttacttgcatgacaaactgtgaggaaaagcccaatattatcccctattaacagatgaggaaactgaagcacaaacagcatgaatagtttgttccagattgcatcataagaggcacagccagctttcctaccaaagcagccctggcccagagtccgtactccctcctcccctgcctctgcctggtggataaggtcaccctggccttgtggaacttatgctctagtggggacaaatagttatagagaatgaccgatgttactaagaaaataaaagctggtaagaaaacagaagcactgaggaggtgactgaagtgagcatttataattttatgttatatccattgtaaaatataagtttagctttctcataccagaagcagggctcagtccacccttgactcagtttccaatactgttccccatcagaatggctcttgctggtggccagaagtaaaacttagaaatatctctctcagagacacctaagcaggctgggctccccggtttcctgttgcttcctttaaagaagctcttcagacatctgcacaagaactcaaagtgaccacctctcagcccagcatgacctactggaactaatgcctgcttgctttcaacctaccaattaaagctccccaggaaacctgtttagataacaccctggacccaagaaaggtgctgggccatgggtttcttctctctctccctatctgtgctccctgaccccctgtgtgtgtgtggtctctaggcttgccttctatccctgagggtctgtaaatactaaaaacacttaaactttcatattgtagttgtgtctttgaagccaggtccccatcccgtaccttgagggcaaggcctcctggaagggacccatgtaggtggatcccctgctgtccaggcctcttagctgctggggtagtgaccagttaagtggatagagtttcattcaaaacaataatcattcaactgtatctcacatcaaacctctgctctagtttatgtatctactttatgttcttagaagactgtgcaaacacattgtcttttttgagtacctgtcttgtcctaggtactctgcttggtacggggagagacgaatcttctgtcttcaggggcttccactccagcagggagaacatgactaatagtgactgcctgctgctgtaggtaataagtggctcccactaggccctccatttggtggccccctgtccctctcactggtggaagcctacctgtcctctaaggaccagctcactaatgtcctagatcctcacggaccagattgcttttctcagaactgaagagcacttactaatggcacctcttgtcatatgccatcccaggatttgaattttttttttttttctgtcttgtggcccaaataaatcctgaactcctcgagggctgggagtgtatctagcagtttccttatactggactaatcagatgctgactaggtagcagtgagaaaaatctagaaattcccttttagccacatcgacttacacgaggggatgtgtgtaaggtactatagctctttaaacaagaggtggtctcgtttgaagggtggattgatgtgggtgttcaaatgatgtcacaagtggctggtttctctgtctccatttcttttttttttggctccatttccaaatttcccagatagcacagcaagttggccccagcagctctagacactccatcttctcagggcatagccaacacaataaaatatttcaagttcctgaaagatagctgaaataagccctagaagtttctggattgggagcagagccaaacctgccagctcacatagatgagggcagggaatagggtgtctcacgatcacagtgtcctgccttctgatttgcctgggactgtcctgttttggcaccaaaaatatctgcatcctaggaaaccctcaggtcctgggcaaattcagacagtgacttgccctatcagaagcaaagcaaggtgccattacctgaggtgggcaaattcagacagtgacttgccctatcagaagcaaagcaaggttgccattacctgaggtgggcaaatggaggctgggtggccagtgagtgaccaataaccccagcattggagagagtggagcagcccttcaagaagttccaacctctgcccaggactggttttaccaacttcactaggcttagaatcgtaggaagtctatttgggacttgcgagtctcacgtattcctgcctaaatgtttatggatacctgtttagagctgaaatcttttcagctcccataatatgagggaattaggtctcaaagaagatcatgtattttgatcagaccttatagctgagcagtggaaagaaaaaaaatcagtgtgagatctcccagggttccgcaggagtggcttccttagtccaactggcagcctatcctggaatattgcctgggagagaggttagttgcttttcctggtgctaggaactgaatggttttacatattgatcaatgaaaatacttatttggcctacaataggtgcaaaaatactgctaattactaacagtatctcttctttgctgcgtgccagacactccactgggcattatgcagttaatatgtaccatgaatttcccgtggttagcaatgatgtcaggcatagaaaagacatgaaattatgatgtcaaatgaataaactggaaaaaggaatttcttgaattttctccagctgtcctaagaatgtatctatactttgatcctggcctaccttttcaacatctaaactttattcccccaagcttctagatattcaaagttaagtattaaataaaatcagtaaatatatacaagcttgtttggccattctgaataaggttatatttccaccacacaatctccaaattctctagcagaagggatcagtatgttatagataccccctttccttccctccctggcaagccaccacatctgttatgggtactcaatgcagtggctgcacctgggcctcactcattaagcagttgttgattgagtgactgaattgaatgcctgatgagctcgcaagtaagattcagactgtgcctgcaaactaataggatccctccgctttttattcactactgctgaggtagatctcaggccagcctgaagtttaggtctactgagaaataataagcctcaaaaatcgagctttgcttcacccagtctcccagtaaacactaagaaatgttcacattatttacacatcctagactgcctgtcttatggaccaaatgtttgtgttctccccgcaatttatacattggaatcctaaccctcaatgtaatagcattaggtgctggggtctttgggaggtgattggctaatggacctggagccctcatgatgggatgagtccccttatcagaagagacctgagaaggcttgcttcctctccctgtgctcttcatgatgtgaagacacaagaagacagccatctgtgggccaggaagaggtcctcactggaacccaaccatgctggcaccccaatcttgaatttctagcttcaagaacttgggaaataaatgtaagccagccagcttatggatttgttacagcagcctaagctaagtcagagtctctagaacagctggtctggggcagcggtgaagggaggtgggtgggcatatgaccctgccctgcacatgaatggcaaaggcaactggagagcctctcccttttggtgagatccccagtccacaagggcatgttcatccatagctttacttcccgaagcaaattctggttcctggggcctgtgcctccatagatggcatgatctgcagcctcctgtggtaatttaccctcttcctaaatttctgagtcttcacatttaagcaatcctagttagatatcctctacctgtatccatggctgtctttcagtcacattacagactcattgtgatgaccatgtagggacaatgtgatttcagaaacatggcctcatttgattttaatgtaaatataaatcagtgaagcagaaaaagagaatctccagaaaaacaagggatgaggctgtacagcaagttaaagtggaatcagaacccaactgtagtccattatttgtttcaatcctgctcttttctaccatatcacccagtttccaaatcgttcagcaaattgccatggtcaatgggattaacctttcccttttattctcaggaaatctcccttgtccattttgcaagactgtgtgattctttctactgttacaaggaataaaagccttcctaaaaaggtctttggtgcctttattattttacggatcatttctgagggaattattgaacttcattatgtaaccaccccttgggttcaccttgcccactgcctagacagagccaatttatccagacaggagaattgcaatggagaaagagtaattcatgcagaactggctgtgtgggagactggagttttattattactcaaatcagtctccccaagcattcagggatcagagtttttgaacataatttggtgggtaggggcttggaaagtggggagtaatgatttgtcagtttgggtatgtaatcataggtggtcgaagtgagtttctcttgctgtcttccattcctgggtgggatggcagaactagttgagccagattactggtctgggcggtgtcagctgatctaacaagtgcagggtctgcaaaatatctcaagcgctgatcttaggttttacaatagtgatgttatacccaggagcaatttggggcggttcagactcttggagccatatgctgcatgaccctgaatctgtaatttctaatcttgtagctaatttgttagtcctgcagaggcagactggcccccaggcaagaagggggtcttttcaggaaagggctgctatcaattttgtttcagagtcaaaccatgaactgaattccttcccaaagttagttcagcctatgcccaggaatgaacaaggacagcttaaaggttagaagcaagatggagtcagttaggtctgatttctttcactgtcatgatttcttcagttataattttgcaaaggtggtttcacttagtctcagagatggttggggctgcttcagcatgggatgcatgaaaggtgctcagctgtgggttggagcaggggcctccactgttctgctcttagctcctggtttagggaggagcccactgacagttgctggatggatggctgctttgcttctggacttcacagctggttttgtgcacagagtttgtgtttaggggttaacttcctcttgtcctcacatttccctgaagaaagtagaaattttgctcctctcctgggtgtgagtatcatggtgcagatgggggcagttttagagtaaacatttttagttttgcgccctaatgaccttaccctcaggcatagatgatccgactgctttcattgcaaagaagctgctaattggctagctcaatttttgcgcttgttgccttcaaagtatatgaaaaaggcaacgtgcaccagcctctttccctggcttcctccttaatgtgtgtgcatctggaggccgcaagactcctgcttctagcaggctccttgtgatacacagagttctcgtgccctacctcaggcctcctcagggcccagggctgcattttccagcagctccctgcccttcagcaaccaggcacctctggttcagagccccaggagtaggcttggaattcaaagaggaagagattggaagccctgttttagcttcaggcctgtgttctatctttcaaacaagctttattgggaaactctgtaatttagtagttctcccgccattactattatttcctatttggcttctgtgtctagtccacactccttagagcacggaagggagcaggtgtgagggattggccatccaaccctatccaagtttggatttctgttaactcattctcttggttttgaacccccagcctggtagcctttggttgcaggcaatctctcctcgtaaaacatgagagtgtttttttttgtttttgtttgtttttgtttttcctgataagggaagactgccactttctcaagctctctgcttcaccaagttctgacagccttcccattcaagtgtaacttattcatatcactcaaatatttgctcagttgtgctgccagcatgcaggatatcagagacctggtaagacagttggctgcatggtgctgtctcctgctatagaaatagttatggacagtcattctcccctggccagggagctgtgagtatttctggtgacttcatgacttcctatggtggcaaagccatatggtatttcatttgaagtgtcaagacttcctcagtgctgcccaggggaatgtcaggcaactgacaagaaaataggtaacacattaccaacatcaatagtaaaaaaagaagatacaattaaactttactaataactttatgccagttactttattgactaaagtggataaactccttaaaaaacgcagattagcaaaactgactatgaagtaacagaaaatttaaaaagcccgaatttatgagagaaattgtatttgtaatgagaactctatccacaaagaaaatttggggctcagatggcttcaggctgtattctgtgaaggaacaaataatactaatattacacacaatctttcagaaaatgaaggagaaatgaaaccttcaaaatgtattttatgaggctagtatacccttaatgccccaaattgacaaaggtataagaaatgaaaattacataacaatgtccctatattagcaaataaaaattagcattatccatatgatattagcaaatcaaatacagcaagagataaaaagggtgatatatcctgacaagacggatttatcacaggaatgtaagattgatttaatgtatgacaatcaatcaatgtaattcaccacgtactttccatatgataatttcaatagatgtccaaaaaatatttgaaaaaacccaacaccttacaaacaaattaggaatatttaggaataaatataaataaaatgtgagatctctatttttgaaattggaaaacattgctgagatatattaaaaatttaaacaaatagagatatactaccatatttatgattgaaagtttctgtattattagtatatccctgcttcctaaattgatttatagattcaactcagtctctataaaatcatagcagacatttatgaagaaattggtaagctcatgctgaagtgttttatggaaatgcaaaggatcttgaacagccaaaataattctaaaaaagaacaaagttggaggactcctactgcatgatttcaagatttactttgaagctacagtagtcaagagtgtgagatatttgtgtagggagagacacataggtcaggggtggagaatagaaagttgtagattagatctacaacatgtagttaattgatattcaaaagatatgaacacacactttacaaaaaaatgaatgtccaataaatacataggaacatgctcaacacaatcttcaagaaattgtaaatcagtacaataatgagataaaattccacatcagctagaatagctaaaatcaaaaagattgacagtactaattgtgggtactctcaattgtgggtattcttggacattgtaaaaaggtccaaacactttagggaattgttttgacattttcttatcaaattaaacataatctaaaccacgatccagaaattccactaacataagtatttactcaagagtaatacacattgatgtgtacaaaaagacttgtttgaaaaatttttatagcagccttattcactatagccccaaactggaaacaaccgaaatagctatcaataggataatggataaacaaattgaggtctattcatacaatggagcaatactcatcaataaaggctgagaagtcttgacacagacaaatctcaaaaacatgatattgagcaaaaggagccagaaaaaagtgtgctctatgtgaacctatttatacaacttcatagaacaggcaacattaatctacagtggcaaaaatcagagcagtggttgtgatagatgcaggaggcagataaaggcctaggcagatagggaagagcccccggagaaacttcaaccttccccacaaatatttacaccagatgttttgtgcagataagggaagctgcacagggagctttcctgggcatgcccacagcagactggagacc

SEQ ID NO: 2593 - DNA, 36811 bp, Homo sapiens
aaacagcagagaaagaactggccgagcgagggggacggggagccggggcgccagagctagagacagcgggcgggcaaggagctggcagaggcgctggcattttgaaagcgaagcagaagccgtagaatcagcggcgagcctgttgaaagaacccacaggtgcatttcacagcactctgggcgaaaattggatgtgaaaatgaagccagaccgaggtaaatgatttgtttaagtagggcttgttcccccacccccttcttttctatgcctcaatttagaagtgttaacctaattctgcagtaggatcaactatttctgtatcatatgtgattatctgtttttgtgacagattccagctggtgaggtagagaaaggcatatggaagagaaggttaagcgtttttacaaaagtgcttctgaagcactagcttcaagagagattctagtgtatctcaaaatgaaagtaaagaatggtatttgtatctgttgccacaatacaggtatcattttagagttgtacttgctcgtttttaggtagtcaatctaacttcaactttcaagaagttcataagctttttaaacttgaatgtgaacttgataaaatgaagagaaaacttaagcttgagttgacaactgttattttattactactttgattagttgatttttgtgctttaagcaaactccaaaagtttgcagagtactccagtattcaatataccagcatatggacagtttgggccactgaaatccctggtgataagtaaatgtcacttcttttctaaacctgtattttcaggatttataagaataatatatacactgcttttcaaggacttcaaggtaattctttatcagtcttctgattaatggcaagaaccaattttagaagatgttaatatagtagtggttagtagtgagagcttttcagtcagatatgagtttgattccaaggaacattgtgaagtggggattattttatttggtagggggctggactagatgacagatttccttccaaatccaagtctttaggattggaaatgttaatttatcctacgaattagatgcttattttaaaatttatatatattaaactggttgtttttccatatattttttcaaagtgattagacaaattttctgggtaaaataggtctattgaaatgcaccagaaggaattggagaaaaccatacttaatttagtgatttaaattagttttaggtgttggctattacatacaatcaggcagcagctatgtatgtatcaagtattagtaagtgtattgctcctgagcaggttccttgtgtagaatgccaagtttagatttttagattacatcaatcactttggaaaaatggcaccaaggttagtaattgattctcagaataaacaagcaaataaaatcaaagtcactatttattttgaattgttgtgaaaagttgctttacagtcataagcagttttaaaaatagtatttgcagccaaaactagtgttaaacacaataaaatgtttagttacgtactgatatagatttttaggggaaacaaatttattcatcaagatttccaaagaagttttcaccttaaaaattgtagctttctttagcattctcaggtaaagatgatgggattgtgagtttagtattgtgattatattccataataataacataaacctttagacccatggctttttttttcttttactaaaaccagtgtaagtaatcttttacttagcaaactagtacagaaatattgaaataagcttttcacaaacgtacttacccttactgtgcgcaatgtaatgttgtattttctattctatttcacgttttgaaaaattgctgtcaccacccattgaattgatttcttcaccaattaatgggtcatgatgacctgcaatttgaaaggcagagttatggacaactcttaacgagaaaacagttacacttcatttttttttttaaactacattggtgtccaaagaactatcctatataaatgaattttctggataattgaaactttttaaacgtcaaaatatttttagttgtaatcatgatatgtggagacatttaaaaaatgttcacgcttctggtttgagatttttttgtctctagtttaaaccatctcagcctatctttttttattctgatttttatgttccctggctgtcaacagtttttgttgttaatatatttatccttgtcaccttttaattttcctgcttttagtctctgagctagataattagataaccgtacttaacactaagttttctctctttttttttctttttcttttttttttttgagacggagtctcgctctgtcgcccaggctggagtgcagtggcgcaatctccgctcactgcaagctccgcctcccgggttcacgccattctcctgcctcagccttcggtagctgggattacaggcgcccgcctccacgcccggctaattttttgtatttttagtagagacagggtttcaccgtgtaagccaggatagtctcgatctcctgagctcgtgatccgcccgcctcggcctcccagtgtgctgggattacaggcgtgagccaccgcgcccggcctaacactaagttttctataagatgaacataaataggagaacttctcagatgctcattcagagtgtgagtaaagtgtggattttaatgtagagactcagattatagttttgtgaaagacagctgtgcttcaaagagttaaagtttctaaataaatacaatagcctcttatcgtacatgattgggtgtggtagttggttggctaactgtaaaagtttaaggtgggggtcaggaaaaatgccttaattctttttctattggctgtttttatggaaggtgtggggagcattggtcaattctgctccctacagcctccataaaaacaaactgatagccaatagaaaaaaattatctgaaggtcaggagtttctactgtactttgaaataagatgttatggtatagcatgatagatttcacaatagtcgatagtattttactgtacgatagtattttactgtactgtaaaaaaaattaattttaagcaataatataacattacttgggtaacactgccaaagatgagtcttagatgttgtcattagcagacctgtgtttttatacttgttccattacttgcttgctctctaatcttcatcacataatctctgagagtctcagtttccttgtctgtaaaatgggaataattccaacttctcacagttagaatgaaatatgaccgtgcttggcacatagcagatattaaataaataatatcgtttattatgttaaataaacattacaaatgcttatatattggttatataagcttatatataagcattacaaatgcttatatactggttatataagcttatatataagcattacaaatgcttatatattggtcaattacaagatatactcaacaaaggtaaataaataatgaaatgtttaataacctaatgctattttgttctgttttgcattgatagtgttcaaactgctaaggctcgagcagattaataattttttaatatatagttatctgagaaaatataaaagctacagaaggatacttgcagtatatgtataatgtatttatattgtcatttgctattacaattatggcttctatatgtagaggatgacatgggtggactaagctttctggaataattagatttttaagtgatgttaacagctgactagagctgggcagctggaaaatttaatgttattccacctttgactcaaggatgtacaagtttggacctggttctagacctgtgtgtatattgaatacctggtgtttcaagagaagtctaaggtgtggtccacggcctgttgcggtggctcatgcctgtgatcccagcactttgggagcccgaggagggttgattgcttagagcttagaagttcgagaccaccctgggcaacataacaagaccctatctctatttaaaaataaataaaatgtggtcttagtgtagaggtaattaaaaacatattaggttatgttctaaatgtatttctaattttgtatttttaatatctgagcttaatcaaaactgctatgaaagattaagacctataaaataaatcataaattagtaatttaaatctactgttttaattcatatttaaaaacattgtaggctgttgatctttaagttaaaactagtagtgcaaaatctgttccacaaacaaaacaccacactattttgtggtttttgtttttgaggttaaaatagagaagtgcttagttttttcctccatttggctatattacaaatttagacattagccttagaatttcagtggcttatgaacttaactatagcataatgcaaccctgttaacctcaaacaattcactcctgggcaggtgaaataggaaagaagtgttaaggactagaaaaatgtagcaaagcaattaggtgcattgcttgctaagaatagttcattgttagttgatgtaaatcaaacaaaagaaatggcagatgttggagaagaaatactgactagattaaataaagcggccttttgctaaattcccaggtagaggtggtcatgatagtatgagtagcaacagctaatacttgttcatactatgtgccaggcactgtcttaagtacttcacatatataactcatttaatcctcacagatactcaaggaaatagatgctattgtcatctctgttttatggataaacgaaactgagtcatagagaagtttggtaacttacccaaggttacacagctaataaaagggcaagctcaaatgtgaagtgaacttgagcatatgctcttaagctccctgactggtagcagtaagtaatgttaaaataccataagattttgggaccaaagtggtttaaaaatacttgaggaaaactccaaacaggtatttggtaagtattgtgatcttggaaagctgcttgtcctctctgcctcagctttatctttacaatagggaaagtaatagtacctcagctcatggttattttgaggattaaataagttaatgtgtgtaatatgcttaaaacagtggctggcacttagcattcaaatgtaaactgctattatttttggacattttctaaagaagaaaccagtcagttagtgaaagctgaggaagacaaaagggggctaattcagctgcatgttttgtatattcagtgtgatcacaagttaaaagctggctactgttgttctttcatccatttatgttgatgagtcttggcatcagtagctgtcaaataatcaatggcttgatacaacttctgagattcagatactaaaggggttgacgtagagataccccatctatgtttttgcctgtcatccagtaagaaggaaatgattcagtggactaaaccctgtcatttctttgaagaatgagaaaaaaaagataattggaaggcagaactgaaaggcaaatgtgtatataaggagagtgacttaaaaattgattttctcttcaagaactgaagaaacccatggggtctgagccttctgcattgtgaacaaatatagaaaaaaattagttgttaaagaatatttatattcttttgcctttctcgcctttggatctaattatgaaaatgttttcaccctttttgaggctggggattttaaaaactggaaatattaaactcagactaacaatactggtttttttttttttggataatgaaaaggcaaaattgtagtacttggaaacagtacttcttagtaggtaaaccaaagtcaatttgttaatagttaattctatctttgctcaaataggtgaaaaatcagaagagttcctcatgttagactttttctttttctttttcatgggatggggtcttactgtgtcactcagactggagtacagtgatgcaatcataattcactgtagcctccaactcctgggatcaagagatcatcctgcttaagcttccagagtagctgggactacaggtgcacgccactatgcctggctaattgtcttttttttttttttttttttttgagaaatggggtctcactatgttgcccagactgttctcattctcctgggctcaagcagccctcctggctcagcctctcaaagtgctgggattacaggtgtgaggaattgcacctggcccagactcttattaaagtaaaacaggatggaataggtaaaaaatgccagcagataatcaaaatattagcctaagagcccatgtgtaataccacaattcctagcaataatttgagttgagctttctcatattttcctttccatgtaaaagatactcatctcttccccttgtttaccatatccagccccactagctgccttttaggtttttgattaccacttaggatctggtatgcgaaattccttctgcctaaaaagcctttctccccagtcatcacattggtgtctccttgttgttcttttgttatagaacttaaccgtcattttttcagagaggttttctctcactaccctatccaaagtgctcagtgaatgttaattgctgtcatttattaaatgagatgtcccttgttattctttgtctgagcagcctgtatttccttcatagcattgaccacattttgtaatttcttttgtttattgtctgtctctacagctagattttaagttttgtgagtccggaaaccttgtctcttattcacacctgtattcccatcatttagtaggcagtcttgtacatggtaggtgcataggtgtttaatacatatttgttaaatgaaagaatgacttgtatgtctcagtatttgtggagcagataggaataggagcagctgggtagcaatatttgattgttttactgataccagctgaacttctgccaatttagggattggtttgaattaatgactgttaggctgttatcacaattttatacttaattttttgaaaatacagttaaggatactatccataacttaaataaaggttatatttcttaattaatcatatcttattgaattaaaacactataaaatatcttaaaagtaggcaaaagccatttagtgacaatggtttccagtttatatacgtctaacaaatgattcatacacagacatttgctagaagctctctgatgtccaccccctgtgctgaatttgctcctattgctgtttctgagagagagggagaatgtctgtatgttcaaattggtaaacctcaggtttatgaatataagaaagtacaagtcggatagactaatggaaaaaaaactcaaaggatttagagtttagatttgggacccattcttggattaagtcccaaacctgtttacttatctgtaagatgtagctggctaagggtgttgcttctgagcttcaactaagataatatgtcaaagaacatagtaagccatgagatgctatataaatgtggactaatttactctgtgggcaggattatttgtatagatgtgcaaagggccaggtcttcccaaatacagccagctgcatcttagttggtgctattcacacagtatgaggattttattacttttagtttcctcttgctatcctgacagaaattataccaactagagattcacttggattaataaatgtatacttagttatacatttttcgaggactgttgaaatgatggtcatattttagtttaaatggtttccttttagcagcgtactataatgcaagaaaagttaagacactaagcttttaggatcaaatttggattgaaattctaacttcggaacttaccagccaaattaccttgaaaaaattacatagcctttctgaacaacggttttgttttttgctctaataccgtcaaccttaagccttgtgggaaaggtaaactgagaacatatggtttggcacttaacatacgcctagcactgggtagggattgctaaatggtttcctctgctaacaagaatacacagcttggaacagctgcactgaggaaatgagtgtttcagaactccgttttgaaaactggttggaacaagcatgaaagatcaatggacacttatgtcactgtcaaccttgtcttctgaaatatacaataacatagaaaaaagtcaaaaccagcattgaactacccaatctttaatgcaaatgcaatggagagggaaagtaggcaaattggaacacagcccactatttctgggtgatagtagaccctaatgaacagtttagagcagcatcagggcagagagtgaggcagaggtgggaactagaaagaggctgatggaaaatagagtggtgagatgttgcccaaaactgcttttttctttgtttcagagtattacctaggattgattcagtgcttggagcatggcccttctgcttccatgacccagaatttagatttgttccatgatgctgcaagatggccattataggttaagaaacctttggtagactcttctgggaatctaatcataactcatattgcttgtcagtaatatttaagcctaaataatggtcagacttaaacatatcccctttgggaacatgaccaatctgtatttgggaataaacaatatttaaagttttcatattttggtttcccacttaaccaaatgtatattcctgaatggaattaatttagcgtcagtatctgaaattaggctatttgtaaaactttatcctaacatctagaaagtgcatttacatttttcatcaaattagcaattttcttttgtgaagagagatcatggtttgtgagagagatcattggccatttctacttaaatttataacagtaagagaatgtataattttagcccttgatattggcaaacttctttttgtttattttggtcttaaaataactttaaaggtctatatcatatttggtgtgtttgacagaaggatgctgatatacaaaaaattattcattttatgaaagaactaaccataggatttctctaagttaccctactttgcttgctctacaattattataattaaaaatttcaggccaggcgcggtggctcacgcctgtaatcccagcactttggaaggctgaggtgggcggatcacaagatcaggagatcgagaccatcctggctaacaatggtgaaaccccatctctactaaaaaaatacaaaaaaattagctgggtgtggtggcaggcgcctgtaatctcagctactctaggactgaggcaggacagtgaggcaggagaatggcgtgaaccggggaggcggagcttgcagtgagccgagattgcaccactgcactcaagcctgggtgacagagtgagtctccgtctcaaaaaaaaaaaaaaaatttcaaacccacagaaaagttgaaatactacaattaacatccatttaccttttcatagattaattgtgaccattttacaacttttgttttatctccatataagtaggtgggatgggtgggtgggctagatagacatggagttttgttgtctgtttttttctatttttaatgcaaagcctttttgtttatttcaaactggtacttttttcagttgacacattgcaattgtatatatttatgaagtccagtatgatgttccaatacatatatatgttgtgtaaataattaaatcagggtatttagcatatctttcacctcatgcacttatgatttccttgtgggtgggaacattcaaaagcctcttctagctattttataatatataatactttagggttatccttagtcatcctactatgcagtagaacaccagaatttattcctcctatctaactgtaattttgtatctgttgatcaacctcttcctattctctccttccccttacccagtttctggaaaccactgttctactcgctacttctatgataacagcttttttttaagattccacataagtgagatcatgcagtatgtgtctttctgtgtctggctgattttactgaacacgatgtcctccaggttcatttatgttgttgcaaatgacagtattttattccttttgtggctctatagtattccattatgtgtgtgcgcacgtgtgtgtaccacattttctttatggacacagattgattccatatcttggctattgtgaataatactgcaataaatatgggagtacagatatctcttcaacatgctgatttcatttcctttgggtatatatgcccagtagcggaactgctggatgatatggtagttctgtctctgatattttgaggaatgtctatactgttttccgtaatggctgtaataacttacagtctcaaccatgtgtaactgttcccttttctccacatccttgccaacacttgttttcttttgtctttcttttgtctccagccattctaaccggagtaaggttttatctcattgtggttttgatttgcatttctctggttattagtaatgttgaacatgttttcatatacctgttggccacttgtgtaagttgcagatgtcttgacacttcagccccagatacaacatgtatccagcagtatgctacagctggcaggtactggcttgcaaaagccgattgtgtatatttcatttcaactcttcacctagttggttacttgaaatcagccatggtaatggtatttataccatggaaattggcagtgctacaaaccaaggccttttttcctctctgagccagccgttaaacatttacggccataccactgcatgtgtcttctaaaaataaaagtattcttctgtatacctgcaatacagttactgcattcaatctaatacttacatagtactaatatctaatatacagtttatactcatattttcctagttgttccaataacatctttagtcacattgccttttaaagttgtacattgcttccttttacagaaatggagttagaccctgatgttagacaacatttacaaaagttttggagtatgccataagaatatgataaaaaattagatcatgtaaatagaacagctaattaatattttagtagatttttcctctagcttttaagtatttaggcaaaatggattaaagagaaaagtgaatattgttgaaatcccagattttattccattgataacacattaaacaattatatttttaaacctaaagtctcaggctgactgacctcatttcctggtgatttccaaggttccctgcagtctagccatattagtcctgttattcttcagtcactacaagcacatttgacactttggggcctttatatttgatatcttcgctcagaatataagtctcctggctcttttttttttttaacttggctttctgccatcaaagaagccttctcggaccatccttcaaagagtacagctaattcattctccctttactctgcgttactctcttcatagtccttacattgtttaatctggtattctgtgtttatttcttttcccctctccccaacaggaatataagcttcatgagggcagggaagggatttagtggcatttgttcactgctgcatttccccatacacagacaggtacctggcatttagtggctcttcaataaatgtttagtgttgaatgaacacttggcatgcattttaatatctttgtggtgtagcataaaacttattacttgacaacgttatgcattctcttttctgagatttgttagtttagtaaccctaagatctaattctccagtgtcaagttttttgcttctaaatggaaatgtttatgcccacttcacaaggttattgggggatcaaatgagatgttatacatgaactccctatatacaagatagagtgctatgtaaatataagtagttgttcattctctaagcatttatgtttacttatcaggtattgtgcgaggttctggaaacatacagatgaataagtcagcagggtactgtgtgtgagtctggggggcaactagaaaaattcttgactcctttggaaatgtctcttgctaatgtagtgtttgtagtttgaggaatcatggcctcagatatattggttccctaaactaagacattaacatccttcaaagtcttatgaaatagtagggaatttttcttctatcctcttaaaaattacactagtaatatgagtctgtcaaagaagtacaaaatttagataagctaaaagaaaaggagaaaatacccaatagtaatgctcctattctgtgattagacagttcatgttttgggtgccagggcggggtgtgtgtttttccttctagtctgtaaatgtacgtacatattaatagtatattttttaattaaaccatatatactgtttaggaaactttttttacctaatgtaatttgtatattttcatgtcattaaatattcttcccttatggtatatttaatggtcgtatagctaacttttgcatgcctgtgtcatttggccaatttatacttcttaatgttttaatttttaactgtggtaaaatgtggataacataaaatttatcttcctaaccattttcatgtgtacaagctttttgttggatacttaagcttcaagttttggctagtataaacagcactgtaatgaacattcctttaacttaaatcctggtgtatttccttatcttttccagacgaagttctaaaagtagaattacttgatcaaagtatatacaaacattttttgattattgtaaaaatcacattttttgattatggtaaaaaaaaaagtgccaatttttggtcaccaacagtatatgagaagaaaaattgtatttcccctacttgacactcttgttagctttaatgtatgagcaaaactcacacaaatgattccaaatttgatttcgctttcttatagatattcttgaaagaaaatgactaattactatctgatttgtatcttgttttccttcacgtacaaatagtagacatcttttcattctccaacattatatgcccaagctaaattctaactaaaatcttcagtctcccctcacccccgtaatttcaacttttattttagattcagggggtacacatgcagattcattacatcagcgtattttgtgatgcttgggttttgggatacagatgatcccatcacccaggtggtgagcatagtacccataggtattttttcagtctgtacctgcctccctccattcccctcgtagtccccagtgtctattgttcccacttctatgtccatgtatactcagtgtttactcccatttacaagtgagaacgtgcaatatttggttttctgaacaatagtttttttcttttggacaatttctagctggtattccttcccctgcacccccccacccccaacacccagagatagggtttcctctgttgcccaagctggagtgcagtggcatgatcataggtcactacacccttgaactcctgggctcaagtaatccctccacctcagcctcccaagcaactaaaactataggcgcacaccaccctgcccaggtaacttttaaattttttgtagagactggtcttgctatgttgccgaggtctggaactcctgtccttgagcagtcctcctgcctcagcttccccaagtgctgagattacaggcgtaagccaccatgcgcacactctagatggtattcttgatttgactttcaggaattgttgtgtggcaattagggcagtggaaagaacatgggtttggagctggacaactcattgttcagacatcaacattattactagctgggtgagtttagtaaagttaaactctccatgtcttaattgcccggaaatctgtaaaaatgggaatagcaattcttttctcaaggtttctgcgaggattgaaagaaatagtacatgttagcatacagctcaatgcctgggcacaaagtgggcaccagctttctacgaaaacaagttgtcacgctgaggatacagggccagtattccctaaatctcctttttccaactaggattctagaactgtaactataataaagtttactaacagtagtacttagatctagaaaatctatggggtataatgtctaaagtctttagtgctgtgtaaagagcaaatgagaatttgctgtcatgacagttgtgctcaactgcagatgctgtcagtccatggtttcctactttagtaaggactgagcacaaggcagagtggccttctgtgaagttaaactctggcatcgatttcctttgttgattcaacagtgtttcagcttactctaattttggataaaaagaaacttatgcctgctctggatggatagaattcaaatttgctctgcaatgaatttgaatttttgtggcattcattttatgtagatacgtatatctatttcaactacaatatttcccaacttttttgatatctcactaaggaaagttttgattaccgaggtgggaagattgcttgagcccaggagttcaagatgagcctgggtgacatagggagaccccatctctacaaaaaaacttaaaaaaaaaattagctgggcttgttgaggcatgcctatagtcccagctcttgggatgctgagatgggaggatcacttgagctgaggatttaaggctgtagtgagctatgataaagccattgcactctagcctgggcaacagagtgtaaccttgtctcagaaaaaacagttttgattaaatagttaaattaatgtaatatgtgtcatcttaacaatatgtacaactcttagtttatcttgcaacaattaggtaatctgaaaaaagtgatggttttgtgcacatgatcattgggctaaatttttttcttttcattcagtagtatttattgatgaactattctgtggtatgacctctgagatatgtattgtattctctgccttatagaaaatataatccaagaaagaagataagtataatgcaggacatttgagaactgaatgaatggtaaaagtaatgtttactatcaaaggtcatagggaatgattaattccactggagaagttaatttaggtctgggactgtcttagcagagacagcagctgagttgatccttcaaaaactgttatgatttggatagataaaaatttagagattggggcagggaagggaatggaaggaaggacattctgatcagagggaatgagttaaggtgtgaagataggattccattgtttaacggtcggcagatagactaatgtgaatgggaagggttgctttggaatagggagagattagagttttaaatgttaagctaaaaggagtttgagcctcattcatttgctagtatcagacagtcttaaaatcagtttttagctctcaaaattacattatcgcccgctgttataaaaattacccaacatgcatctactgttagctaattctttttcttctccatttatttttccctttgccaccattctttgtttataatatatgaaggatttgtgttttattttacaaaaattcttgggaatattaacatggtacacaatactaataatactatgtcttttttttttttttttttgagacggagtcttgctctgtcgctcaggctggagtgcagtggctcgatctcagctcactgcaagctccgcctcccgggttcacgccattctcctgcctcagcctcccgagcagctgggactacaggcacccgccaccgtgccctgctaattttttgtatttttagtagagacggggtttcactgtgttagccaggatggtctcgatctcctgaccttgtgatccgccctccttggcctcccaaagtgctgggattacaggcttgagccaccgtgcccggccctatgtctgttgttttataatactctttttgtcagagtagtaagctgcactatttattttgaaatagctgtgtgttaaaacaaatggaagaaaaatacagagtaaaactggagattccatttttcattccagataattgctggcagaagtttgaattctatgggattagaggctttcatacccttcagtttcatgtaaggtctgagaatgcagggagtccccatgatactaataagctttcctagctgtgttaagagtagagatgtatcttcttctctctccaaccagataaacactttcacactaaagctttaaaaaaaaatggtggtcataagagtgaggtttgttcagtatattgtggtagagcactaagaagcaatctcagtttcctagtcttggtttgccactatctgtgtgaataatcaccaacctctttgactaccagttgcctcatctgttaagagattagattcgataattttggaggttccttctgggtctaagatttgatcattcattactccttttttttgctgtttttttttttttttttttttggcctggcttgtaagatttctgctggcataactcctttcttaaatattgtttatctaagcatgtgtgtccttcttaagttggcatactaactattcagaaattgaagtaaagaacatacctatgcctttgaataattattgtgttgattgaatgctggttctgcaggcacacttctgtggtccaggaggtcgtagcctaaccatggcctgtaccttttgttgtagcttatggtgcagaattgaggtatttaccagggtactctaagttgctaacaacaacaaaacaacaacattcaggttacacagtggtacatattaaatccactttaaaaagctgagggcgtgaaaataattttgttattctgaaattacaaaatcactctgtcactagaaaccacagttggaaagatctttagagtgtgtgagtttctttcatttttacagttgagaaaatgtaagacccagagaaaagcaacctgtccaactaaaaaagtaaaactcaaattccctgctagttgctggaatattttctgtattttgtattacttcatgcctctagcagagcacaattgcctctaggttctggcaccagaaatgaaataatgatcatctggcttttatcaggaaactggaaagaaacaggctaggtgattatattttgacattgttctcaaagtaatacatagatactcttagaagtaagtcgaatggtaataagtagactcaaagtaaataagacatttcatccttgaaactaggaagctgagaaagagatggatataaagaaataagaaattagagataattgtcaaattaaatcaggaaatggtataaactaattatttagaaatatagaggacaatttttttctttagtttcaatgtgtaaaaaatgaggctagtgataatacctacttaaagggctactgtaatgaggaaatgagataatccatataaggtgcttagaaaatagtatttaggccaggcacagtggctcacgcctgtaatcccggtactttgggagaccaaggcgggtggatcacctgaggttgggagtttgagaccagccttaccaacaagaagaaaccccatctctactaaaaatataaaaaaattagctgggattggtggcccatgcttgtaatcccagctcctcaggaggctgaggcaggagaattgcttgaacccgggaggcggatgttgcagtgagccaacatcgagccattgcactccagcctaggcaaaaaaagcgaaactctgtctcaaaaaagaaaagaaaatagtatttgattctgaataaatactcaataaatttgcctgttgttattgttaataaattagcatttcttcagtgcgtaagataaacacattccaagtgcgctgaaggaaatatacgaaggctaagagagtgactaagtgagagcaaggagaagtcctctttggttaggtaaggcccctgagaaaatgagcagaggatgagaaggcaccagctgtgtaaggggaaagaacatcccaggccaaaggtatatgtgcaaaggttctgaatttagaaagagtctggcatgctttaggaactgaaagaaggccaggtactatatgatagtttgtgcttccctcatttcttcatattatactgtctccttcactagaataattgttcttcaagggtggtgatgacatctgacttcttcccagctgttttcctcatacctgtcacaggttggcacagaattagtatttattagatgcttgataaaaaattaagcgcctgttgcttgctcaacaactactatgtaagttctaagatatcataattttatttttgggcttatatcagtgagtttcatgaaatacaaaattcacgcttaaaaaatttaacatatttaactgttttatatctctaactgtaccattaagttcaaactactttgatgggctgggttaaatgctacataggatgatcctggtttatgcctgttgtcctgtgtccaatcctatttcacaatggtctcctttcactctaagtgtgttaccactgtttggatcatgaattttacttttttatttttttaatatatatttttttctttttagagacaggtcttgctatgttggccaagatggtcttgaactcctggcctcaagcaaacctcccacctcagtgggcaatgaattttatgataaccctaatagtcattttactgttctgctagtgcactcaagtcttgtctttcattaactggtatttcattctgtacttagatagcttaaatatagattaaaatagctcatttgccccagctgtgttttgtaggatattgcatctaatattttgtaatttacatgggtccttgtatgaaatcaagggattgacaacatgggatgcttgttttgatttagtacaaaacacttggattttgttttagaaatgctctatttctaaaatgtttctaccaaacacccatattttgacaaaatgttctttttcaaagtgataggaattcttatgaatatttccttctgcaataaacagttgtgattatatagtcatattggttaaatatgacaacattttagaatttaactgttagaaatagtaaaaccttagacatctggaccattctccctctcttgttcactgaaacaagtataaccaagcactttcaatgtgcctggcacatatgtgctagaagtactgtgatgagcaagaactaacatggcctctgccctcagaaacttgtggtttgaaaaaaacaagaaacaaaaaacaaagtcctttcttcctggggcaacaggtgaatcagaagctgaggttaccctatgatgttttagaagagctgggggttgggggtaggggagctggcccagaggagtaagagagtatcagatggcccgtacaaacttacagaaattgtacactctactatccctttctttttttgttttttgagacaggttcttgccctgttgcccaggctggagtacagtggcttaatcgtggctcactgcaacctccagttcctaggctcaagcaatccttctgcctcagtccctgagaagctggtactacaggtgtgcatcaccatgcccagctgatttttaactttttttttttttttttttttttttttgtagaaacgaggtctcactctgttgctcagcctggtcttaaactcatgtcctcaagcaatcttcctgtatcagcctcctaaagtctggaattacaagcatgagccaccatgcctggcctccactatccctttctgtttgtggtggtctcctatattttgagtttgaatgggaagggagcatgcatgtttgatggtttgttttgtttttgtgaatgaagaatgaaaatttattcccattaagtgcgagcttcaattgaggcactcagtttatgaggtcttactgatgtttcctctcttaggtgctgtagttaaaatcttgctggtctaaaatggtgaaaactattgaggtattcaaatgataagtactttataaactgaaattgcattgaaaacggagagctcttgacagaaaggttgactctagcatttatataaggaaaaagacaactattatctccctctacacagaaagctatattcagtagttataggatttgtacattgtgaatccttagggatctctaaacatctgtgtctttagaagtagtgtcacctctagtaaaagagggccagtagaattgagtggtggcagcctgtgatgtatatgaattttggctgtacgtctctagcgactattttctccaactctatttagtaaaattctacctaatttcagctattgtgcttccaaagtccatgtttgttgaatatgatatggtaaaaaccaatatctatttggagacagtggaggggatggtagtaattgagagacagtgtcagatggagcagtgactttacaatttttttgactgcaatccacaattagacatttcacattgctcccccatgacaacatccctatcgacccctgcccaaaaacaagttatttaccaatcttgctataagcaatgatgactgattttttcttttttctactttatttaaaaagaaaattatagtctcaactctttatattaattttacacacattaattctacagattgttttagcacttagaactaaaagtgttcaagatttgattttgttaccttctctgtgtaagctaaagttgctgacttttctgagtttccattttattgattaaaactgggatagtaatagtattttacaccattttataactttattagaatgacataatctgagtgaagtggttgtgccaggcacttactaaacacacagtcaatgagtatgttctctccgaagtttgttagcttagggaattgggaggatgccactgataataatggtgactcttattcagaggaaaactaattcagttttagacatgctagagtttgaggtagccaaaagagtttagtcatatcacttggaagcaaaccaatgtgaaatagtttcaaataagcaaattttaaaaaatgttaaatgcaaagcaaacagtattaaagctttggggacttaatgattgagtctccttacacctacacaagattggctaaatacacatacaactgtgtcactctaccagatttctgttaacattctccagaatttaaactgcagaatcagtcatttgtatgactgtttgtctctattagcagaggtaatgacatgtatcagtgataggtaattgtggaaaaaaaaacagcacttggaattaaacctagagttggtgattcttacagggtaacccaacggctaccttaatttctatgattcagtttcttcatctacaaaatattatttcacaaagttgcagttgtcaaagggacaagtaaatatgggatccattgtcttcatggaaaaacttttcataaaatgttattttattataataaaaaatgtgtgattggttttcaatttcagattgaatcaaacatagcattctttgtaatagcaggagattaacaacatcccagaatatatctttaaaagaagtatggataaagaaaaacccgtatgcacctctgcacacattttatgtaatagtggtgatactaatttacaaagacaaagtatataggatattaaaagtgaattcttaatacctgatcttgattcttattaaatctgacttatgtgtatacaagatattattagatgaagtgtttgtccagtagcttagcttataaataacccccattctagctcattttaaacaatgtagtatgaatgatgccaaaaacaggctagaacattttcttctttccaagatcttagatttggtaaacaagctactgctcctggaactaatctaggtcatcataacccaaaatcttttgaaatatgagagtcccaattaagtctcttaggtactttttagcattttaattttaagaatgtgtttaactcttaaaacagtatattttggttgctgtttggccatttggtttatttgtaccttgttataatgaatgcaagtcagtgggtaatcattgcagcaaatatgattgctaggaatctcatgtaagtggaagtcaatataatgtatggcttaatttatccctgaactgacctaacatcacattttgttttttaataaaaactggtttaatgatatgataaatttctgtattttccacaactgttaataatgttatattttaactattgcttagtcttcattacaaattattcagctgttaaatgtgttgttcaatgtgacattatttaaaaacttaaaaaaaaatcagcttcacagaaatctttctttgatcaagagttgtctcattcccattgttattaatacagtatacaactaatgtatgctaatgtattgctgttatttgtgtgtgtgtgtgtgtatgtatgcagacatatggtcacatcatgtagacctgatgtctgcaaagggaaagaggaaacttcaaattaagagcggagtactgacctaggtggtttgtagcacttagagaaatgattattcccacttttcaaataaagaaatagattcagacaggttaaataatttggtaacacatcctataagtggaaagagcttgaatttgtggctttcctcctttatgtcttgctgctttaaggggtctttccaatcatgaggttgaattttgtacaagcgtgtttacactaccatatctgaacattatcccctatccctcaaagactattaggaatagaaatatcctatatgtgtagcacattgctactttgaaaataattttatcctgtcctattttatccttacaacataccaacattgcagacaaagaatgaggaatttcaaagaagtgcttaagatcaaaaagctgatcagagctaggatttgggccagaacccacatcgatggtccctagttcagtgtccttttcgacctcctttcactttctctggattaggtgatctgtgatcatgaagtagtgaagttttacagattgaaccttttatcgttgtctttgtgatcacactacagctacaaaacagctatctgtttgcagtcaaatcctatttttccatgttacaagcagtgtattaatggtaattttgaggtataatgaggctgtcgttgtggttattgaatgactaatacatgggaaatgcttatatgagatttctgtatttaaactttatttttgtgtaatgccatatttgccttacggcaaatagtaagtaacatatgtaagaaattgttagggaaaggatactagtggttaagggcacatatattagatttaggaagacattatgtttgaatcctggctttacccacttggttctagttacttgggcaagtaacaagccagttttaatctgtggggataacaactacctgaggatcagagaagagtacgtaaagagattagcatcatgcctggcccatgggccagtaggtagtggctatttaatatatatatatgatacatatatttagtaattatttaatatgcgtatatgtgtagtagccatttgaacattacctttgaggggttctttttttctatctgcaatactttttttgtttagaaagtctcaaagatagcatgttatctcttaaagtatcttactatcggtagatctcaattatttctgctaacagaaaacatagatgatctgaaatagttatttgaaattttcccattttatatttggaaaacatagttttgtttttaaaacttttgtaaaagatctactatcctatttgtttccctacaggagcatggtatgtttcctgaactgtccatttagagaacatacttaacgaccatgctaagtgtgttccggaggagcaggggaaggaggtttgttgtgattggggattgagaactgagaatctgggactaacacttgtgtataatttcatgttattcagattcttagtttgtagtcttgagatttacaaagtagataatgcgccatcattttatagcatactcattatttagttttgtgtaccaagatgagcaaactggggaaaagcaaacttttttcaaaaatgtatgaagtgctgttctgaaatttattggaaaactagcagcatagaggggagcatttcactaaataaaattctgtctcagttggatttaagtttttaaggtggcacatctatttggagtgtcttttatcatttataattacatgttgtgactaaatacatttaatgttttttctgtaaattctctttttatatgacatcaatagatttatattatagatatatcactaccctttaattttaaagtttaaggattataactgaaaggaactattccaaaacaaccctgggattatatattataggagataggaaaaggttaattttgaaatataaatttattaatccaaaaaatttttaaatttgatttcctttaacttctagttgtgacttgtaaattttagatctaacttccttatttaaacaatgaagatggtcaaataagatgttctacttgcactagtcacctcccatgattgtgaaatcaaatcaaatattgtataaaaatataaatggggcatggtgctaggtaaacaattaagtagacatagtacctacgttttaagcacttacagtgtgttggaggagactgtcattaaaccagtcattttgtaaacagtctttctacattctgtgcagtaagtgttaacgaaaaagtacagtgggcctgtgactagtcttggattaggaagttgtacagatgaggaaactgaagctcataatggtataataatcttatatgtggtctcgctgttagtaaatggcagattcatgttttgaacacagcttggcctacctccaaattccttactgtctctaccatgccattctttctctgagtcacctacctcaggcttattgtgtttccaagcacgtcttgttatttctcagggggcttagcagctctccctctggctaagtatggaaccggtgatcagattctttaatgagatttctttaaagcaataagcctcttccgggttgtatttcttctgtactatagaactccaggaatcctagaagcttcttcaggggtagaaatcttgtggattctgggtctgatatgaaattgcatgctatttgtggcttctcacttaaaaatagcctcatagtgctcatggggcactttagtaactccaacacttccatcagactccactccctaaccccaagacactcaagataaacaaagatctgagtaataaacggcatgcttctgctgcggcctcagcctactcccacaaacctttcctgtatggaaatcctagagccaccactgataatgcattttataggaagaatgcaaataaagagttccattgctttaaacgtttgaaccaccatcctagttgatgcgacgttcaggggaaatatttctaaaatgagaaatttttataattcatcacatctgttcatcccctactaccttcattgattctcccaaacagctttgtaagctggggagggatttttgctgttaaagtttgtggagacagtatgaactggtaaactgaagcccagtacttgaaacctgaaaaaaagtctatacttctatatctctgggtaattttatgatagcaaaaagtaaatgaatttaagctaaacgtcattgttctatgtatccagagacattttaccacaaatacctagttaaatcttgtattgtcagagattactaagtaactgataatttttcctttctgaatctttttctagtcagtctggtaacctgtttctttagtcctcttaaaaggtactgcatgcatttgaggagagaccatttcaggacctatcccattttaaatatgtaacaggttgtgcttttctaggaatttgtgaagtttgttgtaaaatactttatataaagttccaggtatatgaaggttgacaatgctttattctgattgttgtaaatttttgtatttatacattttcagagggtttcacttggtagaacctgatttaatttagatgtgaagtaactgattccttccacaacccttctttgtcttcagtttatgtgcatcactaactgaaataaatttttgtcttacgaatttctctgttttaaaagcaactgaagaaacacatttcaggggcaaacgctagaatactttgccattatcagtctactgttctttcctttcaagttgcctaaacacagctgagtttgtaagacgagcaaagaaaacatgacagtgctgccaagtagacaggaagctgtagtggacctagcgagcaggggaggttgagcacaccctctgtccaatcagctgtgagtgctgttgctatgtgcgctcttactctgctgcctttgtgaaaaaccttacacggagggaagcgggatcagcacccaacgctgaacatttgttttaaccgctgcagacatctggatccctcagttactgatagtatagctattgatagccagaaggcaacttcctttatacaaggattccagtatggttttcagtggaaacaaagggcttcacagagaaggtgtgtagtgaagtgttttttaacggctttatttttaagcttccaattttctgtagctgtttaccagttggctgtggtgcttgctttgcatggatttttaataaataggtctaggaaaattatctcactttgaaaaccattgaacttagagaattttctttagcttcatatagcctgttttctttgaacagcagtactgaaaagattattaaaatgctgaactgaacaatgagtaggaagaaaagaaaccaagtacaatgtgctcactttaatggggaaaaaatgtgatagaaatgagaatacagggaagagaatgtgcattagccagaagcattaactgtatgtgggggcaggaggtattttttaaattaaagctgttaagacaaatgtattttaaataagctgcatatttttaattgaattcatgtttctgaatttgacaaagattgtcagaatttaactaagtgagatttttgacatagtttaaggaattggtgtgccaaaatctttttataaagcatttctgaaaatcctacctcaaattgtgcaatctcttaattatttaatccattgactagttctgtgcagttcagataaagcatcataattcaaccgcaaagtcagtgtagtgttctattaaacatccatatagaaaactgaaggataagggattttgaagacaacatacaaggttaaactagtattttaaaattgaagtaggcctcctaaatgtaataattgcatatctgacttagttaatacttcaaatatagtcaaatcttattaaactgtactaatataatatatgtgataattgaacagagtgtaggttaccatttgtttatataggatctggaaaaattggtctgttcaacagattataggaaagttttaaagtgttttaataaacaaaaggtctttttgtatctttctcaaatactgtgaaattaaagtttacatatgtgatttagctaatggttcttttaattaaagcagagcagactaattagcatattgcccattttacgaaggatccgtattgagctaataaccggcttttcctttgctttttcgttttacatggctaagtggcctttagttcactcagtgatgtatgtctgatgagtaaagtcagtataagctcagagttaatattagggctttgttatctctacaaactatatagtttggaataggatgggttttgttgttgttcttttcaaaaaatacctgtcattagaaagtcttaacagtgttagcatttctggtaaggagagatatttcttttctttaaagagaactcaaaatattatcccatgcttttgtgccctttgctgatctttgtaacaatactatgtatataacatttgtattaaaaagatgtctaataattggtgaaaatttacaaaatagtccttaaagattaaaaaaatgttttacgtagacctacatgtggctgaagtttaaaagactggcatttcttagattttcaagtttgtaaggtgcagccaaaaacttgaatttgatagaagttataaaaattatagcaaaataaagttatattatttggacttggtggcctccacaatataaagcactcacttcaagaagagcagctgtgtgtagaaggggtaggggtatgaaagggagtttggagtgagaggcagacacaggcagagaggactcaagtttgttaaatatgactaaccacatgaaagtcaatctagcaattttcattttttagctgtaactcttatgaattactaattttattttctaattatagaaccataaaaaccaaagttttgtttaaattgatttgctacccattttatgttggtttatttcataaaaattaatagagcctccaagagaaaggctatttctcattcatatgctgcaaaagatgggggaacatgaaattgtaagaaagttgagtgtactgctgtgtcacacagaggctttgccattgtgttcaggaggaatattattggcagaattccagacattattgctgggcttagcacctaaaaatgttttatatactggagcatctgaaagttcctattcagtagcagaacttcagggtagttgaggtttataatctagtcagttataataacattgctagcatatttcagttttttggatttgtctattatttgacaatataatttttattgtctttgtctatgtcatatctttaaattggctattgttttgtgcttatggaaaaatactttaattctcaaaaacagtgatttcttttttgtttttgcctctttataaggaatagcaaatagaagtgctagtatttactagatgcagtgattgctacagttggttttaagtaaaacagattgtttttgattattttgaaatcagcccctaaggctcatacatggatgggcctcagattttgctataagcttcctgtcatctgtcatatgagagggatgctgtgtgaatcagttatgtatattcctgttctttaacattgctaaatttttaccattaaaatttatgttggtttctgttttcttaatattttgaaggtgttttgttttttgaggttcaaattttgggtggtgggtacaaacatacagttagaagaaatcgttctgtcattcaataatatgataggaaattatagttaataattattgtatatttcaaaatacctagaagagaagaattgtaatgttcccagcacaaagaaaatataaatgtttgtggtgatggatattccagttaccctgatttgatcattacacatcatatacatgtgttaaaatatcacatgtacccccaaaaatacatacaactgtggtatatcaataaataaaaaggaaaaacaattttgggtggattgcctgtataatttattatttagctgtgtaatattgggcatagtttcaccttctgggccttagtatccccctcggtatcatgagattttaggatgattgtgggatttaaatgaaagaatgtgcgaaactacttagattcattactacttattaattagctattataataaaatgtgagattgtattataactttcctttaaagttattctacgttaaaaacgtgaatatgttgagttttctcagtattttgagaattttaagcatagttttttagacctttccctaagatacacttctaggtttctcagtttcctaaggtacttcattaactggaaagccatggagatatggggattggggcagaaaaagaagacagggttcatgggtaagtgcatggctaaatatctgaagaaagataatagtcaatagtggtaaggaaagaatgagtaaaatgagaagagacatagaaggcaaaagaaacatttgttctgtttgtagtgttttgataacatattcatacagtttgattcttgtagtgttattgtttctgttgtgtgtgtatgtacactcgtgtgtactgacacccccagatttcccccacccctttgacccctgcaaatgctgagctgattgactagagttgctaaatcccttggtgatttatttactgggaagtaactttattctgacttttcttttgaattcctcagctagaactgagctaaaggtgacattgtaattgccttccatattaatgacaagggacaagccagctgcctggaaggcagaaattaaatatcatcacagatacgagtgtaattgtcttgaaatattaaaatttaagactaaaaatctaatggttttgtgaaaactcaaacttcaaagccaaaatgctcttttgtcattttcataagtacacaaaacttcagcttctttcaactgaccacagtattttcattgctttgagctgacatatgttattttgggagagaggtttaatctggtttccattctatttttcatattttgatcaagggtaaaatttttgtgatttttttttttttacataaactaatttagccctccaatttgctggaaggtgcaggttagcttaatgaaagagaacacacaaatgtaaaacaaaacaaaagtattttccaagtatactccattttatcactgtcattgagtccagtaatattaaccaattagcttctgcattgggcccagagactacttacagttgacaaaaggggaggagaacccttttaaaaataggtatcctaattttaaatgactacattgcattggtgtatatgtttttgggtaatgcatacttaccttaaatcgcttctctcaaaaatatccatgtagaaacagaatgattgctgtacgtcagcatcttctactgacccttttgagaatgtgctgaatgctatcaacccccttgctagggggaaaaacacatctatatttatgtacacataattttgtggaaaataccaaagaggatcataaattaccttaggttaagaactttttttaacataatttgtttatagtcagagtatgaaagcattaatatttaaaaattgaggcttaaaacagactggatgcaactttcagaatatgtatgcaagcaaagtgtcacatggtttttttcccccacttcaagggatatggtaaaatgttcccatatgtgctccatacattagtacccttgtagatgggtttgccctggacagtacccagtatccctttgtggactcctacgttctagatgggcttcaaatagaaaacctagcacaaaaggaccagcctggaatgcggtgttcaggtcttcagaacctacaggccacatctctgagttgtagactgagattagagaagacctaatgacacctcctttggccttagactgccacccggaatctcttccagaaatcattctgcacaagaaatgacaggtccactgctatgaatgtcacccagttctatctttgttcaagagaatcaagcagaactgatctgtgtgtgcccaagtttctcacctcttaattaaaaagacctgtcttccgtccactttttatttctccaggagttttagatttcacacatagacgcattcagtgggaaataggatgttgagagtactagaagtaggggtcattcatatggttgggagaaggatgttgaaaggacagaatgtattttgggaaaccagcctatgttgtaaccattttcccatgaggtaaaaatgtaagactaaactaggttaagtttaaggataattttggaaagtcatgtgccatttgtgtaggattaatgaagctgggggaaaaaaacagcactgggatagtggattgttgcctttttaacacagaatattcttatgagagtacaggtaaatctagaatttggttttgagaggcaggagtttgtttccttttgttacaatgttttctcagatctttgtctcagagttctttctgtatgaggtgtggagtgataacaccatataatcaggaatattcccacaaagaatagtgaaaaggacaatattttctacttgagagtcttcaggccctgagactatgatgaattgtgtctgatggtttacacagagcacagagaaatgaaattgaataggattagtgcaggtaagacagaaatgaattgaggaaaccagtaagttttctcgataacactgactagttctaagtcatacattttagatatcatacccactgggagctttctctgatgtccaagattgagttccctcctaaatattcccatagcaccttgatctactcctattttatttatcttttaaaaaattatttatttatttatttatttgagatggagtcttgctttgtcgcccaggctggagcgcagtggcatagcgtgatcttggctcacttcagcctccgcctcccaggttcaagcaatcctaccgcctcagcctcccaagtagctgggattacaagcatgtgcctccatgcccagctaatttttgtatttttggtagagatggggtttcaccatgttcgccaggctggcctcgaactcttgacatcaagtgatgtgcctgcctcggcctcccagagttctgggattacaggcatgagccactgcgcctgacctcatttatcacattaccatgaattaggcttatctgtgttctctccatacgactgccccctactagaagttagcaacagtagcttattctcccattgcctctggagaagagctgaatctcagacagtttttaacacataaatatcaaatacttcttttttctactcttctagcctttcaaattacttagaatttagttttctttgtatagtttgagttgccctcagctgctcacataagcattcaataggttgctgtgatcaatctataatcctttaaatgactgttgaggcctagaaattctagtaatcaatacagaaattagaactcaaagtgttctccccttttattttttatttttgacaatttttgcccttgatgtagagatttagtgattgcctaatcattttaaacaaatgtttccttatctcattgaagagaattacattgataatatagaaaaacaattggcaattaaaatatgaaatccaagagaagaataaagtaatagttatctgggaagggtaacaattagctttcatcactttaaccagaaataagctgaaactaagaaaacaaaatacagtgaaacattaaacatccatttgagtgcctacctgttcatgtcgagcactgtgctaagcaatagtagttggtcttaattctcataaagctcaaataatgacttaattttatttgtgctaaattctaagaaggaaaagtataagatgtcataggctcttctaacaatgataaaaagacatgaaagagggtaataggatcagatgagatggatgtaatgaagaattatgtatgtaagctgaaacagagatcatctgattgtttcttaccctaattttttaatctgaagaatctgatgaagaggtaaagttaaatttttcctccataagaatagaaattaagttagaaaatgtaggccaggcgcagtgactcatgactgaaatcctagcactttgggaggccgaggttggaggattgcttgaggccaggagttcaaaaccagcctggcaacatagaaagaccatctttccaaaaattaaaaaaaaaaaagcctttcacaaaagcaacaaacatctaatttttgaataaacttaacagatatattcaggaactttataaagattttaaaactctaccaaataatatttttaaagactttcatatatggtgagatttaaacctttaaaatacagggtttttttgtttttttttgtttgtttgttttgagactgaatctccctctgtcgcccaggctggagtgcagtggcgtgatctcggctcactgcaacctccgcctcccgggttcaagtgattctcccgcctcagcctcctgagaagctgggattacaggcacacgccaccacacccagctaatttttgtattttcagtagagacgggttttgccatgttggtcaagctggtctcaaattcctgaccttgtgatccgcctgcctcggcctctcaaagtgttgggattacaggcgtgagccactgcgcccggctaaaatacagtttttaaaaagttagttccaaaaaaaaaaaaaaagagttcaaggccaggtactgtggctcacacctgtaagtccagcactttgtgaggcaggaggatcacttgagcccaggagttcaagaccagtctgggcaacatagtgagatgctgtcgctacaaaaaaaaaaaaaagccaggtgaggtggtgcatgcctgtggtcccagctactcaggaggctgaggcgggaggatcccttgagtacaggagttcagggctgcagtgaggtatgattgtgccactgtactccagcctgggctacagagcaagatgctgggtcagtttttttaaaaagttcaagtgttttttgagtcactagctataatttttgggaaccaccgttaaatctgaagattggaaaagcagaaagcatgttaagagaattggaatattctcctaatgcatgaagtatgaatcactttctgaccacaaaattttttcatggtacgtctttataaggcctgctatgaggggagttctggaaacaggaggaattctagtgatttagtggaatacagagggtggggcatcttgtggtggccctgggagagaatgagtttggcaggtgtgatgggagcataaaagggagtgatggaaggtgaggttaaaaaaggtagataggggctgtgtgtggaggctcacaccagtaatcccagcagtttgggaggccaaggcgggaagatgatttgagcccagtagtttgtggttatggtgagctatgatcaaactaaactgtagcctgggtgacagagtgagactttgtctcaaaaaaataaataggatctttttttcacccatctctcattactcccctttatgcatccagcgttctggcctgtctgggaatggtgaggagtcagatatgggagattgctgaaatagcagtcagactttaacattgatggcttattggaaataagtgagagagaggaggcgtaagtgattctaagatttcaagtcacaaaaagcaaaacagctacagttggaacaagttttgtactctggccaacaccctcatgattatttttagtttgtggcaggctagatgtaagagttagtctgtgcttgtggccaaactgatactaacaataaatgggattctagtattttgtaatttcaaaatttggcttaagtagaattagataattggaattggaaggggccatctagtttcacataccttcattttacatgtgagtttgctgaggctcacagagtttgacttttcccaaggtctcagggctagtttattacaaaaatgaaattacaatccaggtcttctggcttctagtgcagcaattttcatactttttgcaagttgcttagcattattttcatttgatttttgttttattgagagatctgtgaatttcaggatatattatagctataaatgctgatctttaagatctgctatttagctatcaaaatctaggggaaagatccaacttaaatacagaatttaaacagattggcaaatttatcttctaaagagaggatttcataataacacaaaataaataattgcttgatcataatagttgtgcttagttgactacagttctcattgtgtgagaatcagctgaactaaaaccagtttagtttagaatatttagaaatattctatacttggctgcctgaagttaatgataatgaccacagagtcatccaataaaacattaattaaaatgttactttagcattaaatcccactacttgattgttatctttatcaaaggatactgcctttggcagagttactatttcaaagaggaaacagagcaatatgaaactactttgtggggaaaaaatcagaaaatgtgttgtttctgttcttaccaaccttatagcaaggtgatatatttacaactgccatttacaattataattttccatctcaaataattgatcttcctatatttgcacagagagtaatgaatgaatccgctcatacagttacaagggtggcattgcctgcctccttcaactggctgaatgactgaaggaactggtggatattctttcttgatgtgattacatcatctcattttctttttggcaagctatcattctcatacacttctggtccatcacccccttttttagaattgacagttttctgctttcgtggaacatggtctaccctccccatcattgctccttcagatgataagcttctcttgggctgatcaagatgggagcagtggaaaggaagagaaagaccccatagcactgtaggggggctcttggttactattcacacagagagtgaagtcaactttcagctcagtgccttttggcagcctttctcgtaaaatatccagtgttaattcataccattttttacaatacaggtttactttaaccagtgtttattaaacatacattttgatggaagtatttttactttgattaacgtacaaaccgattgactagaaatatgtaagcataagttacgaatgcagttcttataaacgcctgtacctgtagctgttttattttttcttcagataagaggtttgtggtaaatggtttcattctccaagactgcatgtcttttcaaaagacgcttaaaagaactgcaataaacgtgggagtacaggtatctcttcgacatactgatttcatttcctttgaatatatattcaataatgggatgctggatcatatggtagtcctttttttaattttttgatgaaccttcatagtgttttccataatagatatactatttgatcattatataatgtataaatacattgaaacatcacactgttaccccataagtatgtataattatgtcagttataaataaaaatttaaaagaagctgaaaatcattcaaatagtttgctcactttgttttcagatctag

SEQ ID NO: 2594 - DNA, 1609 bp, Homo sapiens
cacagaggaggagcaacctggggaactttaacagctgcccagggccagtcccccagaaaggcatggggacagcgttccaacaccatgctcatcactcacaccctctgccactttcacagacaggagggatctcagacacgagaagggtcatttcccttattttgtagatggagattctgacgcccagagatgggaaggggctttctgaaggtcacacagcacaacccaactttttctatgaggggctacatcttccagctgccaattcagaagactcaattatgcttaagttggaaccaggacaacccgcctcatgcagggttccatctgcaaagtccttgagcaccagtgctcgtgatctctgctcatccaagggggagggaccactgccccatttcactcgtggagagactgaggtcacagggagagtccgcacgaagctgggcctcagacctggctctgctgctctggggcctgtgttcactgtggacgagagggtttctggaagtcccttcgactcctacaaacacacgcgcagctttgggaccccacctcacctccccggctgacaagaatcagagaagggactgcagggtcttgaagttaactcacttctctcagccctaccgtgggcaggccctgtgctcagcaccttagctgcactgtcttatttaatccccttcactgtgcccattcttgtgggctctgagctctgcttgtgccatgggaaaccccaaaagtctggacaggagtgaggttaacacataggaacaacagagaaagtgggacagtcgctaactgcaaggtgcaggggacatgagtgagatgggatgactatgtaactcaccagtgctcccagccccaccccacatcccatcaaaagaactttctcttcacctgtgaactctctcccctcagtctacccctaccctctgagctgagcccagtcccaagatgtcttggtatcaaatctgaagaactggtagcagaggcgggacctgagggtccataggagaggacttggttgatctgggtagcaaagtcccaacactggggcaggaaaaaggtgacacagacaccgagcagggtctgaggtctggggagggacagaccctcaggcagccgcaggatgtgagagagaatgggtaagggcagaggagggtttggaaaaatgtctgctccaagatataaatggttgttggggatcaaaagttggaatgacacagtggccagggcaggcttctggggccccacatctgcagaaactcagccacatggtgccagcgaactcagcatgtaagagggaggcaaaaaaattagggaggacttcttggaggaaatgggacttgagctgagccttgaatgatgggcaagacttggaaggctaagaaaagacggttctagtgaggtcacagagggagcaaagctcaggtggagcctggcaggtgggggtgaggatgcaaggaccaccctccagccacacgacatcaatggaggcccagcaggtgggacccttaagacagtggaccaggaaaattaggccgagacatacagacctgaagcagcaagacagagggacagtgatgctatggaacattttggggtgggc

SEQ ID NO: 2595 - DNA, 80674 bp, Homo sapiens
caggccagggtttgccccggagccccgcggcgggccggggcgcgcccagggactcgttcctcggtgcgcagcagcgattgtcagcgctgacaggaagcgtggaggggtttgagggtcctgggggtgatcggggcacttctgtgcagggcgtccccccttgtctccctggacctctagcgcgccccagccggtgttcaggcaagtctatcctgcccccaagttgcgagccggcccggaaggcgcggtccaggagggagtttggattttcagtggtgctcgccagagcccaggcggctcgcggatcgacgcaaacaaaagccctgtcctcctggggctccggcggcctcgcatcgccaccgcccccggccctccggccctcccgagagtcatcatagaggccaaaacttgtgcgccgctgcagccgctgccactttgtgcaaaatgtgctgtcagaggcggcctgcggctccaaagtgctttgggtgtgcacgcgcgcgcgcgcgcgtgtgtgtgtgcgtgttacaaacaagagggggaaaagccatctaatgcatatttgattttggtaatctctaaagacaatcgcaacagttagagaaagacttcaccgcaagccggagcgtcttagttcgctgcgggaagctggggtccttgctgcgtctgagccggtacacaatgagagggaagagcccggctgagcctgtggagacaaccgattcattctttggaggttggagggggaaagttgattaaagtctccggggtctcgggcctcacttttaacatgcatcccttgagggggtgaggagcctttggattctgccctcccccactcccagccctaaacctgagcggataaatagatctctgctcttttatcatgcatctttcatttttaagttagcactgtgtttaggaaaagaaaaagttctgcgctacttagcagttgagaggaaaaagatgtattcactacatagactacgaatgcagaattagtttttactaaaagttagctgactttcttggtagaaaacacactctggaaggaagttgtgtgaaattttgatttcttagagatggtttttggaagctagagtagcattttctgaggatgatttctgaaacggatcctataatgtggtcgtgctaatctgaaagctcctgggggtaaatagagctcctaattgtaattaagatgtgcatcagcagggagtgcaccttcctgatgaaaaatcctaatgaaatgtaaacagcttggtcacatagatgttttgcttggtgatgccaaacatctggccttgcgccacaacacctgggtgaaaagtaaaaatgggccatgctgcctaagtaatgtaaacatccttctcaagttgggttgcccagcaaattgaggtggagataagcagggtgattttaactaaggtgggactcctggcttggggctttggttaattcagttatttcccctgtggactcctttactttgtacttcacctttcaacaatagttgcttttagatcatagccccttgtgggggtgggggtcacttacctttaaatacatgtccctgcattgattttgctcactgtaaacacccttcttatcagcagccaccccaattctgtctcctttaactgtttacagccttttagagttgtttaaaaaaggtattgcctattccattgtagcaggaggagccacagacaaaactcctcagacacccagtgagcaattcctgtcccttttaagggctcacaactctaagggggtccacgtgagagggtcatgatgggtacatgactgggggctgcatgcactggtaatcagaacgaaacagaacaggatagggatttttacactgtctttccatacaatgtctggaatctatagataacataaccagttatgtcaggggtcgatctttaagtaccaggcttaggtcaggcaggcccaggcctggtttcgggtctggttccttggtttcaggtctggttcctaggtgccgggctacctgcctttaatttcgcttctctttccttttctgagtataaaacaatataaaacaatatgagagggtctgtctctcttctctcaccatactctttagtaatgagctcaaatctgttattattgtcttatttgttgttttataaatccctttccattttgtgaatgtttgatcttttctctggggtcaagacttctggtagaactcacgtttactttctcctcttggactcaagattcctaaggtagcccagccagtggctcaggaaatcagcttaagcggagatatgtttcatgtatttatttaaaaagatacaaaacatttctcccatcatttttctattttgttagccaggagaagaaaacctttaaatttattttttctggtctgtccattgttgatttctcatctaccccctccctatgcaaagctcaacttctttaggaacctgaagcttaccttataactgcacccaagcccagggctttaggaacctacctggcctttctcaaaatcttatagattctgtggtttggctgctgggagccagagggaggtggcttgctactgtgtttgctatcattttgtaaaccttccgttgccatttaaataggtatttgtctgtacttttagaatagaagtgtcttgaaggcaataagactgtgagcttttctggtgaaaacactgagagcccaagtccactagtcccaactttattagagatgcctgaaaatcctccctggctggctagggggagccgaaccaaggtgggatgggcaaagggtgtggtcaaattgtctccttcagttttggaaatatttaatttccaatatagattcagtatacatggtaggctgttttgcttctctgatgcctgggataatctgcctgatatttagtgaggggtcagctttgccctatagcaccctttctcttctgtatcttgagcataggcccccagttagacttttggaaagtttctgaaagtgtcacttgctctgaaattagtatcaggtttggctggtggtttgatggtgaacatctaccccatttcaaatatttctgaaaattttacacagcatcctatggagaatggaacactttgtaagctatatgtactttgatgtaaatgtatatgtacagatagcatatgtatatacacacatatatagtaagtggtccatagatatttgttgaatgaatggagaataactttttcggttgtatgcaaaattctgatatatgctttgcttagtaaaaatgcaacatggcatattttcaaggatttttccttttcttgtcccatcttctagtatgaaagaagtgtagtgtagcagaacttgacagtaaagctaaatggttacaagcacaggctttggcatttaacagacctggatttgaatcttttctctgttgtatagtgggtgtgtcagttttcctgagcctttcaagagtgttatgagattgaagtgaggtcatgcatgtaaagtactggagaacagcacccagccaagaggtgagtgcgtgaaattaatttggggtacatgaaattaaggatatgtgaacttccagaaataatatacacaattttatatgcatttttacggttctgtatttatagctatagctataatcttattttccaagaaaagtgtcaacctctgaacgataggaactgctgacttggagtgtttgatgcctgaggcaatgggttgtcttcctggggaggctgaaaggagttgagtgttggtggctagttctaggccttatcccaggttaacacactccatggaggccccacttctcacctcccagtttcccttccaccaggcaggctgttaattgggcctgagagaagctgaagaatggtgccaagtccttgtgacctcaagtaagaaaatatgtctctgaatccaagcattctgagatgcaatttgtacagtttatttaacaaacacttatctaatccttacaatgggccaatcactcttctaagccttttgcaagtattaactcactgaatcctcacaacaaccctataagggagatagcataattagctcattttactgatgggtaaacttaggcacagagaggttaagttactttctttaggttacactgctaaaaagtggcattactgggcttacaagccctaacagttcatgctcttaccttagtggctgtcctagacattctttccttgtttaattcttacaatttatattcttttaatgtatggaacaaaggtggtatttcccaaggttttccaacagcagcaaagggaagcttgcttagctgtaatctagaggttataagaaattattggagacagccaatttcaatttcccttcgagtgctggagttccctaagacggtcttgctgaaactcagagatagactggaagcaccttgttggatggcctggatctctggttctggaagaattacatttttgtaatgagcttcaactttgatgtggtttgagaagtgtgctcgccagttttttccaactatcaataagctatattttgatgaagtgactttgtatttgcatcttggtggacaactgtggttgtaggctgagaaggcggggatttattagagtgctgtctagtgggacagctggcttgccagctcaaggtcccagtgaggaccagaccctggcaaatccagctccagctgagaaacactcacgtcttcaaggcctctttctcaaacagaagggccttagcctggcttcacccattccctggggtgtgacgggagagactgttcggtagaaactggaagagaaaggagagtctgagaaagttctctggagttgaagggggaggggatgggggcaactcttcgaaaatccttaactaaatgcagctgcttgttacacggagactgacttgcatgccaggaatatctaaaaagctaacgaatacaaaataaaaataaacagcagtaaaaaggctctctctttgttgcagtaagctcagttggggttttcagtttgtttaggaatgggataattgtggcatccactttattttggtaaggcagtgaaacgtggattaatgttatgtgattgggatgctaccaccatctgaactttttccttcatcccctgcccccagccacaccccccagaacacccaggcatggacatccataggacctgagtctcaaacagttgcccctgagtgaattacattggaagagggcagataatttaatgggataatcttggcagggccagcaaatttcacacctcatctctcactaatagaaaggcagcagaaggctacaacatcctcagatgaaaaggttgtataaaaaggctctgcttaacagtaactgtctgtccataaataaggttttgtacagtcttgatccaaaagctgttatgaaatactgataagccaagcctcataatgtttggcctccttacatttccttttcctgcttctctccatagaaccatagatttttttttttttaagagagagagggggactaaaaaaaagatcaacagtccaaactttatttttttcaagtatttctatacaggatggacttcctttgatagctgcttaaagaggtggcgtggagtaatggaaatagaatgggatttgagcctgatagggaatgggggtttgaattggggctttgttgccttcttgggcaaagttacctaaacttttgagcctctgttttcttatctgtaaaatgggaataacaataatatgtggcttactggggggttttgtgagaataaaaggatgttatgaacttatagcgcctaacacagcaccatggacttagtgaacgtgaagtatgttagccaccatcattatcaagggcttactgaagaaatttgaaaatctggcttcaaaacgatggtcctgctgcaaggtagcaaccaaggctcagagaatagcaagttttacaaggttttaggactccagagtgttttgttttatagggagcatgcagatgctctagatctgagcagtacccaggccagtgctggggacctggatggaagggattccacagtgcagttttgcaatgccttaaaacaaaggcttttttcagaacagcaagctctttggggaagagcaacccctcccaggtgcttagtgtaattccagaatcctacaatggggaatgttacatttcagggacctccacttgtaatctgaccgtttttagctccaatatccaaataatcttgctgagcacaacttgaaagagaaggataatggccggaggaaaggatcctgaggtgctctgtttgccatttaaattttctgagtagaagaaaaaaagttcatgttacccaaagagagaagagtaatgaagcgtgtgggaagcaggaggggtgataaagaggacttctaaagacaaagcagaggttgggtttgatattttatttttcaacagtgaagcttgtcactcagtgtatttcaactaacatttattatatatttatcacatgaaagatacagtattcgtgtccaggaataaagtattaactttgccctcaaggagagaggagaaaaattctcacttttttgagcacctgctatatgccaggtatcatttttttaaagctattaaatttatgcttctcagcactccttggagtttggacttctgatcctattttacagataagaaaatcgaggctcaggaaggtaagtatctcagccaaattcgtacaatgattaagttgggatttgggatttgaatctaggtattttgactctcagatgtatgctctttttgttatccttaaagtgtgattggggagacaccaatgagcagatgtggtaccacaggcaactatctctcccacaagtgaattataggaaagagttgtggaaaaaatgctgtgggaacatggggaagaatacattaattctcaggggattagagggtcagaggaagaacatgagtgcctccttcataggcttattgtgaagagtcaatgaaataattcatggaacacactcagactgtgcatagtgagcgctcagtgagtgttctgctatagttatgtagccagtgagaggcctgatcaggatttatctgcctctaaaacccatgtactcttgctcccctgtgcactttttaaacagacatgtgattgttggaagagtaagtaactgtgcagtcaccaaatgaaagggaagacaccaatacagttgctctggtatattcaccacctgccctaatcctggcttttaggactggactgctttgggtatgggaggggatttggatagatgtggggttggaaagaatcaagatgtctcatcatgaactatagcgctcctagaactctggccaggatttaccacctgccctcattcattcattgatcatacattttctatgcacttacagtgaaccaaatattctgatagtctcactggagatgtaaagatgaataaggttagatcattgccttggagggtttttcaaatgacagatttatggcagagattgctagctgatcaccaaatatgtttccatctcttccggtcatatgactagacaacatttctcagctttctcacagttaagtgaagccatgtgactaaatactagccaattaaatgaaattggaggtaatttttgtcgcttgtaggcttgacccataaaaaactccccaggcagaatcggtatgatccttcttcggtggcttgacaaccttagaagtcatgtgttgaaagtgtcacaacgtggaaagagcctgagactctcccttaatcactgtgtggtggaagccacacttgtttaggttttatgtgaaccaaaaacaagtgtccattgttaaggctgagattttgaggttttttttttttgtttttttttttgttacagctgctaatgttaccttaactaacatgaggttgtaaatcagtgtgtggtgagatcaatttagtgggttaggaccagcatttttagatagaataaaataggaaacctggtttgtgtctgaccacttcatgcagacctggggctccatccagtaaattaaaccccttcccaaataatttatggcacacatagggtgcctctagcactgtagagaatctagaagaatgaagggtggcctttacccttggggagtttaccttttaggggcagtaaaataggcactttatacagccagtgagtacagagttggcaattatatatgcagaatccctagaagggtgggtctttcgggaggaagtgtgatatgatgtgagccttgaaggaaggattgagagggtgcgggattgaaggatgggagatgggaagaggagttggacatttcactgctggaaaagggctggagttccacagcagcctgcagctgctctgggggtctccatggactcgctgagactatcctgagttcttaaaccaggccttcactgtggaatgaagctgatctccaggggatgggagagtgaagaaaagaaagacagcgttgaatgaagcctgttgtgtttttagcatatgaagggtggaggaggagagagaaggaagcagtttcactgggagcctgaagacttgtctttcttcccaaagggtgtcccagggagttaaaaatgttgtgcatttcagggctgcttgtcaaaggtatatgatggtgtcttattgtctctaatgcagccattttctcttatagtgcaggctacttaattctattccccctcttgtctgcttgatgaaaagaataatagtatactaataattaacacactgagcatactgtgggccaagtactattctaagttctttaagcgatttaacttgcatagtcttcaggacgaccctatgaggtaagccagagttctaggagcattattgttcactattaggcatcttgattctctccagctccacacctgtgtgaatcctccaccatgcccaaagcagaatccaggctaaaagccaggataagggcagatgggagaaaatacaagacgaactgtcttggtgtcttcccttctatttggtaactacacaactacttactcttccaacgaccacatgtctgttgaaaaggtgcacagcagagcaagagtatatgggctttagaagcagattaatcctgaccaggtctttcaccggctgctgaacactccttgaacactcacaatgcatgtggcagggtgctcagtgtgttccacgatatccccattttccagataaggaaactgaggcacagagaagtaagtaacctgcccaagaccacacagagagttaaatgggaaaactaggatttgaacctgcatatcctaaggcctgagttttgttcctaatcattattatgccaaactgcattgcagttttttttttcaactctgtctgatgattaaaattctctgtaagatcccagccaaatagctgagtcaaaataattataattaaatcctccatttgtatagggctttgcagcttacaaaatcattttatgtacagtattacctttaattttccaaaaaatacagttaaataggatttatttctctcttccttttaaaagtaggcaggtgagtttggcagctcacacaaggtcactctgtagctgtcagggcctgtctaaaacccagccccttggacttagggcccattgaactttctgctctaaagactacttttgtttggaatttgtgcctctaatatactgatatatgactattttcactactgtttcaccaaaaggtgaatttgcctgattttcacttgtttcatccacaaaatcttcaaatagctgttgtctttagaaacagttgaaaggcatttgtagatgggacctggctctgggatttctgtaacctgggaaaatttacttgcaaaaagacagagaagttacttaaaaacaggattttcctaagtggttggtgattgtggcagggagaggagccaggaagagaaggactttggcatcagatggactaggctcactactgctctgccaggtcagcaaactacgtaacctctgagactggctttcctcacgtgtaaaatgggagccataatggtgcctaccatgacagagggggaaggaccatgggtagtgtttggcacagtgcctgggccatagttggttgttggtgtgtgatcgaagctacatctctcaattgaatggagagcagcaattcttcctttaagatttttcacaggatgggatggggcaaaattgctagttctcagcgccttgttaggcatgattttataatacagttatctctgacacggactttcttagcacctggaaatcttaggttataattatattgtttctcaagggcagggactttcttatgctctgtgaaggttaaacatcataaggtaaaaatagaacatgctgcctgaaatcctagataccctggaaaggctcttatctgttcttcatgggaaactgacaccatttccggatgggtttagacaatgtacatgaaagcaacttattctactttttctccataagagagattatagccttgcttctaggatttcactccaactggggtgtttcaaagtttttacataattttcacaccccctggagagtattggctgtttttcttttttctgcctgaacttccattgtggtgatggactgtattagcctttcatatgcctaccttaaagaggtaatgcttaacccagtcatgactgttttatctcctcccttcagagaactgttgtgtgttgtatggggattttcagtcccaagatattgcctgttggagaccagtggtgtgtagaccactgaaaacaagcagcaactatatatatatatattttatttatttatttatttatttatttatttaattttttttttgagacggagtctcactctgtggcccaagctggagtgcagtggcacgatctcagctcactgcaacttctgcctcctgggttttttaagtgattctgctggctcagcctcccgagcagcttggattacaggcgcctgccaccacgcccggctaatttttgtatttttagtagagacagggtttcaccatgttggccaggctggtcttgaactcctgacctcaagtgatctgccccgctcagcttcccaaagtgctgggattacaggcgtaagccaccgcgcccggcctacgcagcaacaattttcgatgatgttcttaatccaccagtgatttaaacctctttttctctgtgcggctcatagcgctttgcccactcacatctggtgtccctaagtcaaagcattgaaaactttgcctgtgaccaggtagtcttcagtgggttagagtctgctgtcagggcctcccaggggacacgtgataactaatgtcctttttccccactgaggaaggggggagctgaactgagcatgtccagtctgtgctacccagctcatccctaagttgctgcctaggactgtgctccgggcctctgcaaggaggagttagtaaaggtgcagagaaagtccaggacttaacactgattagtcttcctccccagaaagaaagcacctggcacagggaataaagcatttccccccttacgctggctacaacttgattttttttttttttttttttttttttttttttttgagacagagtctcgctctgtcgcccaggctggagtgcagtggcacaatctctgctcactgcaagctccgcctcccgggttcacgccattctcctgcctcagcctcctcagtagctgggactacaggcacccgccaccacggccagctaattttttgtatttttaatagagacggggtttcaccgtgttagccaggatggtctcgatctcctgaccccgtgatcctcccgcctcggcctcccagagtgctgggattacaggcgtgagccaccgcgcctggcctttttttttttttttttttttaaggagcaattgtcagatttgatggttgtgttggggttaaaactatgtagataaggtggtcaaaaccttttagaaataatcctcccacatctttcctgagggcttaggtttagaaagtttcttagccatcccaggatgtgggtgaaagtggcttcccccagactcatcaaatacacagagcaattgatctgagtgctggtggatgggagggaaggaaaggaggggcccaagaggcgcagctccacctgcccgagggagacgtcctgtgtaaactaacaagaagtcactggtgcttcggtttggttaaatactgatttagcaactgaaagggatgcaggagaaatatggcaatatcctctccagtaagaagtttactgtttttgttagggaggcaagactgatacaccccaaacggtatgggaataatgaattgatccaaatgtcagtggcctgcccttggtttagggccctttgcctatcttgaagcctccaggaatttctaccctcacaccggcctacctccctggcatatccagctcagactctttcctcttttcatttcttcttgctgaattcttgttcttcaaactgtattgcatccacatccaggaaggcaccctggcctgtttcagcctgtcagtccttcttttgtcgtctcaccttccaccagtattctcacataggccgtctaaatcacacctgcttatgctgatttagcccaacacctttgcaataattgtcactgtcaagtattaagcattgactgtggacccagcacctggcaaggcattttgtattttgtagtggaatcatattattttctccctgtagaactattgcctttctttccttccttccttccttccttccttccttccttccttccttcctgccttcctgccttcctgacttcctttctttccttccttctcttttttttttttttcttttttgatggagtttcactcttgttgcccaagctggagtgcaatggtgcgatctcagctcactacaacctccgcctcccaggttcaagcaattctccagcctcagcctcctgagtagctggaattacaggcacctgccaccatgcttgcctaatttttgtatatttagtagagacgggttttgccatgttggccaggctggtctcaaaatcctggcctcaagtgatccacccaccttggcctcctaaaatgttgggattacaggcataagccactgcacccggcctatcgccctgatttcaatccctcatctgtcactccctcattctgggaaatgccccttcatcagtttcaaaaggaactaatcatagtctttccttgggatttaggggcagcccttctgggatggggaagctgagagatgcccttggtcatgtctgagcccaggaaagaagctggtgtgtaggagagaatgacttcatatccagagcaggcactcctgagaggcagaagaggtctgacagcctgccaatctcttttccacctccctggggtttccttatctgagccagtagacgctgctttcatgaggttattgtgttcctacaatgcacacagcctcacctcactaatcctcataacaaaatgaagtgggtgttatcctttttttaaagctaagaggaagcagtttgattgctttttctgatgagaacatttatatccattaaaagcaaattcagaaatgtataatgaaaacaaatttcacccattatcctaccattcagagataacttctgattgtgtttatacacgtggatttataaaaggaggttatgcttttattcccaaaagaaaactgaggctcagagatgttaagtaactcctctagggtcaaaaccagtgcaaatcactaaaacgtgttgactgtctgttaaattcaatgtaattaagtgccacagggagttacaggcagtaggttttgtggatcaagaaggaaagaggccggcattgattggaattactgggagggttttctgaaggaggtggggcttgacagagtgatctaatatatatattatatgttatatatatatatatattttaaggcttgttttattttaatggctgatctatataatcacagaagccagtatgtacagacaaagtggaagtttttatttccttgtctcttcctccttggacaaggtcttgatgatttcctccttcttgacctggaggcactctttatggcgcttgcatgcttccttggtcttagacctctgggcctcaacctggttagccaggagcttcatgcgagccttatctgccttcagcttgtggatgtgttccatgagaatcgcttgtttttgaacacgttccccttaaccttcaggtacaggctgtgatacatgaggtgatcaatcttcttagatatgcggtatcttctgagcagccagcacagaatcctcattctcctcatccacgtgaccttctctggcatccgggcattggttgtaccctttcgcttacctatgcccatgtgcctgcccttccggtaggccaaggtgttttcctggcatcgagcctgggaatggacagtcattggcttgcggatcatcagcccatctttgatcagcttccagatctgctgacaggagttggcattggagatttcattggtttcattggggtccaaccagaccttcttcttgccacaggggaggaccctagaggcaagcctcttctgaagcctgagcatactcatggctgtgaccatagcagtgaaaggtgagtgatctaatattgacttgattcctcccattaagtggcctctgagtgggcaaagccagtgaatggggacacctgagcactgcctgctgtcgggactgggcactgcctaagacaatgattacttttgagcttttctgaagtgaaaataagtcaatgtgaacatggcaaagagggacagaggaagagacttatggtatctagaaggaagttggcaggtaacagggtgccaggaaattaagacctaaagaaatagagtggaggagaaggagggtgggggcacaacagtggattgtggttttgcatttgaatcaggaggaggaaaaaaacacccatccttcctctccttttttttttttttttttttttgtctttaaacaggcactgtcactctcttttgggattacttatttatatgtttgtctctccctctgcactgtgagatctgggtgaggaggaatggtgtttaattttcatgcatatcttcagtgttcagcacattaagcctggcacaaatcaaagagacactcattaaatatttttcaaagcaaggatccactgacatgactttcaggcaggccctcccaagctgtctacaaccccctctgtggtctcatagggcacctatgcacatattggcttttcatgggctgttccctcccacagaagcacctttcccccacccatcagctacagtccttctgtcttggctcagatgtcacatccctgactcaacaggtgagattagatttccactcacatgctctcctagcactttgtgttcttaaataaccttcattataatttgtcattgaatatttatttgtgtaatgactattttttgggatcttctctatcactgggttggatgctccttacagtagggtctggttctggatctcctgagcctgggccagttgaatggattctgcttttacttttactaagcattgttcttccttcctagaggccgagataactccagcttaccttggtgtgactatctaggaatttaaaaacgcgtcttcgaacaactgaaaatctccaggctatctcttccaacagttgaggaatccagccctgtaaaaagtcaatcaggctaaatgacacctgctgtgagttctgtttgcaggagagcaatgggcagctccagagctgggctgttttcccaacatggagtctgtgataactgggttttgctgctataaattagggtcaccctgctcttaattggcaaccaattcagattctcccttacaatcctcctctttctcctttttcgtgtggactgtgtttgagagaaggtgtggaaaatcctggcactgtgctacagggacggtgcacctgcaagctgggaatagaggtggtgaatgctggctgccggccctcagcacctttttctccctccctgttgctctgcccttccctgtcttttctcaggaattttgaaagaggtctcattactagggaaatatcccctggggagctcttcctctctcttctttctctcaatgagtagaggggaaagtgttctcagttttgaacctgcaagccatctggatgcaaagatggccagaaatgcccccttgtctctggatttcctacagcaactctgccttagcctcccagtaccatctgcttcaggctgggacatctttccttcatgcaggagaaaggggagcttaataaaattttgctggggtttcttggggcctgaggcagtagtggggaggagagaagcctgggctgttttatttcttgcacctgctatgagtcaggagtggtccttggtcagcaggcacatggaggcctgctgggtgccaggcattgggcaggtgttggggctacaggattatctgctaggacctcaaagtctggccttgtgggcagcgtgaaaacaatgatggtgacacagtgagagtctgggcacaggtcctggaaggtgtggagagggagcagccaatgcaggctcctgttagagtgctggagacagaatcaggaaaggtgactcaggggagtcacctttttttcactggaaaaaaatatgtctgggaggcactaaaacaagagcccattatgtgttttaaaatgatattagtaataatgtaggggtttatttggacaaatgagttcacaaaattgtgctgcctgtaatgttgattcttgactgagggataaaactcacttcccaggcccctttctgtaagccagttcccaccatccccttgaacctcagctgctccaccagagtcaaagcaactcagaaggaggctgagacccccatgcctcattgctaatcgatgggcatggtggatgggcatgagggtggggttcaggaccttacctagcatctgtcttcccagaatgttgctctgccctttctggggataagaggtcttagtttctttatctctataatgggaattataatccattccctgaagattatggaagattataggaggtaaaggctataaagtcaccttgtaaacctaaaatcctatctgagatcgaggatttagatggcaagtaccattttgtcttcatttcttggtgaagaaggatccatgaggcctcctttattcactcaacagatatttacgtggcaggcatcattcttgatactgagggtaaagctgtgaacaaaacaaagaccctggtcatggaggagtcaggaaatacagaaatatacatgacagcaggtaacaggaagggccaagaagaatgagcagggtaaagagcttgtaaaggaggtggggtgggtgctgtcgcatggggcagtctggcaggcctctaggtttaggggatttgagcagagagacctgtgtgaagggaaagggtgacccctgagactgtctgagggaggagcagtgagtgcagaggcattcaaagcaaatgccttgaaatgggagtgttatcagtttacagtacaaccagcaattgcttctactaccactggtaatatttatagagtctatactgtgtgccaggcagtattcaggtgccgcgacaaccctattcggtaggtcctatttttatccttcccccatgtcacagatgaggcattcttagaacaaaccaagcatccagataatacgaagagggagcagttctcatttacatggggagtgtataagtcacagccctgcacagagggaacagtgtatggtttggaaagaaaaaaaatctcagtttgggcctggcctgctactcatctgctgctagggcaagatgtttcacctctctgggcttctgtttcctgatttataaaatgggctaataaaatctcagaggattattatgtatattaagtgagagatccaagtgaaagaatgtttcaaactgcagggcaccatgagaatatcactttattcttcttcttattacgccaattctcattccttgcctcttgcaaagagagagaatgagagaaaaatggaaacttgcaacttacttaacttccttggttctttccctgaaaacttattttctactaatgtctgtgggagtgaattaactagagtatccagttgaattaagtattttgctgaaagatgaagggactgtgagataaagttggtgccgaggattctcacatttctaaaggaatcacttgaggtgctaggactcccagtccactcttccacaataccagacaacctgtaatcctcagacccagaatcttatgacagctttctctgatttcacattgtgtagattagctacccaaaaaagtaagtggcctcaaatagtgctgccctttaaaattattctatgcatttgtcccagagtcttgtgggatgaatggctaaatcctactggattaggcgagatgggtattattatctggggctacagaatggaaaaactcaggtgaaggaagttatcccaaacttcataattgatggtgagcctggatactcattctcaaatctggtgaggcatcgttggcttctaccatgatggcgatggtaagctcatttgtcaatcaaatgatcgattggcagtagggtgatgacagttaataataatctattatatatttcaaaatagctagaagagaataattagaatgttcctagcataacattatggctatcccagttaccctgatttgatctttacgcattctatgaatgtaccaaaatatcacatgtgctctgaaaatatgtacatctattatgtgtcaataaaaaaagttaaccaaatgatcgatgaacacctactatgtgccaggcacagtgctgggtgctggcaatgcagtggtgaatgagacagggacctgggtgcttgctctagggaatgcccttaggagaagctcagggtatgtttttttatttggaatgcttgctgattcccctcccaggacctccagaaagaagtggtggttgcttcagcggtcacttggtgatgactggcaggtatatacctgtgtagctggcacatctggtgcctgtgatcagagccgagccatccagtctgagctttgtttttcccagtgcagcagtggtttcctgcagtaagctccatcttggttgtgctgccctccccgctggggttgggataacagcctcctggggactgtggctaatctcaggagaagcagagaccccagggaaagactcctgtctccgttgtgtgcacctaggattagatagaactgccgctaatgcagttaggtaaaggcaagggccctggttgctggggaaccaggaagcacagggtgagcttcccatctgctctcagtgaaggacgtcctcactgtcaccgcttcctagggccaaaggggcctctgacaaagctaatgtgaccaaagtcaaaatatgggctccgagagtcagccaaacccattcaactaactgtgatcttaggcaaacctcaaagcttcggtttccccatctgtaaaaattggggtactaatcatatctacctcattaccttttggtgagggcaaaaatcagacaatgctgacggtcactggcatgtcctgagtgtgcatggtgagtcgtccatcaacaagagctcagatgaccatgttccaggtgaggaacccgaggcccaccctggccttgatcagaaataaccaccctgaattcctcagtgcctgagtctggcatcgaaactggcttccccggcctccagcactaggccacgaaggaaccagcttctttctctcactggtggtggcctgctgtgccctgctggctgggtccagagagacagaatgaggaggagctcaggacctgttatcagaggccagagggcggctctccagctagactgctagcaggaccgcagtgatggaatcacctgaaggtcttcttcaatttcctcatctgtaaaatgcagtggcttgactgccccttccagccctaaatttgttttaggaagcccactggaggaagcagcgagcaagaagggagcagcggagggaacatatcaatatgatgtaagaataatagctcccattttgtaagtcctgactgtatgcccgggactgtgctgggatacacagggtccagaacattatccattttctaggggctcacgcactcatgaaactggtgatagtggtggggtgcagtcgtttggggtgggtggagagacataataaccggaggaattagaatttgttttggtacatgccttaagagagatctgcacagtgacttgtggaccccagacgaggctgcctgtgtgtgcagagcctcgaatgccatgcagtgaagggaggttggaaccctgcatccagggaagcggactttgtggttgggagggcaggttcaggaaggttctggtgggagggttggcagccaggctggtgctccagagggctgatggattacattcttcgagttagaaatcatcagaagccccgctgagagggctcttgtggctttggagctatgccggaggttccctcttgcaaggggaaaaattggctgtgcctttaagtgttatcctcctgtcctcttggtttcctagtgtggcaagattcaaatccaaagtatttgcattgaatttgttaatttcaaccagtggtagaatagaataagaagtctaaacagccattttttcttcccttggagggtatgttttctgaccttttaaggaaaatcctgtcgaaaccttgaaaacttgtgactctaggtgctggatctgacactgggtcagggacatattgtggacctgccgtgtgcttgggcctgagctgagcaagctcatggagtaagctctcttgaactcttaagatcgtgaaaatacagttccaagccacagaagccctttggagtgattctgaatggtgggagggcagagaggctttgaatgctgtttgaacacttagactgctaagtactactcttcaaacacttcacgtgccttagatggtctagtgcaaaggatatgcaggaacataaaatatcttgccgctactggaatagccttatcttctgcctcaatattgatttagaacaatagcttgttttgaactttctccccataaattaaattttaatttagaaaatgccattaggggaaacttagtatgtaagtacagaaggttttggagatgggggtggctgctcagaagggagtctttagagatgacaaaggtaaaagcattactctaatcagaacatttcattaaaacccccatcagactaatctgtcgacacatagtattttgagtatcttttgttggcaacattctgtgctggaaactgggagagagagagtttagctcttgtcctgtatgtatgtgcatatttatatgtgtgtagtattgtcttatatgggaaaggacgatgggatttttttttttcagaaacatttttcccttctacaaaggatgacatcagggcatagcagaaagagctctggactgaaagtcaataaacttgagtttatctcctagccctacctctaactagctgtgtggccccacacaaaacacttgccttctctgatcctcaggttctcatctgcaaagcaataaggttggaccaagccctgtgtagtggcagtgtcaacatcacctgggagcttgttagaaatgcagagtctcaggctcctctccagaactactggatcagaagctgcattttaacatgatcccaggtgatttatatgcaaattaaagaaccatggctttaaagaaccattcctgctctagtaatgtattattttgtgtttttttccaaatgcatattaaaatatagttacgaagaatttatccaagactgcatcaaacattctacataaaatgggtgtatcatctcttaccctttaaaagtttgtactttgtgagaaaaaaggtttaaaggcagaaacaggcacaagcagtcgtacattcagttccagtgctagatatacatatttcttccttttgcctcctttgtgttttgggccttgacagtgtggtaagggcagcggtggagagaggagaggaggagttgcagagtcgaggtgactgaaggtggaaatggcaatgcaccgagccctgagctggcaggtggtccagagagcagcgggccccagcccagctcctcagtatcattgcaagggttttgagaatccaacatcatcggtgatgagaaaaatgtttcacatttttcaagcatatatgaaagtgctttgatgaattgaataacaattcatagtgattttttgatgttctatattttttctaattaattgattctagatgttaaacctattagatgggaagaggactctagttcatttttgcattaaaagggttctttcttacttgaagctggtgggaactattggaagagggcgtaataattaataatgatgacaataactaacacatgccgagaactttctaggtgccaggcactgtgccttgcaaaaaaggactttgggcatctgttaattaatttatggataaggaaaccaaggctcagagtggtgaagtgacttgctcccagtcatcctatgagtaattggtggatccaggctagaaacccagtgtcctggctgtggggccagctttttttctgctgtgcccgattttgtggtttgtctctctggtgctctggagtagcatgtgtgggaaggctgaacggagagtcatgaattttcccgagttcctcctctgggaatcacagactatcagagtccggaggactttcaaaagcatgcaggccacaaactccatttacaggtgaacacatccagcccagcaagggaagggaacttgctcaaggtcaaacaattagtagggtttatttgttctggtcttcctctacctgaaattcagctctatttgaacaagtgaaacaagcccttctatgaaagcaaatgaacacggttttgaatattgtatctcaggttgctgtgagggctatatatatctttaaaaaggattcagcatagccactggtagttgataaacactcaaatgatgtttgttatggttatcatttttactaagcttcacatattaaatttagggacacctttgttgttgttgttttaaagcaggactgattgtagtcttgtctttttttttttttttccatgttctctatcttcaggataacctttgagaggacagacgaccaaattccttttcactaaatactgcaccacataatcattggaagccatatactggcaagggagaaagttgcccttttgagaggctgcattcttcatcttatgagcccatgccatgccagccagctctcattgagctgagaagctatctttttggcagtaggtctcctgatcatgaagatttgaatggaacagacattttctgagactcagtcaggcatttttccactctgcatacaattgttaccaatctagagaagtaggaactggtttagaatcagagccagcttcataggtatgcaacctgtgcaactgcgcagaccatccacattggagccccctggttgatttgacgctctgcagggaaattggaattcttgatattattttcaataagacgccccacttttttattttgcactgggcccatcaacttaagtaggtactcttggttagaataatctagaacaggaccaagagcctgtgaggaacaagtcagtgggggttgcagtttttgggggaggaggaggaggccacagacctgactccttgtgatgggtcctagtattatacatgggcttgagccaggcagcatgcagtccgctgccatagagaggaggtaagcagggtggtttgttgtcttgtccacccatcactttgccttgtaagtatagacaagacactaactgctctgcatgtctcctttgtatccccagccctgatcacacatagtacccagcacatagtaatcacttaacacattgtggctatttactttattgctgctctaaagtagtccagagatgaaccattattccaggggctttacatgtattatctctagtttttctgacagcctttcaaggtagacatgatcgtcccttctttacagatgaggcaactgagactcagaaacgttaagcaaaagtatctctggttcatctctggactactttgaaaaaatagatgaagtgttgtgtgagatgcattataaactttcctatttttggtgtcagcaccatactttatatcttggctattcaggggcttaacgtcaatttccctgctagtaacctctttcttttattgattcaacagctggattaacttccccagcatcatcatttattagccacgtaatcttaaatacttttgcttaatgtttctgagtctcatttgcctcatctgtaaagaagagatgatcatgtctaccttaaaaggctgctaggaaaactagagataatacatgtaaagcccctggaataatagtgactggcacgtagtaggtgttcaagtcacttttcttattataaagttgacatacaaacagctttcattgtgtcatttcccttcctcaaaaatatcttcaatggctccccattgccatggccatggtggatcaaagctcatcatgatctagccatagcctacattgtctgacttctctcaccagtgtttaaaaacttctccaatgctagctgtgtcttgttccccaggccactggaacctccttggcgacagaattccatgttatcacttgagtgcctaggagcatgcctgtcatagtgtctgtatggctggttgctaatcacagtgtatttcaggaatattgtgcaattctgcttttttcccatttgtttatagctcttagttccttcaaattggaaatggattatggttttgcatttgactcaggaagaggaaaaaaaacacccatttttcctctcctgtttttttttttgtttttaaacagctagtgtcactcttttgggattatttgtttatatgtttgtctctgtctctggactgtgaggtctgggtgaggaggaatggtgtttaattctcatgtatatcttcagtgttcagcacattgagcctggcacaaatcaaagagacactcattaaatatttgtcaaactgatgaatattggaaagctcaagtttttatggcagacgagggagacagtgggagctgcctttttattggaaaaacattgtttattagatctgtatggatcatttagaaaatatgcagttggttatcttttatggtcaaagaagaaaatcagtataaaatgcttaattaaaagcaggagctaacatttcccctagtaacgaaggcaggcttgtgaatattttcctttccttagctcaggagatgggcaggcagccaggctcaaagatggggatgcttcatagacagatgagaaggtttgacttaggaggactgagtcccagggttaccctgggtccatttttgctttaatgtttctccgcatggatgttgaaaatgtgaatgaagagtgttaattccttaagatattctgatgacaatgtcaacccctttaaggtgattttgctgttacctataaaattatcacttgtttgtgaattgattataatggcatattttcaggagtatgttttgtacttttaatttgagattaaaagccctaagaagtgtgggtctttttcttattcttcttggtgctcctgtgcctgacacagagcaggcccttaaaagatgtgatacctggagttcttattcacttggcctcagcagagttggccctttcctgggtgtaggaaactgctgaggactaggagctggggaggcagaaaaggcaatgatgttctgaatgtttctgccactggaaggaaatcaggccctctgagacagacaatgattggatgtgctgcaggacaggaggtctgagtactggcagcatccacattacctgggagcttgctggaaatgcagaatctcagatgtgctccagacttactgaatcagacactgcagttcatcaagatcctcaggtaattcatctgcacattaacatctgagatgtgctgctctgatgagaaaaatctgggaacttcctcaaccttgagactcgatagtctggattttcgtaattctaggatgtagcatggtgaagtttgactgaccttgaatcccagagctgccactgtggggatattaattaacctttttaatctcagatgtttttcatctataaaaagtatatgttgggtattttgctaggttttttttttttggtgaggattaaatgaaataatataatgctcttggcatatagtaggaacttaataaatattacttattgctgattttgttattttatctgagccctggtgtagatggtttatttatttattatgataggagaaaattgctgtattattatgattacaatgttgtaattttgcattagttttatgtcatttatatgatttaatgagtattcttaaagaattaaaaagcatttgcatgcttttgacctcttgttttaacctgtttttgaatcttctactcataacatggacgtattatgtggctgtatttatgggtatcatgtttttggtcttttttttgagacagagtctcgctctgtcacccaggctggagagcagtggcatgatctcggcttactgcaacttctgtctcctgggtttaaacaattctcctgcctcagcctcctgagtagcttggattacaggcacccaccaccacacctggataatttttgtatttttagtaaagacggggtttcaccatgttggccaggctggtcttgaactcctgaccccaagtgatccgcccgcctcagcctcccaaagtgttgggattacagatgtgagccactgtgcctggccgggtatcatgtattttttaaacaccactgaatcacttatatttcattttggagatttcttcctcccatttattctgataataatgattaagtagcctttttatccagcactcattagacagttaatgaaaaaggttagttaaaatagggagtgaggaaatagtgaagaaatgaaattaactattttatctcactttaactgcctagctgtacattcatttaatcatgtagcttttcctttgagctgggtctgatgtttggagggtgctgtcttctttcacaaccacacctaacctgtaatacattttctgtggtatccagctttgttttctctaaagtggatagaagctgaaagacacaagtaaagcactgtaaatggggaattcttttagatacgtataatgcccccccatgtgtttatccttgtcttagagttaacacagtggtaattatttggttgggggaggggaggaggttatttttatttcactttccaaagaattgggcttaattttcacagaagcaacaactcgtcttatactcttgttttattaatttaaattctgtaaagtacacaatttccaaaaaattatatagctgaaactgtataacaagctttgggatcaaaccctactgaatcttgtcagaatagaactcaagaggtgggaatagtgcatggcttgtccaggagcatccacggagcatccttggacactaggtggggtgctctatagagggaatggagagccctgcccgatctagtgagttagttatgtggaggttggttaaaaaaacttctatatttgtttatttgcatgctactttacagttcttgaagtactttcaaattgattttctcatttaatttttacaatgctcatgaaataagcaaggcaagaatttagaggtgggaaaatggaggttcatagaagttgaattgtgtgactatgaataagtaatttccttgaaggtgcgttggaagcagagttcagatttttcagtcttaagccagatctctaccctctcttctcgattgcctcttttcttgctgttttgaaagcagtgatgagactttgattttatttagatatttataattttcttatagcattatgttaccatcatagggcatatcagtaatagtaacatactacatatgtcaatgttagacatttaatcacctctagcaacctacaagcaaataaagagacaaaactcctctggaccagcactgtccaataaaattataatttgagccacatatgtagtttgaaattttcctttgggcacattacaaaacaaaaaagaaacaaataaaattaattgtatattttctttaacccagtaaatccaaaatatcatcatttcaacatgcaatctttataaaaattcttcttgtgatattttgcactcttctttttgtactaagtctttcaaatcaggtgtgtaaattgctttacagcacagcttatctcagactagccatatttcaggtgctcacttgccacatatgttgaacaacacacctctgaactttaagaagaatattgtaacaaatgcaggcatgtgaacacttggagatacaagcctctaatactttggggccatttaatttcgagacaaatagttttacagatttcggtggctcctaataatgactccaaatcattaaaaataagattaaattatctacattgtatttaagagggccgagtatggtatgaaatatgtatttagaaaactctccatcaaatttttttttttttttgagatggactctcgctctgtcgcccaggctggagtgcagtggcgcaatatcggctcactgcaacctctgcctgctgggttcaagcaattctcctgcctcagtctcctgagtagctgggactacaaggcgtgtgccaccatgcccgcctaattcttaatatttttagtagagatggggtttcaccatgctggcgaggctggtcttaaactcctgacctcgtgatctacccgccttggcctcccaaaatgtggggattacaggcgtgagccaccgcgcccggcccaaaaatatttttaaaaaaggtttgacatataacccagccattgtactcctggacatttgtcccagagaaatgaaaacttatgtccacataaaagcctttacaggattgttcatggcagccttgcttgtaatagccaaaatctagaaacaaaccaaatgcccttcagtgggtgaatggttaaacaaactgtgctacatccataccgtggaatactacttcacaataaaaataaatgaactgtcgatgcactcaacaacttggatgggtccaaagggaattgtgctgagtgaacaaagactcagcaaaactcagtgaaaataatgttttactgggtaaaaaattatgagacattaaaaaaagtacccttttgagattatgctgagtaatctctaaaggttatatttatagaacattcccaaaataacaaaattgaagaaatagagaacagattaatggttgccagggttagggactcaggaggggggcgtcctgggagggggatggctgtggctgtgaaggaggatcatgaggcaactctgtggtggtggaacagtcctgtattgtaattgtaatggtggttacatgaacctatatgtgataaaattgcacagaacgcacacactcacacacaaacacacatgagtgcatgtcaaactggtccaatctgagtaaggcctatggatgtaccaatgctgatttcctgatttttctattgtattagtgttatagaagatgttaccagagggcaaaactggatgacgggtatgtgagacctctctgtgctatttttgtaacttcctctcaatctatacttatttcaaattaaataaaagcctggtgcttgaatagatgttctattatttgtaaagcctccttcctagaactctacagtgaagaaccccagtgaagatgtatgaatgaggatgagcgtggacatctgttcagggacccttttaattttattttatttttaccgttctttatttatttttaattatactttaagttctgggatacaagtgcagaacgtgtaggtttgttacataggtatacatgtgcagggctgctttttctacaagcttggggctgggcttatctcagtgcagaggggaatggttgtggcctagctgcaatctctcccctaaataagaagggaccccattcttgttccagtttcttgttaaggtcactgcagcagaggatgccatctctaggctcctgaatcagaatgtcccctgaggtgccattgggctgtttgaccccaccttgggaatgctagagcctgagatcttgtcacttgctcttcacattttcatattaatgtgtcactggctttcagcagttgcctctcagtaatgcatttagtccctggtgagtatttcatagccagatgaactttaatccctgaatgcgctgaaagggagggttccttttcctcttttgaagattctgctcccctgtaagaaaagtgcatgatttaattagtggatgaaagaaaagggcccaaatggagccaaaaaagagtcagcagcattgccacccacctgcagacacacaataggataaaagcagcacctgatcagggaggggaaggaacgaggagggagagggacaggcttggccgtgggtgtagcccggagttgggaagcccgtggcccaggatcaggtcagccactggctcagtgtgaccttggagctcagcctctgtgggatttgttttctcatccttttaaaatggagatggtagtatagatccttcctacctccagaaacatgtagacagcagaaagaagatgggggcaaatctatgaaagtataaaatgcactataaaaaagtataatgcagtttataaatgattgctcctaatgcatcaactggagtgaaactagccagagtgtaagagaggaaagaggggaagatgcagaactctgttcttgtatcttttttaaaaagcacaaaaaggtgatgtcttggtaaagagtagaagtttgacatgttttgtcgtgataagaatagaattactgtggtgactgtccatttatccacttgggatccgagcattccaaagtataagatgcttcattacaggccgggtacagtggctcatgcctgtaagcccagccactttggaaggtggaagcaggaggatcttttaaggacaggagttcatgaccagcctgggcaacatagcaagatcctgtctctataaaatatatttaaaaaattagcctggtgcagtggaatgcacctgtagtcccaaatactaggaaggctgaggtgggaagactgcttgagcccaggagttcaaggctgcagcccaatatgattgcatgactgcactcaaggctgggcaacaaagcgagacgctgtctcaaaaaataaataaaaatgctccttggctgtataagacatattttattgcccttttggagatttataatgagcacattaaagttttggaaaaatcctgcaacaaagaaatccgttttactttgtttagttcagtaactccttagtttattatccatggacccctctcctgtgccctgtgacttcctcctaacttgttacatagcctggtcaagtgcgctggaacaagggtactgctctgcagaattctgaactgagttcctggggttttgttgttagcttgtttgtgactgtcagactatttttttttttttttttttgagatggagtctcgctctgtcgcccaggctggagtgcagtggcacaatcccagcccactgcaagctccacctcccaggttcacgccactctcctgccacagcctcctgagtagctgggactacaggtgcccgccaccacgccctgctaattgtttgtatttttagtagagacggagtttcactgcgttagccaggatggtctcgatctcctgaccttgtgatccgcccgccctggcctcccaaagtgctgggattacaggcgtgagccaccgcgcctggcccagactatttaatttttgtaaataatttagtgttttgtttttgtttttgttttggcctcaaggaaactcaaggaaaatttgtacctcatggttagtttccattttagaatactgtgacctttgtatctttgtattgtttttcaagttttctttccttgtcttgacagattcacaggccctgacttaaaaattcttgttactgtattgcttgttgtatcataagccatttcagaatctgcctggattgagatgggctatgaatataattaagaaacaaaaacaaactaataaaattacaataacaactcttttttgagggcctgtcatttttcaggcatggtactgggttctttgcataaatgatttcttccttaatgtgatcaaggtgttcctcagttttgtcctaggaggttttagatctcacggttctaatttagtttctcagagtcttacaactgggagggacttttgagagcatctgaccctaagaaataacctccagggagatgaaagtctaaaccagccaggacagatggtcttctgagactctccatggcaacctgcagctaatctctgcccttctgccacttctgggaaaattgctttacggaaatgctgttttaactgggagcatgaaatcactaatgatgggcaaggtgggggtggctggtttgtgtttgggaaattaaggttcagtgcctgtctctctggggggagcagctgctgtgagccaggattacctaggacagtttctgtctgatgagagaaggggacaatgccttcctccactcaggtgggtgaaggaggactctcacatgtgctgagtttgtgctagcatcagtcttttcattgccctgccttcacataccccagcatctcatctaagatgtgtcctgctgacatgagccaagtaatgtcattcttcctcatccagagccatttctggctgtcccaggctttagagcgatttccctcacttggcataggtctttgcaatattttgttatatcatctttccatgtgtaagccccatcttgtctccttgtgtagactgggcactcctgaaggcagggatgatgccctacgcatggttgtttctcaagttactgttcagtaccaggtgcatattggtcctggggtggggatatttattgttgctgctggttggcatcagtatttggtaaatagagtggagggatctgtgctggtctctggagatacaaagatgcgtggacacttttcagttcatagtaataactgagtttcttgaggggagggactgaaatttattcatgtctctccaacactgtacctggcatattgaactgtggcagaggctgctacttgttcttcccaatattattattattagtggtagttgtagtaatagtattaatagtagttttccctctccttctctctttcttcctcttcctccaactcctactctccttctctttcttcctcttcttcctcctcctccaatagtaataggaactttacctgggcacgtttgccagctttccttgcagctgaatatggtcatgtgaggttctggtgaaagagacataaacagaggtgataattgtaacttccaacttgtgctttaaaaggaaagcagtgggccatctcctttttctccttctgttgggctggagcacagctctatctttgaccatatgaataaaggtcacacttttgggatggcagagcaacaaagtggaaggagcctgggtcctcatccttgctgagctgttgccatgaccctagactgaataactgaactgtttttatttgtaaagtaacatttacatgagagacaaatatacttctatcttgtttaaacttttctacctttgggtacaaaaggcacttattatagctgcctagtctgtattctgatcaattcaggaggtattgataaatgtctgttaaatggatgaatgaatttctgccttcccttattattgagcagctttaatagtggtcagcgcatacatttaaattgagaaaggaggtttcccaggtgactttcaccgtatttcattggccagaaatgtgtcatgtgggtctctctggctgcaaggaggctgtggatgtgagttttattttccagtcactgtagatgaagaaggcagaaaaggggtaggaaaaaggaggaatgagtgaaccaatctatagtacctatcagcagtcacatataagaaaattagttttcatttatgtttttttttttttaaagaatataagccacctaatttgagtattgccaagaagagatgtacttcttatcctagttgaaccagattttgggaagacaagatgttttcaaaagagtagataattatcagcgtggaccttggggctagatgtagtcatcttgtcacacaacttgattcatggccatttggaactgtctacaatgggatggatgttgatgctgaggccacctggtgcttcagtgtcttaaatgctttctttggggccacagccaattccaggcaaggcatggcaatcccatagtttgtaggtgatatggaaaaggtagtgtcagggcagtcagaaaccctcagcaaatacttaagtacttctgtgcaccagcaatgctaggtaccagggaatcccataaatgatctctctgccatcaagagggagatgaagagataaactgatgagtcccccacagggtaatgaatgccatatagaatgtctgtgaagagtattgggaacaaagcgggagaacaagacagaaagtttccctggaagagcaataggaggtacctggagcctctatatttaatttctaaagagattctaaaacagtgggtctgaaatatatagtctgcttccaaattgggtttaaattagcatcttgtgtatcatatatacattgtacttgttactctggggaatggagagtttcaaagaagtctagagttgaagcattgtccttttctctgtctaggggagacgcttaagcaaacgtgaatgtacttccaatgtggcatctaagcagagagaccatggaaaggccaagttttaagaattgagtgtttctcctttcgattaaagaaagaaagttgctcatgaatatatgtcacttcaggcaaggggcatgggatcctgaaaatatctgtgtcagaaaatctttgcaaacaaaaatcctcttccacacctttccaaagtcaagaatacgttggacatttaacattttaggttttggattttcttaaagcaaggcacacaagaagatcaaagaaggtgcattgacatgttggcaaagaagaagcatgaaattcaattctgtggaactcattttaccagagaaatttcataaaacaaagtaaacttatcagtggtttaagttgccaacccttggattccaatgcaacaagcaggatggatgcaggcagcttgcccaggttcaatggagtttaaaggccaggtgtttgtgtaggggaaggaaaaacattgtcctgctcaggaaaaatgtattcaaataagaaacgagaaacccattttgagaatttagtgcatatgttcattttacaggtgtgttgggaaattatcggcaaatgaatggatttggtcacaaagcctttgggttgatttgggggaggaatgttgcttcttgggaaacagccagaggaggcaaaagatatttttgggaacattctaaggcattctctttcctcttttttgttgatggcttccaagttgtctagccctgaatctcttatgtgcattggggaattacatagcggtagaaggcacgcatcatttctttacttaactatgtgtccagaaccattgttgagttctggagatgaacagacacacttcagcctttaatgaactgctaggcaggagggggaaacacacatgtaatctaaataatgtaatgtaatgccataagtggtgtaaaggcttgtggttttggagaagaggaacagatgaactgtccagaggacattagagaagccttcacagaaaagattatatttgagctggatactgaaggatcttgaaggtgattgccaggaagaagggaggaaagggcagaccagatggaggtatccacgtatgcaaaggcatggaggtgtgaaacatgatgcctctaggggatgtctcatttagctggaacacgggttttgggaggcccatggaggctattttgggaaataatactggattgcaaatggcctgatatgcttgctagtctacaaatctaaacttaatcttttaagaagtaaataacttctctgtaggaaagtaactacaaacggtaaagaaagacatgcttgtcaaaaaggccagaactcctgaatgtggaccccaggaactcacatgtactatctggtctcccccaggttctgcaaggacatcaaagacctgaattttgcctagaaactgaccctaagagagacaggaagtagtgagaggatacagacccaaccgactgtagaaaactgtgggattgaggttaatatataatttgctttaacttgggtgaatgtggaataaggagagtggcaaaatgttaagttcatactcatctgtttataattgtgtgctctgagcaccctttcctttaaagtgggctgcacacacagagaaagaaacatttttcacacagtttggaccagtgcctgaaaagctcagactcggagcgtccaggagctgagatgcctgtgctggacagcccctgattggagaggagttaatgatcagtgcccctaaaattgtcacataggcagctgattatgagaaattggtccagctgtttaggttacttttgagatcaaaattttgtgttttgtcaggggagtgagttgtcacaaaccccatgtggccaaggagagactactagcctgcccttgtgccaaaatgttgcaagcttctgtgggcagctgattttagtagaccttatagggaaacccctcactccatcttttttttcccctccttcctacactgagatgtagcaggaaggaccctggcctttgggactggaggtgtggttagctggaagtaagtaaggttctgctagttccctggtgaacatagaatggtacttctttctgtctcctcatctgtgaggtaaaaacattcagagactcagtgtttcttatgacattgataagctaaggttccactcccctttctggcctgttttgagttttccctgtatactcagtgagtgcatatgatttagaaaggtctgggtggctcaggcagtgggtgtgagaagagctgcctcactttgggctctatgtccttaggtccaggttgggatcaagtccaataagctaaagaaggctttcgggaaataaaaccagaggtgttttttttttttttttttgagacagagtctcgccctgtctcccaggctgcagtgcaatggtgtgatctcagctcactgcaaccgccacctcccgggttcaagcaattctcctgcctcagcctctccagtagttgggattataggtgtgtgccgccacgcctggctaattttttgtatctttagtagagacaggatttcaccacgttggccaggctggtctcgaactcctgacctagtgatctgtccgcctcagcttcccaaagtgctggagttcgctaaccaaggcctgcaggccaaatttggcctgaggcctgtttttataaataaagttttgttggaacacattcacccacatgcatttacatatcatctgtgattgcttccatgctaccatgtcagagttgagtggttgtaacagagaccatgtgggctgcaaaggtgaaaatatttactagctagccctttacagaagaattttgctaactaacctgtcctagatcataaactctaggagggctggggacattgaaggtagtcagtaagttttgactgaatgaatgaatgaatgaatggatgaatgaatgaatggtcaggaaattggaatttgttggatatgtaatttgacagcagacttttaatgacacacttcaggttccattttccctttaaataaaataagaacagtgctacctatgaaacaggcagtacttaggaggattatttcccataatataactttgggtgtttaaaatgctattaaaaatataactaccatctatgaagctttgtatgtgttgagcactttattaagagctttatttttattacctcttttagtcctcaccgccacccactgtgagggaggaattattgatcctagtttatagatgacagagctgagtccagagaggctgagttacttgctgaggtcacagagctggtaaggcattgagcacagggtccaactccagggtgtctggttctaaaggcttcccatcatgccccattgcttctgagtgctgttaggtgcttcccaccacttttttaaataaaagagacagatatcaattttggagaggggtcttcaagatagaaacaaatggcaaaaaaaaaaaaagttggttatcaaatcttttaaaccatttatgtgatttagaaaactgtgaagttactcatcattagaagtgcactttaaaaaattctcttccttaaggttcagctcagtgtgcttcatggaaaaaactaaatgggggagcatgttttctttgggaaaaacaaaataggtaagttttagggatttgtagaattttcatttgtttagcaatggtgtacgtagtggtaatacacattcaaatgctgccttctcccagaaaccttctgccaattccgcacatcacttggaactgggtacctagcacatagcagacattcaataaatattgattgaatgaatgaattagtaccttctagcatttcacacatattgccttccagtatacttggttttatgtgaatgtgtgcccttacctattatagcataagcactagaagagcactggtaccctgcccacttctttgtaccccttatggtacctacctagcacagggctggaactgagtagatgctcaatgaacatttgtggaattatgctgtggcccccaaattattttgtggcccctaaagctttgcagctgagtgaatggcccattgaaaactagcacgatgatcagatggacttctctctgtctaagggcattgattgagacccacatttatattgagggtggaaatgtccaacaaagacaaagaaaagcatatttattgctttagatagaagtcatatttgtttctttcactctggaagatatagtcacataaggtcatgagctattttttcttcctacttaattgctagtctgtgggttggtgaaagctcacatgcttagcttttcagtgaaactttcacagtccatgtggctctgactcagaattttttcccctatctgcttcttctgttgccaattcattgtttatctcctttgtgttttacatctgacctattattttgcatgctgttttggattactgaggtagcaacatccaaatagtttctgtgtacattttagcttttgggagtcaggcagctgctctggggcctgtttgagtcaggtcagggtcagaaatgcccttctgcttttgtttccgtggaagaagttggcctggaactctctctgggcaccttctgcgccctctggcaaccagaaaagcaaagtcgttcatcaaaatctcagactggagcaactccttaaaacagcttccacagttcttgcacatactcctttcttgatttgttgcatatcatttcaggcacctcttttaatgcagctattcaggctgcctaaggcagtggtccccaacctttttagcaccagggaccagttttgtggaagatagttcttccaccgatggggtgggggtggtggtttggagatgattcaagcacattacatttattgtgcactttatttctgttattattatattgtaatatataatgaaataattatataactcacaataatgtagaatcagtgggagccctgagcttgttttcctgcaactagatggtcccatctgggggtgatgggagacagtgccagatcatcaggcattagactctcataaggagcacgcaacttagatacctcgcatatgcagttcacaacagggttcgctcctatgagaatctaatgccaccactgatctgacaggaggtggagctcaggcggtaatgcaagtgagggggagcagctgtaaatacagatgaagcttcgctcacttgcccacagctctcctcctgctgtgcagccaggttcctaacaggccatggaccagtaggagaccctggcctaagggaccaggacagtggccagtgcttttcatagcctcttagtacttctggtggagtgtctctattcccctcaattccctcctattccgctaggagtttgaatctgctttgcccagttctgtcctgccagcctttttcctttcactgaattgccttcactttttgcctattagctttgatctctttggaaaaaagggcactggggtattattactgcctctgtttgtttttgcaaatgcactatgatttgtggttggtcttttggctagcctgaggctacctgaccctccctcaacagccctagttcccccaggtcattctatagttttgcccatttctttaattaatgttggtgagagtctccgagcaatgaagactttttggatatggagagaagcagaaccagagggataccagtaattatgctaatctgagagcattaagtcttcaaatatacatttttggataagcaattctgttgtttttgaagtttggttgtctttttgtttctgggtggtggactataattttgtattaaggaaagaatgcctgcccttatatatccaggactggattttttttttctttttcttttcttttcttttctttttcttttttttttttttttgagtactcatgaaaggaaaccataagaatgtttgggtctaataatatacttgcttgtgtatgaagataaaaccaataataacattaataccacccttcagtggtgaaatgctttaacctttcaaaacaactccttttatgaacttactctatcagttggcaaggtgatttcagggctatctcctgtggtgatgatggatctgtgggagcttttctaattgtgtgggtgaatttgagagaccccatcccagtggttcttgttcaggggtgagtatggaatcatgtggggaaccgccatgaattacacatacccaggtcctgcccaggacctactgacacagtcctggggtgggggacctgcccacttggaaaacttcctgggacttcctcagctggaccctctggggattggggaaatgcattgcagtcacctgcctggggtagtaggggctgccacatctgtgactaggacccaaggagagtgatgatgacccttcttggaatcatgcagaacacacagtgacagtcccttttggaagctggccacaggctgcactttattcattattttaacagcaaccaaacatttgctgtgtgcccactggtggccgctagacagtcttcccaccctttagctcatgtagtcatttaaaccagttccatcactagagaaatgtgttactagccccttgaaggagagtgggccttcaactggattcaggagttgtggtctgaggagagtgattgatatggtttggctctgtgtccccacccaaatctcatgtagtagctcccataactcccacgtgttgtgggagagacccagtgggagataattgaatcataggagcaggtctttcccatgctgttctcatgacagtgagtaagtctcatgaaacgtgatggttttaaaaatgggagtttccctgcacaagctctttctctctttgcctgctgccatccatgtaagatgtgacttgctcctctttgccttctgccataattgtgaggcctccccagccatttggcattgtaagtccattaaacctctttttcttcccagtctcgggtgtgtctttatcagcagcatgaaaatggactaatagagtgatttaatgagtttcaccagcatgggtttctttagcctcggtttctttgtctgcagtatatgggctaatggtacacaccttgaggttgttgagggagaagagacgggctcaagtgctgcctttgtcttaccaaccttgtgaagcctccttgagcagccatgtcttcatttgtaagatgagaataagagcacctgttttatgggctttttgtaaggattgcgtgtgctcatgtaagaaaaaccccttgcaccctgcatagtaccttgcagagcaaatggtggtgataatgacaatagaaggagctctctttattgagtgcttactgtgtgccaggcactgtgctgggcactggactacaacagaggggaaagataggcatcgttcctgacctcactgcgcttaacaaagagaaagctctaagagaaagttttcaaagcattacccttctctgtatatttaagaggaaagctttaatgttataggatgccttctaaatatgtattttataacacagtgggtagaatgtggaatgtgtcttctgggagggaactggagttttgcatttcctgcctgcttgtgcttttgaatttgtggctgtaatgctgccctgcctgaggtttcagcagttaatatttcccagggcagcatgatgtcaacgccccgtggtctcttatctacaagaagggtatagccggggcagagggagagaaaggactattttcaaagcctctcttgaagactttgttgagctttaacttaaaattttcctcatctccttcctcaaacgtttgtgcttgatgtgcataaaccatgccagtgttttggaagattcaagtttgaccaccataaattggttcatatttccagcagggcagttatttaatttcctgttggaagtctacaaaatgttggcactgtttgctctttggcagaagaccaaaactcagtacagtatcattagcatgctctggtacatagattaaagcacgattgtctttaataagaggccatccctgtttaggatggggctttgggggctgcaagggtgcagggaagcacaacgagctttctaatcaaaatcaaagtgcagttactgggactcactcgagaagggttaaagggagggcagaattccgatttcttgtctcaatttcatttgtttgggttattttgctctagactctgggagagttttggaggccagggctggctggtttgtgggataccctggtttaagcctcgtgcttcttctgcattcctccctcttggcagtacggctcatgggagaagcccacctctgaagcccatagagaaatgcagagtgtctctacggaacccactgtagtaactgaaatgttataatggtgggcatttacagaggctctgttatcagtgaggcactttacatatgcatattcagcctttacagtaaccctgtgagatacgtattattattgctgttttgaggatgagaatactgagatgcaaaaagattaaagtatctgtagccagtgagtatctgagctggggttagaacccagttctgttccttggaaagattcttactcttctcatataccctaataagggcctggggaaggaaaggatctgagttttcaaaaaagcttgaaaatttgcctaacatgaatcttgggaaattatttctaggggcttcttaccagattagctctgtttttctttcgcagaggcccttcagtgttggctctttggtagaatgagcatagaaatgtatttttttcctacaaatattgtatcatgaaaaatgtcagacagattgaaaagttgaacaccacctacattctactattgctgttttattctatttactttatcacttgtttctccatctaacctctaagatctatttatatttgttagaacatcttttctctctgcccttctgttcctttgattgatggcaatggcctgatgggaagtaattcacaaaaccagagggaaagtacagtgcttagaacaatcttttttttaggaaaaagagaaaattgttcttatgtttaggtagagcccaaaatgggcatttttcccctcccctaggtctgttgtttaaaggatctgacagaaataattataatgaggctgatggtgaatacataaggtataacctattattactgtcttctatgcaccaggcatgatgctgactgcttagtaaccttatctcattgatcatttcaacattcctaatttacagatgagcaaacagcctagagaggttgatttctgagctgggatttgagactggtgtgtagagactatggtgtgatttctctgcatttcaaattatgcttccctatatttttgttccagggtctcagtgggaggccctagaaggttactactaataaggaaaaattgctaaagccctggaaattgaaggctaccagaaccttgtaaagattctctgggactagacctcattcctctgaggatccttgtcagacagtttccagggggtggggagatgttctgctctccccagagtgtcatagaaagtttctgtggctttcggaatttctcatgactgattcacatcttcttctccagcttagaagaaaatccaaacacttacctttggtttatcagttggttaatgttgttttcttttcatggtaggatcatctatggcctccttagacctatacaagtgacatcttttcttcctggggaagaagatggtttctgcaggcactgacttatgagggcaggtgcataccttttgtaagggatgaaacttgaaaaagaatgggtgctttttgatgtgtttatgcttgaacctgcttccttgttgagtgtgatcttgagcaagtcacataagcttcttaaactcttggcatccctgcagcagttattattgtgagggagatggaaaaaaggtatggatagagttctttccattagaaaatgtaatattcctcaggagcccatgaagaggatgctgctgaaaactgaggacatggcatagataggaattgctagagaaaggcagtagagagaagaaaaatacctgttggttgaaatagttgattggaggaataaaaattgcctggaacttaaagtttccttcgaataccagcactgtccatcagtagctgtataaattagcctctttggtcattaagtttcatcataaagtgggattattaatacctacatcatagtcttattgtaaggataaagtttacataatgtatgtaaatctcctaacagtagttcatagtacttggcgataaaagatatctcttagaagtaggaaatggggaaactgaggtacaccttgaaacctgagtaggatttggatgcgtaaaatggtccagttctgaaagtattttacaaatatcaccatggaacactatgcaggcatcaagaagcatggttgaaacccaaaactcttctttcttttaataaggcaaaggtggttaactttttgagccaaaagttccaaattgttcagtaaaatgtcattgataagatatcaaaatatcagatatcattttggttgaagctcaagttggcaagaaccaagggtggaattgctaagctgggtgacacatttgaagccattgtaatgttttagtgatctccacagggcacgtcattggtggctctccctgtccccctgcaagccctgcaatctggctgcattttctacacacttgtttggttgtttcatgaaatctacccccctgtactgctgcaggccacaaagaacagtgttcagtaaggtggattttggaaactgaagttgtgattgcactgtagaaggctttcattgtttgttttgttttgcttttagtttatggaggactgttgggagattaggagaaggaaaatgccccagtagaactgaaatcctagtctagcacctgaaaagagtgaattttgccttcttttttttctctgctaccttgcagtcatttctgctatatgcagattcaggtttgatgtgaattttgagtttagctggaattagttctttcatggccttggggaagatgtggataaaagaatgaacatactaagggttgacagtaaaattcaaaggtcaggtaaggttctgtatgcatcctctgcctggagtggttgtgtagtgatagtgttaggactttataagtctttttctcacatcatccttataacaagccttagagataagtattgtttttattgctattgtgcagatggagaaacagatgaggaatggagaagttcaataacctgtgtgaggtggtacagctaggaagtggcagagatgggacttgaattcaaatctctgacatgtaagcccttccagcaattgtggtggaatatgctatctctgttacaggcttctcttgtaacaagctgtgcttgttaatgctctataaggagcctctgggagcaaggaaaagggaaagattttttgtgttcactttgcatccacacagccctttttattctcaagattatgctggggggaggaagcactagaactaccgtgaattaagtgttcacattgtacctagattaaagcaaggtgctctgcataattctcacatttaaccatgctgtccttatccttatttcattgatgagcttcagaaagtcaggttccttgaccccagtttcacccacagaggaagttctgatggtgaaatttgaacacagaatgagtccaccaccttgccttcctcttcggttttcaatgacttctccctgacagtcctgcgatggcatttgtggttttaatttcaaagacccttacaattgttgatggttgatagcatttggtatccattggaaactgccaacacttttcactgctgcatttggaagaaaatcatagtgagttgatgtgttagtgattcaggacttctgggaaactgagagcacccgtgtgtacttatttggagtcaatactttatgaacaactttggcccaaaaggagaaaaatctgtcttctgaaattgagtgcaggtctcttagtggcttacctcagcagggagccagttattacataagctgaataccaggtccgtgggtttccctaacctgaaaaagaagcagcgtttgcagttatgaggaaaacagaaagacccatttctctgtggcatgatactgaacaggcagcttcagccgtgaggatattttggccggaggaaaatgtagcttaagaaaagtcccagctggttcaagtgacttaagcccagctattcatgaaatattatctgacagctcccccttctcctcaagtggctggggagtgagtcacaattgccccagaaacctgtgttctcatatgggattttggtattccaggtttgctctactttgcacactggacagcttcatgaaaagccatatttggtgcagacattttcttgtgatgataaaagcatttagtaaatgtactgggaagcttgccgtgatgaatccttttgttaagaaattaaccaacattaattttgaatgtaggactgtcccacgtgcccagcactgtgcttgctgatgtgggggttcagagattatgagacatgtgaaacactagaatggaatctccatgaaggcagcgatttgcctattttgttttctgatgaaactgtggtatatgtaacagtgtctggcacatagtggatgcgaaatagatatttgttgaacaagtgagtatgtctctgcccataacagcttacaacctagtttgcttgcattaattaatcaactaattattaattaatgaatgattttattcctttattctacttatatgagcatccagaagtcctcaattttattaggatatctttaattctttttattatttaaaaaggtaaacatgtgatgtgtttgttgtagaaaatgagaaaagagcaaagatgtaaaaagaaaaataattgagacaataattattttaatttaagcttatatcattagaaactttttccatgtaaatacctgattttaaaaaatgagtttaattctcttgcaagttgattttataacttgctttcctcccacttatcagtgttattgtgaacagctttccatatcaaaatacactgttctcaaatcatcaatttttaatcacacaatttagcattgtgtgtgattgcatcatagttttcttaatccctattgttgaattgttgggcattactcctctctctgtttcattagtataaacaatgctatgattatctgttaatttttgtgcatatccatgattattttcttggcaataaccctttgaagtggaattattgagtcaaaggtaaaagtcttttgatctacacaatcattgtggctaccataaaggttacagaaatgtattcccctctctgtgttctgtggaaataaagtggtttttttgtttacacataactgatgccatgtattgtcatttaaaaaaaaaacaactttctgggttaaaaaagggaatattattgttatttaagttaatatacttttgattactggtgatgttaaaaatcttttaaaatattttttgtcatttgtatttcttcttttgcaagttactggtttatatccattttcttactcagagactcgaggacagatcttctttccttggtccctcccaatccatgatgggacttgctatggaatttgtccacagttagccccagtaaatgttgaatcctcccatccacccactcattcatctacccactcacccatccatccatcgatttatatgttgattcattcaatgagtatggaggacctaatagatacaaggtttataatttaagatagcgctttgaaagtttttttgatattgctgctaactacagacattacttttttttttttttttttttttgagatagggtctcactctgccatccaggctggattgcagtggtgctatcatagctcgttgtaacctcagacttctgggcccaagtgatcttcctgcctcagcttcctgagtatctgggactaggagtccgtgccaccacacccagctaattgttttattttttgtggagataagggggtcttgctatgttgcacaggctggtcctgaactcctggcttcaaggaattctctcacctcagcctcccaaagtgttggaattacaggcatgagcccccacacccagtcaaaatcttaaacttttttttttttttgagacgaagtctcgatctgtcgcccagggtgcaatcccggcttactgcaacctctgcctcccgggttcaagccattctcctgtctcagcctctctagtagctgagattacaggcatgagccaccactcctggttcatttttgtatttttagtagagatggggtttcaccatgttggccaggctggtcttgaactcctgacctcaggtgatccacccacctcggcctcccaaagtattggaattacaggcgtgagctaccgtgcccagccccaaatcttaccttttaagaaaagacatattaatatgaattaatacaatgagcaactaatccaaaaagttttttttctcctaatgagttttcctttgggtaatggaactgatcttgtcttttctgtgcacccagcagggttgggtagacagaaatcaacaaatgttttctgtaaaagtctggatagtaaagatttcaggctttgcaggccatatagactctgttgcaactattccactctgctctaaaagcaggaaagcagccatagataatttgtaaacaaatgagcatggctttgttccaatgaaaatttatatatagaaataaaatttaaatttcatacagctttcatttgtcacaaaatattatttgtctttttttttcccccagtcacttaaaaatttaaaaaccattcttaagtttgtaggccatacaaaaatagacagtgagctggatttggcctggggtttgcagtttgctgatccctggggtagggtctcagaagcatgctttgaggctttgaggagctaatctggttttgcaaatttgctacaaacaaccccacaatggatgattcataaatgaataatagaattgagtttagctgaggcttggatatgtatcctacctcttaatgactggcaatacataattcttagtgtgttagcaatattttaagcttctaaaaatacttttattatatatttactcataaaaattttacagttatgagcaaagaaaaaacgctttcctatcctttgtcaatattttgatgtgtcttttttcagtcttcatgtatatatagggcttacgtatgtataatgtctttctttacaaacactgttgaatcctgctttatttctcttaataatatatggtaaatatttgtcagtgttgttgaatattcaaatataaactgaaaccacaataaaataccactacatacccacagaatggctatgattaaaaaaacaactaacaataccaagcattggtaaggatgtagagaaactgaaatcctcatccatttctggtaggaatctaaaatggtgcagccactttggacaacaatttggcagtttctttaaaaattaaacttagcatatgacccaggagctccagtcctaggtatttatccaaaagaaatgaaaacacatgcccacacaacgataggtatgcagatattcaaagcagcattatttataatagccaaaaattagaaacaacctaaatgttcatcaactggtgaatggataaacaaaatgtggtatatctatacaatagaatactatttagtaattaaaaggagcaaaataaagagaggctaccacatggataaacctcaaaaacattatgctaagtgaaagaagttaagcacaaaagaccacatattgtgtgattgcatgtacattacatttctagaaaaggcaaaaaactagagacagaaagcagatcagtgtttgcctcaggcaaggtgggaatggttagcgtcacttctaggagcagcagaacttttggggatgacggaaatgttttaaaagtcgaatgtggtgattgcacgactgtatatatttactaaaattattgaactgtacactaaatgggtgaatgttatgtgaattatacctaaatataactggtaaaaatattctttgaaagctgaatttttaatagtgtcatattattccatcatgtgaatgttttatttctttatcctggatgacttgggagaaatattcagtgtttatttccttttacgccaaaatccatattcagtaggttcaatttgagccattggacttaaacaagaatgattcagaggaatgaatcccaatccagttgtcaagaaacctagcgtggtctcaatcctgcctccagctgggtggacctcagttccctcatctataagatctaggacagaaataaatacaaggaaatactgggttccagggaatagaggattagaaatagaaaacatagtagtggcagtaatgaataagactgatttccctaaaagtaggaggccaggcactgattatttttatttttattttttagcttttaagttcaggggtacatgcacaggtttgttacctaggtaaacttgtgtcatgggggtttgttgtacagattatttcatcacctgggtattaagcctaggactcattagttatttttcccgatgctctccttcctcccaccctccaccttcctatatgccctagtgtgttgttcccctctatgtgtttatgtgttcacatcatttagctcccacttacaagtgaggacatgttatatttggttttctattcctgagttagttggctaaggataatggcctccagctccatccatgtacttgcaaaggacatgatctcattcttttttagggctgcatagtattccatggtgtatacataccacattttctttatctagtctatcattgatgggtatttgtgttgattccatgtctttgctattgtggatagtgttgcaatgaatatatgcatgcctgtgtctttataatagaatgatttctattcctttgggtacatacccagtagtgggattgctggattgaatggtatttccatttttaggtctttgaggagtcaccacactgtgattcacaatggttgaactaatttacactcccaccaatggtacattgtggagaaaaaggaatgctttctccacaacctcacaatggtacattgtggagaaaaagcattcctttttctccacaacctcaccagcatcagttattttttgactttttagtaatagccattctgactggtgtgagatggtatctcactgtggttttgacttgcatttttctaatgatcagtgatgttgaactttttttcacacatttattggccacatgatagactggataaaaaaaatttggtacgtatacaccatggaacactgtgcagccataacaaggaatgagatcatgtcctttgcagggacatggatggtgctggaagccgttatcctttttttcataatggttgctggctgcatgtatgtcttttgagaagtgtctgttcatggcctttgtccactttttaatggggttgttgtttttttcttgtaaatttaagtttcttatagatgctggatattagacctttgctgggtgcatagtttgtgaaaattttctcccattctgtaggtagtctgtttactctgtcgtagtttcttttgctgcagagaagctctttagtttaattagaccccatttgtcaatttttgctttgttgcaattgcttttggtgcctttgtcatgaaacctttgcctacaggtgctgtttatttacacccctgtcccaacctcaccccactccctttcttttgctggtgggaagtcagtaagaactgtgggtggggttctgaggtaatcaatacaaagaagaaggtaagaaattggaggggactcaggggagatggcaatgctgacaaggggttggatggaatttgttctgtaaactggaagcattctgcttggcctcaacacttgccaaggcgttgatgacacacaatttggatgatttaatcaccaggaaactatctaggtttcttgttctgaagtatgagaggacagcctattaaaggaagaccgaggctggatattgccatgaaaatagtaagttttcacgtttggcttccgaggggagagctggtgccctactcactgcagggaaatttaaactgggtgaaactgaactggtttccaattgcttgtgttctccatttccagccaagttccaggttttcctagagtacagccaggagcatctgcacctagagaacacagaataaaattgtggaaaccaaacttgtaaatgtttttctcattagcttcaggctcccagccaccaataaactgtaggctttaaaaaatcctgtattattttgcaagttaagagaatgtgcatattccccttatttatatgttcaggattttcttaaaatgttacacatcaagcatttatctgctaagccaccccaaaaggtaacagcattctagtttttgtacaaaagagaaaaaaaattccacttaataaacttgcagtaacttgagcctgttggtggtcttggaggaaacccaaatccaggtttggttgatactgtgtaatgtgaatgcaattagtagcggtttttctaaagtagaaagagatgtagaaaaataatgcatagcaaatttaggtcagagctgggaagcttataaatccttatttttgttttcattactttaagtaatagggcttttgtctttattatgtaatttccctagcaataatatgttttaaaacatttttctgttaatttcatacatttgatcagaaagccacagttcataaacccctgtgatgtggcagctgtcactgtttatatatagaggatgacttcttgttcatccctgggaggccaacacaaaaattactgatgggggcaactttcactacctgttttttcatttagtagaaggtttgcaaagcagttttcagttgatcaacatcctcctgataggctaaggagtgaactgacctttacatgcatggtttatttcagagcatgttatttgattccagcatatttaaacctaagcaactagattgtaaggtctgtaaaaacagaatttgtctttctggttttttactctattcccctggcacatagtaggtgttcaggaaatattagctactattctcctctccaagatgcagctgttcctctccagctgtcctgtccttgctgctcctccttgaacttgccaggctactcctgcttcagcactttggagaccacagaccagcagggatcactccctctcctcttctgggtctttgttcagattataccatctcagtgaggccctaactatctccttcctttctttctttatttttccatcatatcatcgccatctgataaactgatatattgatgtactgatatattgacttatttatttgggaatgtgagctccaccaggacaggtgtttctgtctgatttggttattgctgtatacctagtgcctagaacatagttgctataatttacttggatgttccgccacgtactggctgtgtggtaatagctaatgcatttgctcccttggatcctttgtttgattccccatttgtttcatatggcatatgtgggtcagatgagatgttgcacatgaaagctcttttatgctatgtgttatgcaaatgtattcacttatttattcatttaatcaaccagatgcagttcctgccttcacagagcttaataattggacaaataagtaatttcaccaaagtgggaatgcgggtgatagggatagtgtgatagggaatgtgcagcgtgctatgggagcaccgtcacgagggattcctaattcagatgtggggacaggaccctggaaggcttccaggaggaaggaacatagaagctgagatctggggatggaatgggcattcaacaggcgaagggagtgtgatgtaattgatggcatggagagtattgcaggtaggaggaataatgtacagagtctggaagtgcagaaccatagagtactggtggaactgaaagtaattcaatctttctggaatatccagtgtggggacagataagtggatagggatgtggctcgtgatatagtctggggacagatcaaggagcgctttgcaggccatgctggggagcttggacttgatcctaaggacagtgtggagccatggaagtcttccaagaaaggagtgacttggtctgactttcattttcaacagtcattttatggagtaagacagcttatttcctcgccaaggaacttgaacacaagctcccaggaagggaggttgtgaaaacagtgaaagggccttccagaaagtaaatccttaagctccatgaaattagcttaaattctgtttgaatctgactggtgaatatcatagcaatgaggccaaaaaaaaaaaccttcataaaaacttaattatctttgaggccgtagctcatacttgagggaagggacatgggtaacgctagagacatatatgtttgcattaacttttacgccactgtggggcagacaattaaagcaggagtggaggagtcagagcagttttgaatctgcttttaagtcccagagagtgtcacagtacctcctacccagcactggttgccaaagtaaaagaaagtggtaacaatagggcataaggtggtggagaagaggctgggtagaccttggccatattcttgctttgcaccttacactgctataaagaactacccgagactgggtaatttataaacacaaaagaggtttaattgactcagacttctgcatggctggggggtctcaggaaacttaaaatcatggcagaaggtgaaggggaagcgaggcatgtcttacatggcagaggaggagagagagagtgctaagagagaagtgccacttttaaaccatcagatcttgttggtttaaaacaaccactatcgtgagaacagcatgggggaaagcacccccatgatccaatcacctcccaccaggtccctcccttgacatgtggggattacaatttgggatgagatttgggtggggacacagaaccaaaccatatcattttactcctggcccctttcaaagctcatgtctttttcacatttaaaagctaatcgtgccttcccaacagtcccccaaagtcttaactcattccagcattaacccaaaagtccaagtccaaagtctcatctgagacaaggcaagttctttccacctatgagcctgtaaaatcacaagcaagttaattacttccaagatacaatggggatacaggaatttggtaaatgttcccattccgaataggagaaattggtcaaaacaaaggggctgcaggccctgcaccaagtccaaaacgcagcagggcagccattaaatcttaaagctccaaaataatctcctttgactctatgtctcacatccagggcatgctgatgcaagaggtgggctcccaaggccttgggaagctctgcccctatggctctgcaggatacagcacccctgacacacagctgctttcatgggctggcattgagtgcctgcaccttttccaggtgcacagtgcaagctaccagtggatctaccattctgggatctagaggctggtggccctcttctctcagctctactaggcagtttcccagtggggactctgtgtgggggctccaactccattttccccctctgcctgccctagtagaggttctccatgaggactccactcctgcagcagacgtcttcctggacatccagacatttccatagatcctctgaaatctaggcaaaggcttctgaagctcaacttttgtcttatgtgcactcgcaggcccaacaccaggtggaagctgccaaggcttggggctcccaccctctgaagcaatgcctgagctgtactttggccccttttagccatggctggaactggagtggctgagactcaaggtgccatgtcctgaggctgcacagaacagggagtgcaggagggacccctggcccacaaaaccagttttcccttctaggcctctgggcctgtgatgggaggggctgccatgaagatctctgaattgccctggagacattttccccattgtcttggctatcaacattcagcttctctttatttatgcaaatttctgcagctggtagcttgaatttctccccagaaaatagatttttcttttctacaacatggtcaggctacaggtgttctaaacttttctactctgcttcccttttaaacataaatcccaatttcagaccatctgtctgtgaatgtctatgactgtatgctttcagaaaaagccaggtcacatcttgaatgctttgctgcttggaaatttcttctgccagatatccaaaccatctctctcaagtttaaggttacacagatctctagagcaggggcaaaatgccaccggtctctttgctaaagcataggaagagtgacctttgctccagttcataataagttcctcatttccacctgagaccacctcagactggacctcattgtccatatcacaatgagcattttggtaaaaatcattaaacaagtctctaggaagttccaaactttcccacatcttcctgtcttcttctgagcccttcaaatttttttattctctgcccgttacccagttcctaaatcacttccacattttcagatatctctatagcaatgccccacttctatcaggaccaattttctgtgttagtctgttttcacactgttataaagaactgcctgagactgggtaatgtataagcaaaagaggtttaattgactcacagttctgcatgggtggggaggcctcaggaaacttacaattatggtggaaggtgaaggagaagcagtctcctcccttgacatgtggggattacaattcgagatgagatttgggtggggacacagagccaaaccgtatcaaccagtgatgtggctttgggaatcacttaacttccctgaacctctgtttccttttctggaacatggaattagtactactgatttttcagtgttgctaggattcaatgagataaagcacagtcagtgctgctataacagttgttttgaaaacacacacattttttcaaagctgattgatgtattcagaaaaatttgagaataatgcaaattttatgtttacttacatagtcagttttatccacgaaaagtactaggtggactcagaagacggcactcagctaaagtgagatgcatggcaatatacaaacacacacacctgaaacatctaccagctcctcagttcaccaggtgtgttgagttacactcgagttacactcatccacatctgccattacaactttctgtccattttctgataaccagccccccacccaccacttcacaataacccataagctgtaacccttacaatgcccatttccacaagaaagtagtagtgtgttccaatcttgttttcccataaactctgctgtttttactgcacaattttgcatagtgtggtgatttctcagaactcatatgttgtgttatagcagaactgactctgtctaacacaattcctggcagacagcagacactcagtaacaggtagctgttttattattaatattaatccacttaagtacaattgtgggttggggcagggatccctagttacaatgtttagctgctttgattagtagtgttaagtgaaatggactgcctgagtggaagggttttggtgcttttatcttttctaagtgtgtgctggtcagaccacccttggggtattaacagtgacaaaccaggtatgtccagaaaagagcaagccagaaaaggagaagacatgagaatgatctttaaatagttagagggccatcttggaagaaggattgctttgttttgtgggtcttcagggtgacaaggggaagctcccagggcccagggttctggctagctcggggacgagcctcagaatagtccctgggggtgatgtgttctccaagctctgattggctgctctgggaggggagaggacagagaagagtcaagcacgggtttggaggttctatctataaagttccttttcatttttttttttccttcaaggtagtgtgcaaagacagattctgctgatcagagtaaatttcagacagaaacaacccaaacttttccagcagtatttggacttctgcttgcctgcttgcgtttttttttcttttgggtgatctaagagaatagttagcacatgtgcatatttacgcactggttttttttctagttatgcccttgaatgttgcaaatataaagactatgctttacaaatatttatggcttctggcatgcttaggaatagtgaaattacatcaatgctttccgtctcgagggcttttttttgacttttcttcttcttcttttttttttttttttgtttgtttgtttccaactcagggaaaaagctcagttagttactgacctggcattgctttctctctaacatcctgtgtagcttttgtcctctccatctaagcaggctgttaagctcttgtagtaagaaagatgttaccctgggcttagaccctctcggtggagctgagatggagaagcctccggaagcatggggcatttgagctgagggatggcaggatctgcttcagatatttaaagtgggttactctgagcctgcaaactagagagtctagtgtggtgtctctagaagaattacttttgtacccttagatgaattaaaaagtaattatactgagtgttttatcttgcctgtatacggatgtataagattccaggtttctagttgatgttactgttaaaaacagaagatgttcaaacatatttgattttattaaattagttttccctgtagtcataggaggggtactgctgtttacatgctgaatcttagcaaaactataaaatagcatttttaaaaaatggcagctcttctgttctgatgctttgacaattaatgttatctctttttgtttctatgatgagcacatgggacttaggcttactcttaaaatggatttttccaaaaccaagagttattacatttcttcctctgagacaaagtattcaggcctcctcctcttctagcactcagtctggaaaatgtggttagtctttccatgtgggagctcttgtgctttgtgcattggttccaagatggcaagtggactactgttccaagatctgggcccaaggcatgtcgttgggctcgcctgaacttgtatataatgaccagaaggaattggtctgcactgccattaccgccagccactacctgatcaattctgcttgggaaatggctctaatcaacattcttctagacctgctgttcatggctgcaggtggcaggctcatggatcaataattggctggggcggttggccccactggtcaacctcactccttgagccctatttacctgttgctgcctcctccatcctcccctaaagtcacacagcttcaaataaggtggtcccatctattttggtgctttcccttctttcttaacctcccataatggaaaaagcacaggttccagaagcctggttttaaatctcagctctgttatttatcagctttgtgattttgggcaagtgacttaatctctctgagcccttgctcactcattttaaaatgatgtcactcatccctttcagagctgttaagaaaacatcatgcaaaccatctggtacagtgccagacacagagaaagccttctggaactggaatccacacacaccttaccaattactttttgagtaggtcaattgccagcatgtctccagagcaaaaagattagatgatcctcctttctttttgtgccaggttctgcccaggcccaggggctgcagagatgagtaagaggaagtccctacctataaaggcactcccagttttgctaaaatccatttttccaacaaacgtattttgatacctactgtgtgcaaaatttatgtgcctttggggaggatactgagatgattcagtcactcatttattcatcggtcatcagtcgtgtgccagatactgttagaagcactatgggtagaaacaacaggcaagacattgtccttccttttgagaagctcatagtgcagtaaaatatactaaagtatgggagaagtagatagaaagagaatatgatctcattgttaaaaggcacttgtgttgttggacaatatagggtgcacacagtaatgtggatttcatttttgcaagtattcagatcttgatagagcttcattgagacaaccgtctccttttagaggaaatggagcttgggagtggttaatacgtcacacatttaggttaaagtaaagctgacactagccccacagaaactttaatttgtgtagtgactaaagtgaaaacactctctttcttcttgattctattgtctcccagcagagattttataatttgaaaacattgttccttaggtagccccaagaggtagattttcagatttgctgcttgctttttgtaaactattgcattccttcctcccaatagccccactggggtcaggaccattttgaacttaaagaacttgctcaaagttacacaacttgacatacaaagtcaggatttgaatccaggtttgcctgattccagagtccaagccctaagcctcaacaccatagtccgtccatgattcacactcattgtagtgtctgatggcttttgagactttgtagaaaaaagcacatcttaaatcatttttaggacctgtttatctgaaccagtggaaaaactaaatttacgaaccataaatagtgtctatagatgtggaatgccaagtgagttaggatatattaataaataggaacaaaaagttatgaccaaaagttgtgttttcctatacccagtttcttaagatttcataattagcaggggggaattctgagttgatgagtataaaaaggcctctgcaggtagcccaagagacgatactaaagtccagaggttataaacagaaagaggaacagacactgtagatttttctctactccatgacttcttcttgcagaaattctgcacttggcactaatcagacctaaaattaatttcttaaaatcaccaatgccttatttaaagaggttaacattctgcatgtagctgctccactgccaaacaaaaacacccctggttcttttgtgaccactaatgcaattgactttccatctttttaagaatgccccctcctatccctccatctttgtctcccaattaatttatgtttattttgtaaaaagcttgtgggcctgttgagttgatattgctaaaggctgacaaccacatagaggtacctcttatagcgatgaagtgtgtgtgcgtgtttgaattatctgttaaccagcatcaagacatcggttccctgtcttggatgaatggcaggggaggctgagcttaacttggccaaagcagcagggggctaatagaatgtttctgttccccataaagaaaggtagtcaagcgtctgtactttccactgaactccagtttctatcctgctttgaaaattctgcttaccctttcagtgagagccacatgacaagtgttcagtatgtcagatttgttttcattttattactacgtatgaatttgacctccacagtagggctgcattcatttcccaaagctcttccaataattgtattcttttaaaaaatatgcatactattattctttttcagattgtgttatggctggtgttttgaaagtggttaaaggatgactggttgcatgtggagtaatgtgtacatgatgcacatttccagatggaaacagccctcaaagttccctatgtagtttgtgtacctattctactcatttcattagactgaactcagtactttctggccagtagagcaggtttttttctttgacaaaattaaatttggataaccttttctgaaaagcaatttcagtgtgtcatattgacatttatattgataattaattgtttgtggctgtcaaaagaaagtgtgtatctttgcttgaggccaggagttccagaccagcttggccaacatagtgagacgttgtttctacaaacaatacaacaattagctggacacggtggcgtgttcctgtagtcccagctacttgggaggctggagtaggaggatcagttgagcccaggaggttgaggctgcagtgaaccgtgattgtgccactgcactttagcctgggtgacagaaacgagattccgtctcttaaaaaataagtatgtatgtaattgtgtatgagctaagttactcttcctgtcacatttgtatggtagctacagtcaggcactgcataatcatctttcagtcagcgttagaactgcatataaatggtggtccaatagggttataatggagctgaaaaactcctagagaggctgtagttattgtaatgttgtagtacagtgtattactcatgtgtttgtggtgatgctggtgtaaacaaacctgccctgccagtcctgtaaaactatggcacctccagttatatgcagtatacctaattgtataatgataatagtaagtatatttgtgataatagtaagtatacttgataatagtaataaacaactatgttagtggtctacgtatttactatactttttattattattattttagagtgtactgcttttgcttctaaaataaaacattatctgtaaaacagcctcctgaaggacctgaaggcaggtccttcaggaggtatttcagaagaaggcattgttatcatagcagatgacagctccatgcctgttattgccccttgaagagcttccaggggacaagatgtggaggtggaagacagtgatattgatgatcctgaccctgtgtaggcctaggctaatgtgtgtgtttgtgtcttaatttttaacttaaaaatgtttaaatagaaaaaagcttatggaataaggatataaagaaaatatttttgtacagctatacaatgtgtttatgttttaagctaagcattattacaaaagagtccagagttaaaaaaataaaaagtttataaaataaaaaagttacagtaagctgtccaatttctattgaagaaagaaaatactttataaatctagtgtagcctaggggtacagtgtttataaagcctacagtagtgtatagtaatgtcctaggctttcactttcactcacactgattcacccagaacaacttctaattcctgcaagctccattcatgataagtgctctctacaggtgtaacatttttaatcttttatactgtatttttactgcatcttttatatgtttaggtatgtttagctatacagataccattgtgtgacagtcgcctacagtattcagtatggtaacatgctgtacaagtttgtagcctaggagcaataggccatatcataaagcctaggtgtgtagtaggctataccatctaagtttgtgtaagtacgctctgtgatgttcacatgacaacaagcatatcaactaagaatgcttttctcagaacatatctgttgttaagtgacgcatggctgtaattcatgcattaattggttacttgtaccctctgtttagggcttcaaaagtcagatctgtccatctaagatgcttttaagtaacatttaccttaaagaaatagatggttgattggtttaaagaaagagacagctgaattggacggggaagccagattttgaccatatttctaagaggagctgttctgtaatgttttggtaaaagaatgtctgtctccatatcatctatctatctatctatctatctatctatctatctatctatctatctatctatctaatttggcatctatttatccattaatctgtctgtaatacaaatattccaaacatttaaaaagtataagaaggctctgtagtgcaatggatagcacattgaactttttttttgtttttatattggcttattgcaattaaaaaaggtgcaaataatatatgtaccaaagaaaattcagaaaataaagaaacactgagaaagtgaaagactagggctcatattataaacacacaaaaaatcacttttaatattttgggtacatttccttgcaggcttttttgccctatgcatacatttttatccataaatgtaatcatcttgtctatgttattttgtagcaagcttttttttcacttaatacataatactattttttccaagtctttatagatattgtttttcttttcttttatttcttttatttagccatcactcagtgattggatatttagggtatttcatcattattttctttgaaaattaaataaaacaaaatttgatgaaaatccaaggtggcccaacacagtggctgaatatatctcatcagtctgttacattattctcatggaaatggaaaaacaacccccaaaactctgcatctgagaggagtatatattaagcttaaggaagtgcttatgaacagtaggaaatgagagttggtaaatggagtcattttatttcataaaggtgcctcagagctttaagcccaaagccctacactttgagtcactttggattttgtgcatccatccatgatgcactgtgattttgtcttacactgtgtttggtatgaagcattaaatcttcctccctttacagttttcagaatctgtgaaataggacctgagctaacctagaaaagtctctctgcttgtcgtttagtttttttttttttttgagatggagtttcactcttgttgcccaggctggggtgcaatggtgcgatctcggctcactgcaacctctgcctccggggttcgagtgagtctcctgcctcagcctcctgagtagctgggactacaggtacacgccaccacgcctagctaatttttttgtatttttagtagagacagggtttcaccgtgttggccaggctggtctcgaactcttgacctcaggtgatctgcccgccttggcatcccaaagtgctgggattacaggtgtgagccactgcacctggccttgtttagatattttaaaataatcttccaattctgagtaaatagtatttgtataatagttgtgagttgaaggcaaatagtttcaaagagttcagttcttttgtcttcaacatataagtcataaaaatgcatgattctccctgaggagccagcttggcatcagactctggagccagacagactgggtttatttcctgccccaccactttctgctgggtgaaccggagtaagttacttgacttgtctaggtgtcagttttctcatctagaaaatgggaataatactattcattcataggtttgttgggctggtttaaataagttaaaacacagtgttaactactactgttttcaacaggttcctaagggtctgtgtttctagcgctttagcacttcaatggcatttataatgttctgcattatctctaactgagtggtttttctatgagtatttctatgagtatttcttccccaactagtttatcatgatggttataatactggccaccatttttgatggagtattataatacatactctacatgtattacaaaatgtacgtctcattgccatttatgaggtatgcattttcactgttttctttttacaagtttagtaactaaaggttgtagaggttaagtaacttgctcaaggtcataaaattgctaaatgtggaacttggaactaaattccggtctggtgtatgtgccaccaccctgcttttgtaaattcctttaaggaagggacttttgtgctttttagatcccttacagatttcagcactgttccttaaacatagtaggtcctcagtaagttttttgttatgttgaatgaatgaaggtaggagtgatcctgtggataatagaacttttttctccaataagaaaaccaacaatattgctttttaatgacatgatattatgagtcttagaattctgttctgcttccatgttacatgtaagagtttgtaattatttgtgtatgaaactggttgtatttcatgtgaaacaaaagtacataccctgtatttgagactctgatttgagaaaacctggattagcattacacaagtaaccattgaagcaattttaatttaaataaaggatacaactaattctggatctgtttttagccatttatttaacagacatttattgagcatatacattgtgcaaagccctctgcaggggactaagggtttaaggatgaatatgatggtttctgtatgaaagaggattttatccaatatcatgggtttacctatgccctgatgctaatgacccctatatatctttaatccaactcttctccttttgccttcattattcagctctatgttggatacttccacatggatgtctcataggcctccaaactgaatttattatctcatccccagcacccactatgcctcattatatattacattcttgtacctgttatatatttcacctctgttggtgacaccactgtctaaagtaaccattcaaaccactgtccaaacttcaaccttcaaacaaacaaacaaacaaaaaaaccagaagtaatatttgattccttttttctccctaacattctacatttggccattcaccaatcctactgatttttttcccctaaatatcatcaagaactgtgaaggatttgagactttatcttacttgcaaatgaacttgcctgccacagttccatagatgctggcagaaggattcgtgggttagagacaaagaaatttattagtcatagcaatagcaatagccagagtatcaacatatttattcactgtttctccaagacccaactcccataggatgtcatgaagagggccaggtgacatccatacatgaagtgcattgcgttacaggagagaaactctgaacttagggaacccaaatcttttatattgggcaacaaagatgcttcacctttgctccagagggagatcatttcttccaaggctgctctccacataaacatctttgaaaagttagtctggaaccaagggcagccagtgctttgctcacaagatgtgcagaaacggaagggactcatggagaatgtctcccaacaaatatatcttgcatctgttccctttgctccttctttttttttttaatcgaaagtgccttactggtcctgcttccatgagtagcagtgaccaggggaaaagggagaggaaccagccagcacagggaggggtcatctccacaacattccatttatacacagaactgaacagcaagcatagagtcactattgtggttagaagttggcagcatgggaagggggaggaacaggttggatgtgggggtgttgttaaaaatataggcccctctccacaactggggtgcctggggggaatttggtttgcttcaacccaagaggaataagaagatcaaaagcagtttggcaagaccagaaccgtcagggatggagggaggaggaaaatccagggagtggggggatctgtttggcaactggagtgaagggattgccctccccctgctgggatccccccagcccctctggtctgggaggaaggggacggcctgcaacccccgagggcagatgtggggctgccagatgctccaggcaggtggccagaaccggctcacaaaggcttgtcctctagggagatgaccgcactgccccccagcttctctgccagggtgcagcggtccttgacctccttgtagcagtttgtgtgtaattcatgcttgatccctgtcagcttcttgacggcgtccttggagctggcatagatcattttgcttttaaggggagcagactcagggacccagaagataaacaccaggtcctcctccttgctctccttggtctcgtaggttgtgtcacagagggtgtagtggcagtccttatctggcagcatcctgacaaaggtggtgtaggggtcgtcgatggtctggctcacatcgcccaccaggatcttcttggtctcctccaggatgatgttcttcttgtcctcactaaggcagaagagcaccaccttcttgagcttcttcacctcctctggcattgaagacttatgcaacttcatgtcgttgaacatgttcatgacaccatcagacagccacaccagaggccatgtttccagaagtgaaaaggagagggcatggagagccgcagaagacaagagcactgcagccgctgctgggacccgactgcactctgttccttctttgcaccattagatcaggctgcacattgctcataggaagattgcaacaactttttagctgatttccctaactctgggtgggtccctcttcatattagtcctccacaccttgctgaagtagcctcctgagacataaatctgactcttccctgcttaaagccatttactgcctgcctattatctataggaaaggcccaagctccttagcatgacaccaaagggattttcagaccagcccttgctaatccctctagccttaggggggcagcatatcagagtgattatctcccttactctcccagtgacttaacctttgtagcctgtttcctcattgctaacattaggatgataaaacctacctcatgggttggtgaggaattaatcagctcacacatggttagccctcagtaaacgttggctgttatggttgtgtctttccactctctgcctcgcactttaagatctggctacatggttttctgctgactctgtgtcccttttcaccatggttagtgcctttattcctgccacccactcttcttgcaatgtcctccaaaccctgttgcctggcttcacgctggttaggcacatcctcttccttctcttggatgctccatgcatgtgtcggccattgagctgtaaatatctactaataagtcagttactgctgctagactatcaactttatggggatggggggtgttttatttatctttgtgttgctagcacatagcatgtgttgaaaaaaatggtgaatgaatacatgaaagaataaaaggaattcacagtctactagggtgtttggggtctagggatgaagggtggaaggcagctaagtagcttaataataacaggttagagaatctgggtaaagctggggctgaggtgagaattaggccctataggagtccagtgtagggagtttgcttgttgagtgtggtgcatgtagtgaggaagcctgtttaaagttatctcctcaatgaaataaagcagccccttctaggcaatcctaattactccctttcctgaaagaatatattgcaaatggaaggtcatgcaatctgccttcttgtaagatcttcaatttctcagaatacaatgaattctctattacctggaggaggggtagaaaggagcttctttttaattaaattgtctctgcagcagaaagtgactttatcctgccttttgaagtcttccagttgtcctcagcctggctcaaatcactctccttgaattcattgttacactagtgcaccctgctttgtgagttataatttaacgtgagcgtatctaattctctaatgagatggagactctttgggagtttatgtttttttccctgaaatgtttaatgtcatgcttttgaattaagaagggcttctacatatatttatagactggctgagtttctccatatatgtgttaagaactttcaaataattagagcacagcctgaatttcagaatgccagtgatcttctccagggcttcagcttccctgaaagaacagctactcagggcctattattaaatgtttaaggtatcattttttaactttgaaataaaaactgaaatatttggaaaatactgataaacgaacaaacaaaaaaacctgaactaaccctactagtagtagtggtaactactatacaatagtatttggagtatatctctgtagtctgtcttccttggctttgtgtctttgcttctctttctctttcaatgaatgaggtcatcttttatcactcatctggcaatctgctttcttctccttaacatcaatagatatttattaaaagtgatgatgctggagtatttcttttaggttcctgtttcaatccttgacccactgttttgccttgtttgccactgcctgccttttcttgatttctgtttgtctctctggattgacccattattgtgttctgatctctgatacctgcatgcatcttcatagtaacttccaacttttgggagtgtctgctgtgccccagatagttgtatgtgttttacctgctttaaaaatctcttttcggatagactggatatttgtagtctccatgtcacagatgaggaatttatttggtgtagagatttagtaatttataaaagatcatgaagcttagatggagcctgaacttatgtttttatactcagcaccccctctagtatgtgaaactgtcatctttagcttctgactccttctggaatactgatttttgggtgctgtgtctaatcagctttcagctctacaatattccttgaagggcaccgcaacccacaaccttgggccagcatagtgaattttatattttttatttgacagagagagagagaatgtgtgtgtgtgtgtgtgtgtgtgtgtgtgtgtgtgtgtgtgtgtgtgtgtgtttgagaaatcagcagctgtggttcttgctttcactcctcatggtgaggaggtggcctacccctcacatctgttttcagcccctgttcctcaataccagagttattttctattaactcaatgcaccttttctttgtaattcttgtcaattttccctccagccacctgcgcggtctctggcttgctctcaggctgtgagtaaattctttgtatacttgctgttttcgataacctcagcccaagacttaatgtcaaggtgggggccctattaaagatgccatgaatcatcttgtctttgtttgaagatttccgtgttggcaagtgggcagatagatgtaggtttcccaaccagatgtactggtagctgagatgggggcattcagctgaagtacattcctatcattatttggcaaagaaagagccactgagattaaaagcatgatccttgcttgtgatctggcttcatcaacggaatcacagagcctctgtgttggaaagggccttgaaatcatctgcaactgcgcggcttgatacttgagggaactgaggcaatagatacaggaagtgatgtaaagttataaatgccaaaccttcaagggacttttgacatgacgtaactctgcgctcttatgttttgggggaagaatagtaaggcctctagaagctcactaacactcctaatgcggcacagcgcgttactgcagagcaaggactctactgaccacaggcccaggacagcggccttggaggtgaagtcactaagggggatctgtaggatttggctggttacaagagctcacccgctatctcctccaggctggcttccgtgggcctctgttgaactatcagtccagtgttcttgcctctgtccccacagccctgcagaggtcttcttccacctgacagatggtgactgccttctccacagtggtaggagtgagggaaacagtgaggggaaatcaggaaacaggaagccagggagaggagcaagaggtgttggggctgtatgtgctggctccgtgccttggtgttgtgggtttctagagggttttaactttgtagtaaagacgggacttggaggaattctccctgtggtgggacaggagttttctccacagccttcacaaagtattccccgcaagaactactcatccttcacggtctacttctatcgtagcagttcagtcttctgctgtttcttctggtaccagcctatggattgggtaaggagaaagatcaggtttgtaaagagatctttctggtccttccagtaataaagccccttggacaagggccagggagattcatctcccagagactcctgtgctctaggtggtggtagaggcttcctgccagaaggatctgaggcagaggacgtggatggtgccatgctggcgtctctgtgcatctggcagcgcaacaaaggacttctgtctgccctgcgaggctgggtcggtaaaacccacttcaattgaaagccaccacactttagcaacttgataattaaaattctaatatgtgaattaaagaaaacaaggggctgtgttcctgccatattaaaatacagctgcagtgattccactattgtttcctttgacagagctgtggttttcctacacacctttgtttgaggctttgattcagatatactccctgctgctgataagtcccatgtgtctactcatcggttagatggtgcatggggatgattcttctgtgatgtggagaatgaaagatcgtgtcttcaagttatgtgaggtggctaagtgacatctcatcaagagcagagataaaaacaaaactcatggaaaaggtacttcctgagctccctttttgtttcctaagtgatttaaaacaataaaggccaaatcgaagagaaaacttaagaaccgatatagctgatacctggacttacggattgatttatttctgtgaacactctgggaaaatggccacttgtcgctctctgttattaataaagaggtcactttatcattaggcctttgaatctgtatttaatggctaaagcagatggttataatttctgacttggtgtggccaccttattaataaaaaagaactgatggaagcaaaaaggcgtcttcatttttaactccagaagcataacacaaatgctttccagtctttctttgtgtggagagcagaccaagtgactgcaataagatcctgttacacatttgaaaaaaagacttttgcagagtggaggtaactcagtttgaatccttcttttgttaaactttaaaagaacactataaatatatgcccctttccttgaagaaggtatttcgaaggaagcttcaggattatattttaaagtaaattaatattttaataacataaggaaactaaaaaacacctaatttatttcagatagtggaggcctgtggtactttctaaaattattctttttgcttaaactactataaactgcttttttggatttaattactaggcttagatgaatgtgccatgcatcttattttggttctttttaaattcacttggaattaaaaaaaatcaataatggcaaaaacgtctggtagtggatttctgcttgatttcatcaagcctgtatattcccctataatggtaaggagtttgaaatcgtggttatcatcctggaaattttttgtccccaaagggacaaacctacatttgtgaagacagaatgatttagaatcttaatgtactcagtaaaccgagtgaacagagcagaaaaatgctgggaattcttcacataggctcagaagagctctttaattcacttagataccaaagacttattgatatgtcaggctgtgggcggcatcctggggtctgttatggcaatgaattcctggtccttaggtgacaagaatgggatgagtgtgctatgcctggctctgagataaagaaaaaacatggaatgttaaggatcttaaagtctttacgggtttctttgcccactagttttcaatgttttttaattaatgatgcctttcaggctgtccatgggcccacgtttagaagtgttttgaatttcaaattattaatggtaattgttgttttctgttttcattaaccaaaggcatgtataacaacccattcagttcatttgtttattgatttgttcattaattcttcagtatttagcttgtatttacttttggcttggcaccatgccaagcacagggatgcagaggagtttgtgatggccaccagtcttatttaaaatgcctaaaatagggtcaggagcagtggctaacacctgtaatcccagcatttttggaggctgaggctgaaggatcacttgagctcaggagtttgagaccagccttggcaacatagtgacacctcatctctacaaaaaataaaaaaagttggcggggtgtggggtgggcgcctgtggtcccagctactccagagactgagttgggaaggtcacttgagcccaggacgtcaaggctgcagtgagcagtgatggtaccccacactacagcctgagggacagaatgagaccctgtctcaaaaaaataaataaaaataactaaagtgctccacaacagtggatggatttttgtttttcctaccatctcagattcctggatatctagaccaatccattgctaagccatcgtgctttgttttcttttttaaactttgaaatgttttaagtgtacagaaaagcagacaaaagtgacaaaacccatttcagatacaaatattttttatttgtttcagatttttaaaagaaataaaacattatagatacaacaaaagctcccagtgtacccctcctaaatcctgtctcttttcttctccagagataatctgtcctttaaatgtgatgtcttttcattcccatgcatgtttttatatttttgctctctgtgcataaatgcactgagtgctactaaaaatagtgctttgcctattttaaaattgtgtataaatgggaacttactgtacctgtcatacatcttgctatttttgctcaatgttgtgtttttggtattaaccttgttaatttaggaattgcatgttgatctaagaagttattttagttgctgtgcagtaagtatgctattgtatgaccatttcacaattaatgtacccattctcctgccttcatttttttgtgtattataaacaattttgccatgaaaactttgacttatctttctgtaaaaatgtgtgaagtttttctaggccaaatacctaggaatagaatagagtatgcatgtcttcggcttccctaggtgctgtggaattgctctccaacggccttatgccagtgcgagctccttcctacaggatataagttcccgttgctctttaccctttctaactcttgatattggaagtatttttagattttgcttattcaacaggtatgagaaactatcacagtttggatgtataaagatatgtcaagttgagtaaagatgttagagcaaagactggagatttttttttccttttcctcctgttctagctgtattgttctagctatattatagggcagatttgagtttctgcttgggtagaattatcctcatcaaagcctactttggccctaattagtttgctatacatccattgtacacagaacacattatgtacatttctaaggaattgaagagacaaagtccaaacttatagaacctatgttgggggtgcatagcaggagatactggggcccaatttacagtaggttcattgcactggccagtgaattcagggaccttgctctctatatcagcagagattgctgcctgtgtggttttttggttttttgttttgtttgctttttgtttgtttgtttgtttgagacagaatcttgctctgtctccaagctggagtgcagtggcacgatctaggctcactgcaacctccgtctcccgagttcaatcaattgtcctgcctcagcctcctgagtagctgggactataggcgtgtgccaccacgcccagctattttttgtatttttagtagagacggggtttcaccatgttggccaggatggtctcaatttcttgacctggtgatccgctagcctcggcctcctaaagtactgggattacaggcgtgagccactgcgcccggccgctttttgggttttaatgtccataaaatgagagattgcattagtcattccttcttcaagagcagattttcttttctgctttcaaaattccatgcttctaagtggcgttgacccttggtgctttaaaacgtcttaaaaatcactgatacttaattggtattgagaacagaggaacttaatgcaggagccaccactaagtgaagagcagttaaaaaatgctaagaagtcacctgcaaaattctaatctaattaaaattatgtaaaaaaagaccaccatcactcatgtataaagatgacagggaaaaattacaatgaatagactgtgggtgattattcccctcattgccctatttttctgttttccaaatcttttttaatggtcatggagtaatattcttggaataaaataataagcatatgcaaacaattataagctcatttggtaggaaaataagaatgtgatttatacaaaacatgtgctgggcaaaggggagaacacctgtatatgaaaaatgatttgtaatgattttgtaaataatcctataatccttccttgggttaagggttggtggatgataagtgtttttctttaggttttgctgctggaaagatccagggaagatggaagacaagtagactggcatcttacctaaaagcagtggcacagcaggtggtagaataatttgagcttcgctcattggattttaagaccaaaagaaaaggcagaactaaagagattttattcattaggtcacgtagatattcctattccaaaggcatatgacaaatccttcagagttgaagtaatcataatgcctacaatatattaagcattaaatatacatatatttttcaattctggaatagctgtgaatgtgggaataactgtactgactgacaggggagagatcagatagtttaagaaacttgccccatatgcacagctcatcagtggtgctgcctggactcagccaccatctgtttcactctgccggggcatacatgtatgtgtacccttgccctggcaaactcttccttttgtagagctgaaagcagccccctgcaactttcctatgtatttattctcatcctgccctcctgagcacccagccttagaagtctgctccctctttcgcacaacagcctttctgatcttcaaagagggctattgtgtccatttctccacttctcccctcttcggtctgtcatcttggaaaagctcagagaggtgtttttattcacagatgccttgagaaatttcatggtttttagactcatgctgagtttgtccagatgtgccaatatttgtcttatatgatacaaattaattgtccagaagaggaagaaacctttgtagacactcactaatgcaaaccagttcctttgagtattgatggaaggaaaaacactaaaaaatgaaacagatcattttcactgggagagtgtagttgttgaattcacattctacttttaggacaaatctgtagcatgacagttcagtcttaccacatgtattaaccatgggaaacctagggtgacatttgcaatagactcctgcttttctgtaaggactttatacagatggagaaagtatgatactcttacattttattaccaagttctgtggcccagggtttacagcataaggtggcaaataatttagctccactcagatttggaagagtaactattattattataagtaagatttaaacttagggacaggtacacactctttaaggagagttctaagactgagatgttgtatcattatcagtacctggcataaatatatgtatctgagttctctttgagaatcataagggaaaagatgtctaatatgatttaacctcaagacactaacaatgattacacctatcccctgctcccagcatcatagtcaccaactgtggcaacagctgctgctaatgttttttgaactcctgtggtatgcctggtgatgtactttatatcagctagttcattctcaaaacttgagaacacactacatataccctagtaagtactattgttagcctcgttttatagatgaaaaaactgagaggttaagtattctgcccaagatcatatataggttgggtatccctaatctgagaatccaaaacccaaaatgcaccaaaatctgaaacgttttgcatgccaacatgatgctcaaaggtgctccttggagcattcagattttggatttttggattaggaatgctcagctggtataaacgcatatattccagaatcttgaagacatctgaaacatgtctgatctcaagcattttgggtaagggatactcaacctgtatcttgtatatagtagagtgagagtctagcttatgctttgctcttatatcttgtttctttcttcagcaaaatagtctgtaaattgaacattaaacagtgcactggggacacagtaaggaatctttcattaccaatggagcatgaatgaaagtttccaaatatgaggtttccttagtgaaacactatttttaggaaaaactattaaaccaaggcttatgataaaggatcattccacatccaaatatacctctcctgtattagcataattctctactaaaatcacagctgaaattcattcactctaagagatggataaaaaccatacggtttcatgtaaagatcaccagcttcccagaactaggatgatgggaattttaactaatgctgctgtgactgtggcctagcctcttactctttctggatctcagtgggcccatctgtagaatgtgagcattggcctctgtgataatgaatgttccttctagctttgtatattgcatagtgcatgactgctagcttcaggaaaaataaaacgttttcaatggaaatatcagatcaccaacctgattccaatgaatttttttttattcactgaggctttatgtcatataaaaatatgtgacgtattactgctctgctgcccatctatttaaggcattcttcagtagacttgtcagggcttatctaaatcttagcaccacttacgtgtggctgattgcttggcaggaggaggttcctgcattttcttcctcctgtgtattagtgaattgaaatcaagggaaaaactgcttggctttctgcttccttccatgaaacagagctgtcagtcagtgctgaattagtgcctacctcatcatggaacatctcaagtgaactcaacaaagggccagttgaggcaggagactaatagcaggaagagagatggctcccagctgttcagctcttttaagcttgttttccagatccttccctcataaaagattcttacctgaccctcgatgaaccaatgaataacatcaccacgtctctgggccagacagcagaactgcactgcaaagtctctgggaatccacctcccaccatccgctggttcaaaaatgatgctcctgtggtccaggagccccggaggctctcctttcggtccaccatctatggctctcggctgcggattagaaacctcgacaccacagacacaggctacttccagtgcgtggcaacaaacggcaaggaggtggtttcttccactggagtcttgtttgtcaagtttggcccccctcccactgcaagtccaggatactcgtaagtacttttatctcctttcttgtcatttctaagtgtttctccgtggttttctagggcaaaagcaatgttgtcctcttcttaagccaaaatactggcttccagatgtcattccattttgccctgccctcattccattttgcttgttctctgctctaaagattcacaggagaccaccattggcagaattctcaagtgtagtaatgttgattctgaatgatcaaagcaaaaatcttccatttactgttttagaaggaatctaacatttagtggcaacaatggattgatttggtaaaatcaaacaaaaaatgatatagtgctggcataggaacctttactctcagggtctatgtttctgcaagcatttttgatgaattcattattgatcagggcaacaattaggtaatcactttattttttattccctttaaagaactcaaaagcagaagttctggctgggcgcggtg

SEQ ID NO: 2596 - DNA, 469 bp, Homo sapiens
cttttcctggccgatgcctcagtccttatgcaaagtgtgaacttggcctttacatccttctccgcagagcactgcaagcagccagtcccactggaacataagatgaagcttttgttcccatggctggatacactttggatcttggaatgcaataattacttcagctggatctggttcgtggagtacttggccagggctctgcctcatgccatggtcctacaagatatgtgaggaggtggacatctttgcgtagccctcctccagaggcaagtggattccttccataacccagagaaggccgcttgggaatgaggctgagaagccagactttttggcacacaaagaaaaagggagttttcaaagttgccgcaaatcatgcaggaagagaaaacaggacattagtggacactgattcttcccctctgctgaactctgagtccagtttaaatctttaataacataacacatg

SEQ ID NO: 2597 - DNA, 1146 bp, Homo sapiens
gctgcttgggaaatgagggccccattaacattccagtgcctctggctctagacctgataaaaccagagcattgtactgtgaatgtggacaattccctctccattcctgttattgctgctgagctggtcgtaaggaaaccgagtgagaagggaatgcaacagaagaaaaagaccaaagacctgggtttcagggctgggaaagaaagcaagacagaatggaggaaatgaggcctgcaggacatggcgtctcaaatgtttgcgtcgcctttaaagtagcctgtcacagctgccttccacgactcttcaatgccctcatcccttctccagatagaaatggagcagctcttcttggaggccaggcttcagctgatagcaagtctgaggccaggaggaaccagtgtgactccatgctgctcagaaaccaacagctgtgctccacatgtcaagaaatgaaaatgaatgagtcttcatcaacccaaattccagactacacctgagcctttccatgatgacatcccaacagaaagcattcactacagactgcccattctgggccccaggacagctgtcttccacggattactgacagaggcctacaaaactctaaaagagagacaacgttcttccttgcccagaaaggaaccaataggcaagacaacgaggcagtgagcggtaggagctcatcacctcccagactcccagagagaaaataacctcgccaagccaatctttgacactggcaccttctcctcacaattttctctcttctcccaaaagatgatttaattttgccttcctaagattgctggtattctagctcttacctctatgttctttctcacgtctcctaaagacaaaattgtttaatttacatgattataaagatctgtttatgaaaatggaacatggtaactgtctctcattttattttcttaaaggttcttctctacgttaaggtggaaaatgtccttctgtttctaagtcacaagttttctgtgaaagttatttcagctctttcttcaggacaggggccagagatggctccatgaaatccctcatgaattcagcttattaagaataaaggaataggctagatgtggtagcttacacctgtaatcccagcactttgggaggccaaggtgggtgg

SEQ ID NO: 2598 - DNA, 7124 bp, Homo sapiens
caccattctcctgcctcagcctcccgagtagctgggactacaggcgcccaccaccacgcctggataattttttttttatttttagtagagacgtggtttcaccatgttcaccaggatggtctcgacctcctgacctcgtgatccacccccctaggcctcccaaagtgctgggattacaggtgtgagccaccgcgcccagcccaaattgtataatcttgaattctcacaaattcgagatcttcccacgcacctctgtgtgtgtgtttgttttggtgtcccttaacactttccctgcttcatcacactgcccagagcttcccactgggaacatactctcacctccttaattcccatttcctttttcttacccaaacaggaaggagtagccactattcatgccattgtcaaaacctcatggcaacaaaacttccagggctggaattgcaaagatgattacaaaggggagctccacaatcaggtgatccagcattgataagctagagtcagatgattataagtccctggaatgatgatgccacaagatggaaggagtctagctacatgattcattgcatgggtgttccaagataatgaatacttccatagcaacaaaagtctgacaataaacggttaccttgattttcacattttcaaagaaaaatccctcaatggcaactagaccagaagtctcaacactgaatatgcaataatggctacaaggctgtctgcaagctgaggatcaatgaagccaatccgagtcccaaagctgaagaacttggagtctgatatttgaaggcaggaagcatccggcacggagaaagatgtaggctaggaggctaagccattctagtcttttcatgttcttctgcctgcttttattctggccattctagcagctgattagattgtgcccacccagattaagagtgggtctgcctttccccgtccaccaactcaagtgttaatctcctttggcaacaccctcacagacacacccagaatcaatactttgcattcttcaaaccaatcaaattgacactcagtattaatcctcacaatattcttcacaggaataaaaaaaactatcctaaatttcatattgaaccacaaaagacccagaatagccatatctatcctaagcaaaaaggacaaaaccagaggaatcacattactgacttcatattatactagttatggtaataaaacagcatggtactggcataaaaacagacacatagaccaatggaacagaacagagaactcagaagcaaatccacacacctacagtgaactcatttttcgacaaatgtgccaagaacacacactgaggaaaagacagtctcttcaataagtggtgctggaaaaactggatatccatataaaaaagaatgaaactggacctgtatctctcaccaatacaaaagtcaaatcaaatggattaaagacttaaatctaaagcttcaaactgtgaatctactacaagaaaacattggggaaaatctccaggagattagtctgggcaaggatttgttgagtattatcccacaagcgcaggtaaccaaagcaaaaattgacaaatgggatcacatcaagttaaaaaagcttctgcacaacaaacaaaacaatcaacaaagtgaaaagacaaactatttctcacaaaatagaatgtgagaaaatatttgcaaactatccatctgacaagggattaataaccagaatatgtaaggagctgaaacaactcaacaggaaaaacatctaatagtataattaaaaatgggcaaaagatttaaatagacatttctcaaaggaagatatacaaatggcaaacaggcatatgaaaagatgctcaatgtcactgatcatcagaggaatgcaaatcaaaactacaatgagatataatttcattccaattaaaattgcttatattcaaaaggcaggcagtaacaaatgctggcaaggatgtgaagaaaagggaacccttgtacactattggcgggaatataaattagtacaaccactatggagaacagtttggagattcccctaaaaacaaaaaataggacaaccatatgattcagcaatcccactattgggttcattccccaaagaaagcaaatcagtatatcaaagagatatctgcactcccatacttacaatcgccaagatttggaagcaaccaaagtgttcatcaacagatgaatgaatgaagaaaatgtacatatacacaatagagtactattcaatcataagaaagaatgtcattcagtaatttgcaacaacatggatggaactggagatcattatgccaagtgaaataagccaggcacagacagaaaagcatcgtatgtcatgttctcacttatttgtgggatctaaaattcaaaacaattgaactcatggacatagataatggaaggatggttaccagatactgggaagggtagtgtggggcgggggctgaaagggaagtgggaatggctaatgggtacaaaaatacatagaaagaatgaataagacataccatttgacagcacaatagagtgactatagtcaataataacttaatcatacattttcaaataacttaaagagtataattggatggtttataacttaaaggataaatgcctaggggatggataacccattccccatgatgtgcttatttcacatcgcatgcctatatcaaaacatctgatgtaccccataaatatatgcatgtactctatacccacaaaaattgaaaattaagatttaaaaatgtaatgaaatgctttattttatttttctggaaaatgtgattgtggctttagggggctaataaataatactcctctctttcctaccccaatagatgcaagaatctgatagagattaaagcatgaacattattgataaaagctagaatggaggatgtggcttaaatattcagcctcaatagatttcctaacagtttgctccatattgaattttcctacaggcagtaatggacaactgtatgcatttcctgtagagacactcattattcactcaataaatatttattgaatgtaaactatgggccagatactgttttaggtgctgaggattcaacagtgaacaactcaaagtcactgcactcagggagttcacattctaagtagtgaggagatcttgagtctgctaagacttgagtttggctgcagatctagaggaaagtagagttttggggggtaggtcctgaagaagatcagcaatatcttggaaggcaactacctcaggggaaaccattgcaggtgttttaggcaaagcgagactaacttcctgaggaagagatggtagggctctttcttctggtgaaaaaggcttggtgtaatttataggttcaagacaccagcttcgtcacaatctgcccatatgtcttgattccagtttctgagaatgccattccttccaatcaatgccgtaactttaacaaaggggccctgtgtggttgggcattcagttgacattgtaattcagccactcacaaggtgagaatgttttttctttcattttcataaacttcagtcctgtgcctacagaagataatggtttcagagtaaacatagaagattccaggtcccttgtgagaatgttgagctaagaatttaaagccctgagcttataattttctttccctaagttctcaggtattgttagaagcaaccaaccaactctatcttgctcattttcactaaaatattctattggtagcaaatacttgaaaacctgaaatgccttttataagcatttgattgcaggtatctaaaggagataatttgagtaacttttttggccatgaactaccacatgccatgaactactagtgctccctttaccactggagacatggtcattagtgcctttaaatctaatcagatcagagggccaatgctagaaaacccaaatccaattcagataactcatccttgagattctgttctctggaaccactctcagtatgcaattctgttatcaggattcagtcagagaagcagacccactaggaggtgtgtatctatatatacatctacctatgtatctatttatctgtctgtttgaatatctatctatctatctatctatgtatttatcaagacacttgttacaggaatttgatctttttttttattttttgaaacagtctcactctgtcaccaggctggagtgcagtggtgtgatctcggttcactgcaacctctccctcctgggttaagctattctcctgcctcagcctcctgagtagctgggattgcaggcatgcaccaccatgcatggctaatttttttttttttttttgtatttttaatagagatagggtttcactatgttggccaggctggtctcgaactcctgacctcaagtgatccacccacctcagcctcccaaagtgctgggattacaagcatgagccaccgtgcccagccggaatttgatcttctataattgtgggagcagccacacacagtctgagtcagattgttgtcttcatatctgaagctggaatatgaagtccgcaagacagtcactagggaagggacggtaaatgtaaatgggggcaaaaaagattaagctggaccccaaagcacaagatggaacccatgagaaaggactaaaactcttgacagttcctgttgcttctgactacagtaatatagatgtttggaagatgtgttctgaacatacacagccgcatacaagtttaaaatctaaaggaagatacaaaggaaggggagcagttgcaggcccagcaactatgaagatgagctagccagtgaaaccacatgtgagctacaaggtggctgatgttcccctgcattcttactagaatagaaacttactctgatagagatcttccttcctttctgcaatgtttctgtcaaaactacaattcatggatttcctgtattctacccagcatcatctctgaccacacagtatcacaacaaggcaaggaatttatttcatagcaaatggaagtatagcaattaactcatgcttatggaattcatgaaacttacagtgttctcctttattctgaagcacttgacttgttagaatggtaaaatgatcttttgaagactcagttactgtgtgagctaagtgacatattgtaagctcttttctccagcattcagtagcaccctaaatcaacaaccattatatggtgctgtttcgctcatagacagaatttataggtccaagaatcaagaggtgaaaatggaactgtctcctctcactaatggccttagtgatccatgagcaaaacttttgcttttcccccgtgactttaggtttagctggcctagaggtctttgttccaaaggatgtaatgcccctactaggagataaaacaatccattaaactgggagttgagactggctctcaacactttcagctctgcatgacactgaatcaacaggtgaaagagggggtgactgaactgctaaaagtcagtttctgactggtgaaaatagaggaattgaggttactttatataatgagacaaataggaagtttgttggaatacagaagatgctctgggacacctcttagtacattcctgagagcaaagtccatggaaaactgcaacaatccaatttaaacagaactgctaaaaactcagacccctcaagagtaaaagttaggaccacctcacccaggaaaaacatcatgaccagttgagggacttggttagggcaaaggaaatagagaaaggaccatggaagaaggtatggaaatacctgagactgggttatgtataagaaaagaggcttaatcagctcatggttctgtaggctgttcaggaagcataatgctggcatctgctcagcttctagagaggcctaaggaagcttacaatttattactataaatattggctatgctatgtgaccagttgtagaaataaggactgtcatagttatgaattttttatttttatacaaatatttttgttttattgctcctttaatcctttataatttaacgtaagacatgttaatagtggttgtctgtatttaagttacaggatatcaaagtggagtgtgaaccagccaggaggagaacgaataacacccaaagacaaaaaaggacttgttgtcttttctggggaaaggtgaagaaaggaacaaggtgttcagctaataacgtggtttgggaagggagtttgaaaagagaagataaagaaatactcatctaggagagtaggagtgtggatggactagaaaaaaggtaagatcgctgggaagcacttgagtttggtagacatggatttaaggacaaagcctatctcagtacatttcactgtggagagaagcaggacacaactccttcgtgcaaagtctgatctgaaaaaaaaaaaaaaaaaaagagagagaacagaaggagtagagccaaccatattcaatttcttcttcaaagaaagtggtcagataagtcaacctacttccagtacagagaagaaagccaaaggacagggaaaagctggaagtatctcttttctgggctttttctccttgggaatgaaatagttgaaaatgtccttccttctatgaaaacatgaaaaggaggggtaggtgtccccctaacgtgtggcatcgtttaataaggccccaatgggatatgcattctgcacactgtactacaggatttctttaaaatacttcttaaagaacccatccaattttatgcaagtattcaaaagtctctaatgggattcattttaattattgtaacagaaaaagaaattcttggtccccaacatggaaatccaagatgcaaggaaatcataggctctggtaagtgctttccaaaaatatatgtgaattttttttttttttggctcagttggagttacctgattcataggtcactagcagggggcacgtcattgtgggtcccttcagagactgtcctcatgcattcatcagtcacacttccatatgttaagtatcacatagagctggagctacagtacaagggaatttgaacacaaaggcctgaagttgaaagccccaaaactgaaaatgctccaagtaatccatgactcaccttgtttgtataattgcaacacacaaacatacaagttaatcctgtctgg

SEQ ID NO: 2599 - DNA, 4596 bp, Homo sapiens
attcacagctctgtagtccggggctgggcgcttcctctctgggactgaaataagagcgctctagacagatcagccttcaggataattccttcagcagcaccactgtaacagagcctgagagaaggggagagaggtgtgccaaagtgtgcatctgcaggccgaagatgaggcctggacttcctgctccaggtgcacaggtgtgacgaagatccagtctctctacatgaagaccagactgattgctccagtctcagagatgaaaacaataaagagaactaccccgacgcaggggctctggtagaagagcacgcgccgccctcttgggagccgcagcagcagaatgtagaggcgaccgtgctggtggacagcgtattgcgacccagcatgggcaacttcaagtccaggaagcccaagtccatcttcaaagcggagagcgggaggagccacggagaaagtcaggagacagagcatgtggtatccagccagtcagagtgtcaggtgagagcaggaacaccagctcatgagagtccacaaaacaatgccttcaagtgccaagaaacagtgcgacttcaaccaagaatagaccagaggactgccatttcgccaaaggatgcttttgaaactcggcaggacttaaatgaggaagaagctgctcaggtgcatggagtcaaggacccggcgccagcatcaacccagagcgtgcttgccgatgggacagattctgcaggtaagatacagggctgggggttgtcccaaattgtactctcaaggtagttcagtctcttgctggttcacactcagcctgagcccctgagggaaaacagtgcctggggcaacatgaaagcccaagaggtgcttctgagttgcccaggagttgctgagggggagcaggaaggattgggatttgctataacatagacctgtctagatgcggccaagagtcacacttacacaaatgggtgtcatttgtgtaaggtgaaagtacccatcacaacatctagtcttcattttcccatttggtctcctgggacaaatgagtgctatgcttattttatattactggacctagataacctgtgctgtcttgaaattcttctttttgatgtgttgaggatggggaagtttccatactgctacttcctttcctgttaactgcttgtaagatgatccatgcatgcagggaaagtgggggtgagtggtccactgacagctcattctgatcctgtattgtcttgtttggtttccatttttttttttcattaatttccttgtcaaaaagtcccaaattgagtctcaattttctgttagtctctggctttaattccggggatggtagattggctagccaacagcaggcaaattaatgttcccaggaatatttggagaggaaagaaacactgatttatataagtgagagcacagcttatgttttctaacataacaaagaggtcacaagtttgcagactggtttccagataaatggtagaaataggcttagggagcattcttcatgaaaggtccttaatctctaggagttgaaggcaaagatttacacaggtaatctgtttcagtaccattagcaattgtacattttagatactcctgttgaaagcagaccccataaatatatacacctactatatgcccaaattaaaagtaaaaataaatgaacaatttaaacaaattttaaagaaaaaagaaagaaaacagacccacatagtctaagcaggtaaatcagtactctccagtgctggaatgtgtactaataatggtggcatataatagctactagtagtagctactatcattatttaaaacattctatgatcctggcactgttctaagcactttttgtgtattatattaaatacttaaactgacctgtgaagtactaccattcttcataagacactgaagcctagtatagcattgctggtgagtggtacattgtttccctatggatgcaggtggccagttggctgtctttgttgcccagtgagctctcctgctctgttggccattatgtttggatgagtggcaaataaaattgaacaggagccaacgtcaagccaattagcaatttcagtcagattatttagacaacatcccttttcttccctcaacaccagattccactccctgcaaacagacaacatatttaatacaaaacacataaagaagtctcaagccaagtacaagttaactgttgagttatttgatgatttggattaactatacaagtttctgacaaagtgttcagtaaaatatttgttgcatgttggatgtggatatattttttcttcttttcatcatgacttttatgtgtcttcccaacaattaagaatagttttggattttctaattcggcatgggcaagattttgtacaagcttattatcacttgttataaaatgaaaataaatacagggtttatgtagggattgctcacacggaggaactagcaatgcattccatgttaaatatcaaatggcagagatgtgcagaagtctctttagagaggaggcttgtgggttgcatgctggattttccaaaatgtagatgaatctgaaatgtctcagatctcccaagagagtctagaaaactagattgtagagacatctagaaaactgatgtttccagggacctaaggagtctcttcatttggcagggatattgccaaagtgacaggcagttgtaaggtgcctttgtgacttaaattatgggatggtttggtctcactgggttcttagatgcactcttacaggaagaccatgcatttttctaatcaatgagtcactcagggaagaaatttatgctcagatccatggttcttaactcagggatggatttctagaatgatctttggacaccttaaaactttaagttttttcatgttagtcctggtgagaggatggttgtgtaagatgaacacagatggccatagtccataaaagattatagtaacttataaacagttttctctttcttaacatctagcattatctctgagccttacatgtatacaaatattcaaatcataattgttataaaaattcaattagtaatttttgatgtcaataacatggacaaaatccgtgattttgaacacggatttgaacatgtgatatgaacaagtgattttcataagaatacctggatataatatgctgtcacttaaccataaatagcaaacattcaaaggataaattcatgtgacctagtgggtttcaaattcactatagacttgattggctttaacttgggtttatgggttgccaagatcagttccacctagtaagagacttgacatgctcccctgtcctagacaaccagttgtaaactgcatatgcagcaagaacgcatttcatggtacccctggggacactgtattctagatactgttccagaaccttcttacagatcataattaccaggaagcttttccaatgtggagattctctggcatcctctctagacagtctaggatgaaagtcctggaatctgtgtgtttcataaaccctcctgaataatagaaccacactattcaagtggacagtgtcttgaattgggagataatgtcaagttctgtctgactctgctgtacctcaattttgccaacgggaagaggctcacagatcacatgggacttgtaactcagggtctgtggccagttggctccatctgcttacttatttcaggaggagaaagtccaagggttgggagtgagtgggatggggatataggcagatttgaggaatagagggcccttagggaaaaattgatggagaggaaattggctgcaaggcagcttggggccatacaaagggtaaccaactggattggtttgcacaggattgtcctatttttagcactaaatatcccacatgctaggaaatcttcactcccagatattccaggacagttggtcaccctacttgtaggttgcaaaccacaacctgtgagacagaagctgttatagactgagtctttgtgtttccccaacaacttattaaaatatatgttgaagtttggaggtgggaccttgggaaggtgattaagccatgggattagtgcccttataagagtacagaaagctagcttgccctcttccctccatgtgaggctgtaagaagtcagccctctgcaagctggaagagagcccttatcagaagttgaccaggctggcacctgatcttgaacttctagcctccagaactgtgagagataaatttctgttgttaataagccactcagtctatggtaatttgttatagcagccagaactgactaaggcagaaacccacataataggctcaaaatacctctaactctatcaatatcttcttacagctgaagcaaatatttccagcatggaattagtaagcacctattctgatgtgattgaacggaaaatggaatgaggattgtcttttccactgcttatgattttagagtgtggagaaggactgttcatgttccacatgactcagcatagtagcctttgttctgtctgaccaaggatgattgatggtttggagttttagcaaaaactgtcaccagaataactgcacacctattactaaaaataataattcca

SEQ ID NO: 2600 - DNA, 6299 bp, Homo sapiens
atctggaatgcattgcttgtggctttgctgtctgctgcaggctggaggagcttaaaagcctttctaagtagctgcctgtccttttaggactggatgtaggtttctgcctctctttttggccctggcattgctggccccaaccacattcctgattgcccgggaagaacagcctttgaaattcaacatctgcttctgggtagttggtgagtgtcctctctgggcccagacagcaggatctgctcctctctacttgggaaacttttaaatacatttctgtttgcaggttgaacaagcccacctgaccaagagagggaagcacgctaactgttttcagtttggacactcttgggggctttttagtaattgcatgtgtttctgagcaagtgagtgtcttttgtgggtaccagacaacaggattgctcctctcaactagggacagtctgaagaattttggtgtgcaaattcatcaagctcaccccatggaaagaggaagctccgctgtttcagtttggacactcttggggtttgttggttgctgcagcacttggattgtattttggtgattgtttgtgtatgtcaatatagccatgggaagtaagaatttgataagctgataatcttatgtaatactgtttggcctcatatctttgaatctggataagtttggcctctccatgtgcctcgttttgctgctgaatggcaaagcagggtggagttttgtgtattcaggcttttatgctgttgttcaaagcaaggtcaggcttgattagtacatgatgttcttctgtggttttttctggctccagtcatccttggagtgtggagagatttagcctttaaaaatcaaaatgccacagaaactgctatacccaaaactttggttcacaaccttcattggattgcctatcaggtcaaaagaagtttagccatgtgaacgtgttcataagcctgtgagtttgtattggtatctcatggctagagttccaagcatttctgctgttcaaattctctctgcatttcatgacagcatctacattcaagattcccagaggcaccatccacaaagctctacagcatttagatggagttgcaatttgtttctaagacagaggacaagaaatatgaagaagcctttccctggaggctgatccacgtgattcaggagaggaaatgtttagagttagaaagactccatacagtgcctagctccagataaggctcatggttctttcacagttatgtgtgaatatgaatgtggcttttatatatgtgggctgctttttaaatgaaaggtaattttcttttttatcagtctgggagacaaaaaccaatggatgtgtgaagtattggagtgatgttaacaggagccctgagtgcactgactgtccgccttgcagtcccacactgtcggcctagagaccagaggaaggatctaggagcagggagagatctgtggctcctctttgtattccctctaatgaaggtgtgaaggttagaggaaaaatactgttacccaggtcattgaaaataccacaggtaattttaatttctactggattactgtaattttgttttcttttttagtttttagatttttttatcattgactcttgcttttttattattaatagtcatattggctacataaaatgtataacaaacattacattatttagtataatctgtaataagctatgtaaaatgagaactacatgtcccttaagagtttaaaagaactttgagtaaaactgcatttctttgaaaattttaaggaaaaaaaaaagatattttaaagttttacaaagtgaagtccctctaataccaaattttctttgcagtctcttagtcaggatagagttactgagcctctatttcagcattctagatccaaacaaaaagtggcaatcacctctttgattgatgatttactgtattggaggactttgagaatttattttaaaattaagtatatccaaaagataattttatttatgagaactgtaaatatctgcagacattttctctttcctattctaaaacttactaaaattttagatacaggaattctctgttgaaaaaaatatatatatgtatagatagatacacacgtatatatatacgaaatgtgagaaaaaatatatatatatattcctttgatggtctttaatatttagtttaaaaactttaaggaaatcataaaacttttaaatttcaactctctctaagattatatgggcagttaagtttaaatatagagcatatatttcttcagttaaaaggaagtgtgtatttactgctgttcaattagaaaaagcaattaacacctgcctaatcataagctacactgttttttatgtttagattttcaaaatagagcttgcccataaggacatctacctactggggaacatagaattattttgaaaagtttgttaagaattggctgattacttgacctaaggatttaattcagcatgaatacacaaaagaaagaaaatgtatatttgcttgtgttcaagtctgaaattaagctttggtctacggttaaattaatacagccctgagaacaccttgtcttaacttcctaaaaattaattttgagaaatagatttaatagtaccaaggtacattgttgttataatgaagaaggcgagaatagtttttattaccttaattgacgcgcttttataaaacgtcatttgcatctggattctaaagggaacgtgaattatttttgcacgattatgatttggagtaatattgaaatattaaaaaaattcatccttttattcttaattgaattccaatgcagtaacttcaaaacaatggaaatagcatgaggccagaaaggggaaagggagtagttgacactttgcataccaccagtaacatggaataggagggatgctacaattataggatgctactaaatatgaaaatttattcattaattcagcatttgtacactgagcatctactatgtgtcagctatcaagtatgtaatgatgagcgaagaaaaaaaaacaaaaaacaataatcaacccaaaaagtaatactgtcatgtagattatagcattaagattatccaaaacttaaacattctacaaatagatgtgaaattaattacaagtgttaaagtgttattactgctacaaaagaaaggtaatgttttgcaagatcatagaatagtcaacttaaccttgtagaaagatcaaggaagtcttcccaaggaattaaatgatactttcattatctttgctttacctgtgaagagctgaagtacagttaaataacttgctaaagttttcacaactgctaagtgataaagacaggactgggatccatgcactggtgccagagcctacaatattaacccctctaatatactgtccgccactgaattccttactataatgtcaagagtttattaggcaagcttcatcaggttgactaagcaatggtcatcaagggaacagtaaagagaggttaggagagaggaataattagaattataataactcaaatatgcagcaacctcacgaattaggaaaggaaaagaaaaagaaaaataaataaatgtataactagccttgaatctagtttatggaaataagtagttttcatctaacagtctgcataggaaactacataagctcaattcacagaatgaagataaatgattattaaaaataatcctcatctatgacagaatactttgtgcccactcccaatcatatcatttaaagctaaattaccaaaagcatgtcatttgtctttgaatttcaggtttattaactgtataatggcaattgaattacctttcctggaattaaaggtaaacagtcttttccccacattattctgaaattgattttgctttgaagataacatgtacacttacattgtgtttctgtttcatgaaaatctattgttaatgctaaatattttaaaataatgttttcattcattaattcaatgaatacttagaaaattctattgaagatactggacaaaattaagagaggcataattttggagcttacattctataggaggagaaagaaaattaacaagtagaccaagccatgtataaatacaatttatgtttataattgaatatggaacatgcagaagccattctcaaatggataactctagtctgggtggaaatcaaacatttcttgcccaatgtaccaatgagactgtaccataataatgtgtaaatattcctaatataaataatagtataagtaatatttgcttcagtgcttcaatttcttaatcaaatacactaaagaataattgtggatctttaatttctacattttacatttactttgctgaataattattatatttataatattaccaatatttaataacctactctactgtagtagggcttctacggtaggaaagctaagattgtaaatcctattataaagttttgtttttcccttaagcaaaacaactcctattttttttgtgtaaactcatttttctacaataattggatgttttaaagagacatagttattcttctggtattttctattttattttttcactgcaaattcatcacctcattctgttgactggatcaaatttattattaatgtatcacctgggctgtcagtaatttttaacatgtcaatattttccagtatttctagtaagtatgctttaccagaaacatacatattttatagtttttctttgcttcttaaattttcctttatttattttcagaagtctttgtctttcttttcactgagaaagtcaaccatggtttatgggtcagcttaattttttacttaaaggaggtctttcctaattacctaatttaaattgatatccactcagattgttctgttttattgtatcctaatgttttccttcatctgtcacatttcaaaagtattgcttatgtaagtcctcaaaagtattgcttatgtaagtgttttagcatacacttttcctaccacttggagtctcatggtcccagtgactacgtgggttttgttcactgatacatgcccagtttttagcacagtgccttgtacagagtatgaaatatttttcctgtaaagaaatgagtgttggatgttacagtctgtgataataaggaaaatcctgcccttcatttgttactttctcttgcataagaaatacttcactattatttaccttaattcttatctcaattctaatatgcatgctggtttgtgccattgctaagctcttttaattgcaaaagacaagaatatttgtttttaacagagtaatttgttatgattccacatcctccaacagtgtcatggtacaaacataaaatataatagagaacaatgaccaacttttatctccttattctagtttttatctccttgtgaattaattttagaactcaaaacttagataaaagtatctatggagatttcttccttttcattttactttacctaattttattggcttgaaagacctcattgtgcttaattaatatcagtgatcaaatctattatgttcactttcactatgtaggtctttaaggggtaccaaccactcaaatagtcaaaaagtccatgtataacttttgactaacccaaagagttaactactaatagcctattattgactggaagccttaccaataacataaacagtcaattaacacatattttctatgtgatatgtattagatacagtattcttacaataaaataaactagagaaaggaacatattattaagaaaatcatatgaaagagaaaatatgtttactattaagtggaagtggatcattacaaaagtcttcatctttgtcatcattttgagttggctgaggaggagaggaagaggaaggattggttttgctgtcccaggggtggcagagggggaaggaaatctgcatatgaatgcattcatgccattcaaacctatgttgttcaagagaccactgtaaattaaaaaggcatcagattttttccccttgtttcaatcttttctcctatgcctacaaataagatgtgataaatgttagactaagtgatctaaataacatgagcactggccaaggatattacttataacatgtgatgaacttacacacattttaaaaattattttgttttactctgtctgagatttgattgccacttcaccccaccccctcaccttaaaatgcttgtaccaagggaactggagtcagggaactgaaaagagtaaagtatagaaggaagaaaagtcactctaagagttgttgttgttgttgttgtttgcttatttgtttgcttagag

SEQ ID NO: 2601 - DNA, 346 bp, Homo sapiens
ggtgtggagaggagcctccccagggtctgcactcctcctcccatttgcagccttcgtaagtggacacttccaacccctacacctgcctgtcctcccagtccagccttggcccgagatgtgatctaattctcactatgctgctgtgggcagagcacatggcatcagaatgctaggagctgctgtcgggcgccatgggagggaattccccaactcaggaaagctcttccagcggaaaggagcaggtggcgagcctccctgaagagacagacactgccaacgctacaggcagagccaatcgtggggctggagtgcagttgtgcaatcacagtttgcttgcagccttgac

SEQ ID NO: 2602 - DNA, 4436 bp, Homo sapiens
attgttgaccaggcatcgtgctccatcattaaacacattatctggtttatctttacaacaggctaatgagttaggtattatgcccctcattgccaaaattaggaaggaaactaagacccagaaggaatgattttcaaggccacacaataaattgcagaatttggtttccaagtcagtctgaattcaaggtccatgttcctaaccacagtgttttgctgcaaacaaacacagttcactgggataagtgcagttatggtggcttgtacaaaatgttctgtggtagtacaggcagggagtgacagctttagcctgctaaacagtcaagacaggcatcacattcaagtaacgttagagctgagcctgaaggatggacaggattttgcaagtggaggtggggagaagagttttctgggcagagagaactgcgtacaaagacagaagaccctgaaagcacagagcttgtagttgggggcccctgagcatctggaagagaggacaggaaatgaggcaggaacagctgaagagcatcttctccagagattcttagattggcggtgctggacagcaagtgaccagaagagaaacaagtggtaacccaacctgcatgaagaaaattcagtagaaccttgctggtgtagagaagatggcacaaagaagagtgagaacacttttatgaaaggcttaggaaatgttgaagttttccagttttcttcctatgtgaaggaacatagtgaagggggaaaggccccttttttgcacatacctgtggagggtaacgctgtgtgggtgcatttagccctaatctctgccgtggatcaggatcgttggttgtggaggaggaagaagagagggaaaggcttgaatacttacaaaagattttgagagcctaaatgatgaaagctagcagttctacagtgtttactaagtgcaagaaactgttgtaagagttttgcatatattaactcctttgattcgattctaatgaccctatgaggtaggtgctattattatcatctccatttcacagagaaggaaattgagacacagagagattaaataacttgaccaagatcacacagctataatagtcaattgtggagctgggattcaagctctggtgtctgctttcagattcatacccttacccattaccctgtactacccatctggaatgtggagaacgtgctgataacattgctaataatcatctgtcgtttatttctgactactctccaatttttttaagagacctgtatctaacctttggtgataactaaactataggagaaaacttgagttctgatagtaagaaacatttacaaaatggtctgaaagttgatttgaagtcgaaaacccttatatgtgtttgtaaattctagagaagaagtggcagccaggcagatgagctctctgttctgtgcagagctgatggtactccctgccctggggagccggcactggcagcgattacatcactaagtcaccctccatactcagctgcttgctaagaattaaattgctggcaccagatctggtgagcctcatgttaccatggcttgtttgtggagagcacattagtgtgatatgttcagtcttcagaaacagttaaacatcagctttattaccaaaaagatagtgtatgctggtattactcctggttattcggttcagctcctcaagtgaacagtcccacacctatttagcccattgagtcaagctgacctcctttcccggttacgggtttgtggacaggagtgacaggcgggttcacttgcaagggagccagagagccgctcgtgcctctgctgccctctagaggcgtgtcaggccaaggccgctcatctctgagccttgccggcggattgcaccaccagtccaccttttgtctcccttttgaatctccactgaacaccatttgtcaaaagggttgaggcaaaaccactctgagcttccaaaacaataataagacttaattagaattccaagctaagccattgagagttgctgtttatattggggaagatgtaacacttcagtcctgtgtttttcagcccctacatctcaaccatcaaagggaaatgagtcaaggttgttttaaaactataaatagagctaacacttacaaagcaattgccacatgccaggtactattctaagcgcctcgcatatgatgacctatttaatgaggtgggtggtatgagcatctctatcttataaataggggaactgaggcaagggactgtaagtatttctcacagttcatgggtggtggaactggctttgaagcccggtagttctggctccatgaacttggcttataatcactttactgtacggcctcttttatagctatcgaggcatgcattgcaagtccaatttttaggtaaaggttttgttaaaaatctttaaccttaatcttgtaatgaggaaacaattggcccagaccctttaaaaatgtcaatgacgtaataaataaagaaggagaaggaggaggaggaaggggagaagtattttagagctatgacaactaaatataattcattgtccatggttagaccctggatataaagagacaaaactacaaacaatattattgggaaattaggaaaatatgaatatgggctatattttggataatcatattaatgttgcatttcttgagtatgacctcttattgctgttatatagcagtatgtccttgttcttaagtgatacttgaactatttaggggtaaaatatcatgatatcagcaaattactatcagacaattcaggaaaaaaatatacctgagaaagaaagagaaagcaaatgtggcaaaatgtaaaataattaggaaactaggtaaagggtatatggtgttcattatgctatttttaaaacttttttctaggtttgacatttttagcataaaaagtagaggcaaaataattacttatttcagaataagaggtagccatggctacacccaaggtatctgcctggacaccacaagtggtacaaataagcaaagtgtgttagttgggaatccacaggcaagctttgaaatctgtagacatatgttatatgaaagtgtatgagatattacatcttatttattcatgtttttccattagtactaggaattacatgcatcattatgtattttcaaaaaagatcaagtttccatccaatagaaaataaatagtgcaaattacaaagtcttgtatgaaactaaataaggtctaattgtagtcttgggattattctgtttttatcatcaacaaataaggcatttgtaggagagtgcctgccctatttattcagcactgtgttccaggtactgatttagtgctggggatacaccagtgagcaaaccaagatctctgaactcatggtgctcgccttctgatgggacagagagacaaatattatagctcagtaaactgcagagaatgttagaaagtgattattgccaaagaaaagtagaaaaatagagcagcatagtgggaaattgggacaggcagttgcagagaagagggtttcagttttaaagaggatccccagggtaggtttcatcaaatatgacctcatggcacctggaaggaaagtagaagagaacagagaagaacaaccctaaggtgacagcatgcccagagtatggctagagctgagtgagcaagggggaaagaggagaaggatatgaagtcagagaggaaatagaggatgagttcacaaaggtcaccatgaaggctttggttttcatgctgagtaaaataggaagccactggatgattttgagcagaggagtgaggtgatctgacttaacacttaaaaggatcaatctcgtagggggacaaaggtggaagcaacatctcccgttaggagcctattgcaacaatccaagcaagagaggagagtgactcagcacaggctggtagaattggtggtggagagatgtgatcagattctggatattttgttggtagagccaacaggaaggatttgctgataaattagatgtgatgtttgagagaaaaagacaagggtgactcaatatttttgtccagagcaactggaaaaatgaagctgtcattcccacagatagggaagactaggtagagcagattttgagggagaagattaagagttcagttttggacatgctgagttacagctgtctatcagacatccagatggagatgtcataaaggtagttggatatagaagttttgagattgtagagaggtcagggctagagatttaaaactggtcacaattggtgtattgatggtattcatagccgtgagcctggataggatgaccaagacagtgagtgtggatagagaagagaagagtattaaggaatgtgcccttgaattcttctcttttattgtttatttatacttgttatgtttctcattttgtttggaaaattattacgctgtgtaaaataaaaa

SEQ ID NO: 2603 - DNA, 2409 bp, Homo sapiens
ggggaggggagagagccaggaacctcccgctgcggtccagggttgccacgcggaccccagaggttcctgaatcgcactgagctccccggaaaggaaaggacgttcccagagttagagaagaacggagagcaaactgaagagagaccccgttccctttagcagtcggctggcctgtttctccatccccctcagccctaagcaagcacgaatctaccttttgtctttattctagacactgcatgactgggcgttcatcaacaccaacatctttgccaggaccaagatagaccccagcgccttggtgcagaagctggagctggacgtgaggagtgtcacttccgtcaggagaggtgaggcaggctcgagtgcacggagcgtcccttccatcaggagaggtgcagaggccaagaccgttttgcccaagaaggagaaaatgaagctgaggcgtgagcaatggttgcagaaaatcgaagccataaaactggctgagcagaagcacagggaggagcggaggcggagggccacggtggtggtgggggacctgcaccctctcagggatgccctgcccgagctgctggggctcgaggctggcagccggcgccaagcccgcagcagggagagcaacaagccccggccctcagagctcagccggatgagcgcagcccagagacagcagcttctcgaggaagaaaggacccggtttcaggagctgctggccagtccggcctacagagccagccccctggtggccatcgggcagacgctggcccggcagatgcagctggaagatggcggccagctctgaccagggcagcgggcatgccacaactcctcaggacacatgtgggccaagtagagagcgccggcccctcaaggaccatggcctgagcctggtggacgcccttccctctggtcggttgtggggctcaataaatggctctgtgaacttcccctgcactgccagggccgttcccatgagctgcttccctgattcacagggctgggcacaccctgggacagctgcccccactctcctcaggacaacaagccacatccctccactgggggccccagcccccacgcagtcagggtggaccgtgcacagggtttgtggggactgcagttgtggaggccccaagtccgtccctgagcaggcgctggtgcccacaagatagtctgctggctgtgttgggaaggaattgtgcctgggtgtggccccagctgtgccaccagccgccctgatttgcttcagcctcagttcctgctgcggccctggtaggatccaggagcactgaggcctgcaggggctgccgtgggggctggctcagggccttcaccacctgggggtctgtttcccttccagtctcccctgccatcctcagtgaccagggacacagatggccctggcaaggcccccggcctgctcctcgcctgtgggctgcaccccccctaccccacccgttgccctcaccctacccagctgctccacacccaggcagcccactgccttgctctgggggcggagagcagagggtccttctgcagggaggagacgcggagtgggcccagccctgaagctcttgctgacccggaagtgagagaggtcctcctttgttgctggaagccctgggatttgggggttggtttttggactgtgaatcagtgactgatcagtccttgttttcaggttgtggaaagcaagggggtggtgcgtccccaggcccctgaggcccagcttggctccccctgcccgagctccccccgtcccagggccctgcagggcctcgctggcccatgtcctgcagcggggctgggcaggctggatgtggtggtgtaccccactcagagtgtctgggaagtgcagagcaggaccactctcagctcccaggcgggggcccagcaccctgagccttcccaggctgcctggggtgggggtggtcccagggactctggggcctcctggctccagggcatgtgggtggcccctatgcacagcccctcttgttgtgagcccccatgatccgacctcctctggccttgctgcctgctcagggttcatagccccagcagccccgccaaggatgcctggcgagtgggtggccgaggcaagttggagcctgtgtccctgctgttcagtgtcctggcccttccctgacacgagcagacacggcatccacagagacagcccggacaccctccaaggccccggccgatgggacagacgggcgtacaggagccataggcagcagatcccacgctccctcggccggggccagcttggctgcccagccccagctccttagagaacgggcttctcgcttcagaggagctggtcacaaaccagtggtcgcgacaaaaccattcctgtggtggagcgcgtgtggggcgcgtgtggggcgcgtgtggggc

SEQ ID NO: 2604 - DNA, 4517 bp, Homo sapiens
gcagtttggaattctatttgtcttgccttatttgctttttaaaaatttctaccttagttttttcctggtttactttgagtgtttttttgtagtcggaggagattgttggtgcggctgggtgtaggtatgaggcagaggaggaagagtaatttattccatctactgagcctttcatttactttctgttttagcagtagagtgggatgtcggaagcttttgttgggtgagagtcaatctgtcagggtaaatcttaaaaagctggatttgtggtttagttactagttactgtgtctccagtggagacaaagattagtttttaagatttagccttaatggatgattcacaaattgcaatgcagagtattgaagttaagtccaaggtcaagcacacaagtgggtaaaactgaacatatgaaatgggtgtgtggctggcacccacctctgacctttactgaaataaatgaggaagacggtgctgtaagtggaatgccacggaccaggagttaagaccagagtcctctgctaggccctgcatctgaagtctgcagagcatggcttttcattggctcagtgaggagttgagtcctggttcagaaaaagttaccgaggtctgtaaaagtcagtaggataccggaacaagaaagagtgggagagtgtacagttcccagcgaacattgccagtggaggctaattttcaccagtgaagggcgattttgatagaaaagcacagtgtctcaactacttgtggtttttgattctgaaagaggaggctttggcaggagcaataatacacgtggcctaccacctgtttggctttttccccacaggttgcaagctgcagggagggccttgctaattctagtacctccatccccgaatcgtctaaatgtattttacccaggacctgtcatggtttatctgagtgaccagtttcctttcctctcttgcttatttatcatgttcatatttatatttttcataatggggcctatttatatattttgaagtagttctagtgattttaagatccagcaaaacttcaaggtcatctggattttggtgttctatttaagttttctaacttgatacagtctttttttttttttttgtattttgtatgtttttctacaaaatgtgagagagttaagcatgtataattacatatgactgctgttttcactttgaaattttaaatcctgcttgggagaatggaataagctattgtgttttttgcaggcagctatgggatatcccaatttgtccctccctcctccttaattttgaagcctgagagaggaagtaataattttcttttttttttttttttttggtagggatggggtttgactatgctgtgcaggttggtctgcaactcctaagctcaagtgatccgccctcctccgcctcccaaagtgctgggattacaggcctgagccaccgtgcctggtctgaagaagtaataattttaagattcagtgttgagtgaaataaatgtattcttaaaaatttctaagagtgtttaactctctgacctaatatttaatattttccccaatcattaggaagtgcttttttgttgttgttgttgttttttttccaggcagggtctcgctctgtcacccaggctggagtgcagtggcatggtcacggctcactgcagccttgacttcccgggctcaagtgattctcccacctcagcctcccaaggagctggaactgctcagctaattttatttttgtagagacagggtctggctatgttccccaggctggtctcaaactcctgggctcaagcagtcctccaccactcctggccaagaagtgcctttttttttttttttttttttaaagtagctgctgaacacaggagaatctgcctttttcttgaatcgtggtttttttgtttttttttttttcaagacggagtgttgctgttgtcgcccgggctggagtgctgtggtgcgatcttggctaattgcaacctccgcctcccagattcaagcgattgtcctgcctcagcctcccgagtagctgagattacaggcacgcaccaccgtgcctggctaatttttgtgtttttagtagaaacaggatttcaccatgttggccaggctggtctcaaactcctgaccttgtgatccacctgcctcggcctcccaaagtgctgggtttacaggcgtgaaccactgcacccggcctgaatcatggttttttgaaaccattggcatctgaacctgtagctctctctggtagtgttgtgtggttttaaatgtcatgtgagctgagttactgacctcaacctactgccagatgaaggtgtgatcctgtgataccaatcttgagggtcccttctagttttagcagtcagtgacttctcttgtttatttttgtttgaaaaagtaaaaggctctctttttggctatagagttgcatcttgaaatttttgacaaattacatagagctgaagaaggatacaagttttgatatcttaaaatcacagggttgaagcttgaaaggacagtattggcattgcagctaagtgggagtgtgaggaagcgccttctctagggcaggtaattgcatctgttaatgtggtccttgggcccctgagttgctgccttccaatcagaattcccttagcattagccagtgacgcctgaattaatctcaggtaggacttctaacttttttccaaaattatttttgtgcagaggtttatctagatttttcttctaaatgtcctcctccccacttgttttattattactgtttttttctctctttaatttttttttttttttaatagagacatggtctcactatgttgcctgggctgatctcagactcctgggctcaagtgatcctcctgcctcagcttcccaaagtgctgggattataggcgtgagccattgcgcctggctctgttactgtttttctaacctgagttacttaggatcatattttcattcttttttaaaaagatgggagttttctgaacttttccttaactaaaaagtggaatgcatcttaatattttcctttttttacttgtgtttctccccagggagggaaaaacatatttattgtgacagaatttagcatattttaggccacattaaaatactgataaatgtattaatcagtgaaaataggttatagtgaaaaatatataccatttgattaataaaaatgttattggaaaaatgcaagaactgctgtaagaattgctaacattgtgttggaaaataaatatactaagctaagaaacaatgggaaactgtcatatgtagggccaacagcctttttttttttaaacccttccaatttattaatatctagtctaataaaccctgatttataggacctctgcaccttttttgactttttattcatccattcttaatattctacactatgacaaaatccttaaaactccattattgatgaaatgggaacagacttttgtttttgtatgttggtgttctctgagtggtgaaggcccagggagaatgttttgtttggtggtcacttagcatttgaaaacatccacttccttgtgacttagctgggtatcttttaacatctggaagccacgtccctgattgaaatctctggagacaacttacctttcaccaacttgtctgccaaattgcaccatggaccaagattgcagtggctgcatcaagtctaggcctgccctgaagtctggatttgtaagtcccccatttcaaatggggcagaaggcagaggagcagaggagccactgtgcctttcgctgtcctggagccagttggccttctggttttggtgaaccctgcttttataagaggactccctggcatcttccagtttcccgctacttgttttatgtattattttatgtctgtgtttgtcctggagtgctgtaactcctttcactgtctgctgtaagttcaacttcttcaataaaagaaatgtttcaaattggatgaaaaatggttctgtgattatggtttgtgggacgggttctgatgcttcatttatgttcttcatacggaattctgtctcatttccctagttctaaatatgaccagcagacccagagttccatctcgacttcataaaggagctgtcttggactgggaacagctgccaatgtctttgttgagatgggagttggaaagtgttagcactttgccagactttgccagcaagattaactgaggagatcaaattgagtcagggtcaaggctaatgtcttctgaagacttagcagagatccctcaactccaaaagctgtccatcccacatggcttccagaacaaggaggctgctagctccccaacaccatccatcacccttagccaggtgcctgacctccagcctgggtcccagctgtttactgagatacacctggccaagatagagaaaatgtttgaggaggacatcaactcgactggaggtaaggccgctctgtaggctcggtttttgtgtgagttctgcaacagggcaggaccgagtacctggggtgtgtggag

SEQ ID NO: 2605 - DNA, 3694 bp, Homo sapiens
gcggggtgggaacctcggaaacctgcggaggccgggaggcggctgcaaggggcggggaaggcgggagcccgcagcggaggaggggccgcgggcgggaggcgctgcgaggcgctgctggccctcgggctgcgggagccgggctaggacgccgagcggtgactccccgccgctcccgggggccgtgacgatgaggaaagtgaggcccaaagaagatttatgttcaggaccatttagtctgtaagtggagaagccggggtttggaaccagatggtctggctttggattttaactcttttactgtactgtttctcatactgcagcaatgatcagttcaaagatatataaggaatttaaagaacagcatgtagctccctgctttctaagctgaggatggctttctaatggcagattttggccaggagcttcattgagattatatccctcaacccagagatacacatgaattattgtaccataatttatgtgttcacactattttatgcagtctgagcccaactgggagatagattgagttctgttttttctggttcttaaaggagtagtcgtaggagatgctgcttcctgagcccctcacccactgaagcaacaatatgtgatggttaagagaatgggctctgcagtccaatgtggggttggggggttggaatcctgcctctgccacttgctagctctgtgaccttgggcaaattacctaacctctctgcctcaatttccttacctgtaaaaaggaaaaaataacagtgttgttgtgaagattgacttaattacatacgtaaagcatttagaatagctcctggcacatgtgttattaaaccagtaccctatgtcctagttatagtgtacttagttttccacctcttactctgttaaatatccacaaccttaagaagtagattatcatcaccccattttaaggtgaggaaaccatcttgaagagagcatcttggaaataagtgtcttcgtcaagatatgaatcagtctgttgacccgggcctctgaggctggcattgtttgcactgtactttccaactataaatcctctattggccacaaaacatcaggaaggcacattattaatatcagtttttgagtttgcaccattcatgtgtatttaaatttatgaggaagagtttatttctgtggaaaatatctggaaaatggcaccactcagaagaaataatttagattttaaattcataaagagtagattttctaagaggttggacttaatgtgtttctgtactgatgtgcgcatctgaacaattttaaggtgcagagatatttctaatggaattcaaagctacggtctcctttataacaaaatcatagttgaaggtggtattacagttttaaataattgtaatatatctagtttttaagagtcaatactgatgactaaattgttaagttttaggactgaatttgtaaaataggactaatgttaagtgacttagttttatcttcttaacccaacacttagttttatcttcttaacccaacagtgtggtaactctaactttgtgagattttagcaaagacttcagttagctctatttgtgaaaaattctgtgcaatatttagaagcccagatggtgtaaagttaccatgtccctctataatggaaagctattattttctgtcgactgaaattgttttagaattctgagtaggtaggcaattgtaccttctcaagtttgactttcaagtgaccttgaaaagaacacttaaagtactgtactttgtgagggaaatcttgtaatcagaatactgtgtttctgcagagctctctttcagtttgtagttgcagagatttgggggtgaagaggacaagacaaatgggaattgagagtaattcttttctgtaaaggattgactcttcttttgctacttttccattgctcttttcctttctccacctctacctgccagaatgaacatgttaatttgttatcagttatttgagtattcattgattatgccatcctttaagcttagtgggagggaggggatacagaaatgtaaaatgtgtggtacttgagagtgtggttgggaaagatgaaacaaaccaataagtatatggagggcttagagattgagctttgtgggctggagtagttggagaaggttatgtgatggggatggcggttgtgcactgttttgtaaaagcattagttttgaaatacgtgcaagaaggaagcacaggtggaggcacagaggctgaagtgagtgtgccacaagtgggactcggttcatattgtaaacatttactgagcacctgctatgtttcaggtactgttggctgcaaagatgcagacattccctgccctctagaagttcataaactagtcgggaagacatctaaccataatactatagaatgattaattgtaatactggatgatatcattgttaaaaacctgatcagtggcatttgtagtgtatggcatcatttttagttatgtttcagtaaattatggtttaagttttagaagggactccgaaatttctcaagaaatttatgtatatttaatatacatacttaaaaacttgtatgagttatctgttgcttcataacaaattactccgaaatttagcagctttaacagccagcttagaacagatgagtcaggaatctgagcacagcttagctgggtgctctggctcagggtgtctgactaggctgtcaaggtgttggacagggctgcagtcatctcagggtttgaatgaggtaaaatctagttctaaactcacttgtatggcttttggcaggcctcagatcctgctgacctcagacgtcagttccttgccacacggacctctcatagagttgcttacaacgtgatggcttgttttccccaggaggagggatttaagagggcaacaagtaaaaaaacaaccttaaatggaagccacagcctttttataacctaattttggaagtgaaatcccttcacttctgctatattctgtttgttggaagctagtcaataaatctagcccatactcaaggaacagaataacccaagagcgtgtccaccagaaggcagaaataactgagagccatcctagagactgcttacctaaagttctacaaggtattgttgtgtattgagaacctcttcgtctttggggtagaaggaaaaagatgagctagccaacgaactttactgatggaaaaaacagatgtgattaaccagaaaaaacaagatgtttttgctaaaggtctataaagttagtttcaatattgtgttgatatttacgatagagaagtataaacaagaacaaagctattgtttgtggccaagcagagaccaattttacaagtatgcctcaacttaattagtatataagttccagtgagaattgtatgctctgaatggactcattttaagtggattataagaacacaatcttctaaataaacagtggaaatcattttgattatattctattttcagttggatgtgcatgcacgatagagatttatgtgtacaaagttgaaaggttgaatagtgatagaatgaaaagagcacagagttgactgggcatggtggctcacgcctataatcccagcactttggaagtccgaggcgggcagatgacttgaagtcaggagttcaagaccagcctggccaacatggtgaaacaccatctctactaaaaatacaaaaat

SEQ ID NO: 2606 - DNA, 2108 bp, Homo sapiens
gttcagcttgctcgtcatccctaggctatgagccacaaagcaggactgtggcccagcttaagtccagtgctaacctgtgggtgaatgaacaatgaccggggaacagggccctaagtaggtcctggctaatgctgggaaaacaccaagctgaagaagacatgtttcctgccctccagcaaagagatagagtccaagcaaataactacaacagatgtgaacgcggaagcacaaaggaagaagctaatgcttcctgggagaggtgacatttcttctgggtttcgatacttcttctagtcctctcacatcttaaatctccattctcagtattctcagtggagcattttattctgcttctatgatttggggcaaaaagaagagaatctatttgataaagtacttctagaaagactggcagaaaagactctgaaagactttctcaggagtaagaaacaacacaactttcttaatattcctgtgctgttttcacatgcaaaaaatactttccccctcctacctcatcggtagggcaatggacaaaatggcttttcttatagtaaatagcatgttccatgtaagacgaggccatgatctcccttttttgcacttcaaaatattttaaaattgctggattattttttcctctccattcttccttctgtggcttgacaattactaaagctggtatgattgataacacgactcaagttagaggaagtcttttttttcttgagatggagtctggctctgtctcccaggttggagtgcagcgactgcgaactcggctcactgcaaactagaggaggcctttttttttttaaatcaaagagcctcttttaaaattataacccattgggaatatgctgtggggaggtctctcacagcagtgtgaaagagcacattatctttttttttttttttttgagacggagtctcgctctgtcacccaggctggagtgcagtgacgcgatctgggctcactgcaagctctgcctcccgggttcacgccattctcctgcctcagcctcccaagtagctgggactacaggcgcccgccaccacgccaggctaattttttgtatttttagtcgagacggggtttcaccgtgttagccaggatgatctcgatcttctgacctcgtgatccgcccgtctcagcctcccaaagtgctggaattacaggcgtgagccactgcacccggcaagagcacattatcttgtatgtgcctgtagcccatctgcagacatgaaacccaagtccctgttctcccaagtgcaatggaaacatctcctctcctgcggatgaactgaataagggatagtgaagcatatttttaaatgtttgctattgctcgttagccacagtaggaatttcaataccagtggcagtgggatccctcattttattgtagatgccttttttcatttcagcttacaaagcttccctccgttggagggtgggggccgcagaaataaaatggaaggcaaaggggggatgcgctgcgatttttctgctcattgtctcattttgaaactgccccaactgtatagaacttctaggaagcccgtacatgtcggcacattcccggggaagaatgcttctcttaggagccagtgccttaagaagtttcttccgtgttgcactggcatgcatgtctgcttaaatcgccactctcctcatgacatttggcaggactaggaagttcacgtgtcagtcccgctattggcccacgtgaccccatccccaaagacaggcagtgaacccctgtgtttttatgccatatgaactgagaagtagacgcattctgtgtaatggatacacactgaggctgcaatttttgaaaagtcattgttttgacttccctatattcacatcgaataacgcttttagtctttgccctcagtactctagaaggggctatatagcctgtttttgtatttgtgggaaaaagactagaagctgggcaaaatgccaccaggaagactaacatggcgacgtgatcccaagggaaactgaggtctcacactgtccagcaacagaaggaggttgaattctggaggaggtttaattttttaaaaactcaaactaataaaagatgttcacaaatatt
